United States Patent Application Publication US 2023/0026259 A1 - sequence listing, part 84

SEQ ID NO: 190096 - DNA, 14000 bp, Homo sapiens
  Payload ID: 17537
  Gene Symbol: TENM4
  Gene Name: teneurin transmembrane protein 4
  Uniprot ID: Q6N022
  ENST ID: ENST00000278550
  CDS Start-End: 464-8773
acctgctccttcctgggcgccccgctacggctcgcggagcagaggagccgcgccgccgagagagagaggagccaccggcgcggcgccttgcctccctgccgccgtcctcgccgcttccccggcggtagcagcctgcagccacgatggaaaaactgagaatcagagagggctagtgatctctcagacacttggtcggtagaaaagatcccgcaccatcctccaggatccaatggccttggagagagggctgcagggcccacggacattgctgactcttcagaacgtgctgacatggagccaggtagactgaaattaccatgtgtccaaattaaaattgcatacttcaaggattatttgaaggactattcttagacccttttaagaagatttaaagaaaaaccactcggccctgagtgcggcgaggaccctgtttgtggatgtggaggagcgcgggccggaggccatggacgtgaaggagaggaagccttaccgctcgctgacccggcgccgcgacgccgagcgccgctacaccagctcgtccgcggacagcgaggagggcaaagccccgcagaaatcgtacagctccagcgagaccctgaaggcctacgaccaggacgcccgcctagcctatggcagccgcgtcaaggacattgtgccgcaggaggccgaggaattctgccgcacaggtgccaacttcaccctgcgggagctggggctggaagaagtaacgccccctcacgggaccctgtaccggacagacattggcctcccccactgcggctactccatgggggctggctctgatgccgacatggaggctgacacggtgctgtcccctgagcaccccgtgcgtctgtggggccggagcacacggtcagggcgcagctcctgcctgtccagccgggccaattccaatctcacactcaccgacaccgagcatgaaaacactgagactgatcatccgggcggcctgcagaaccacgcgcggctccggacgccgccgccgccgctctcgcacgcccacacccccaaccagcaccacgcggcctccattaactccctgaaccggggcaacttcacgccgaggagcaaccccagcccggcccccacggaccactcgctctccggagagccccctgccggcggcgcccaggagcctgcccacgcccaggagaactggctgctcaacagcaacatccccctggagaccagaaacctaggcaagcagccattcctagggacattgcaggacaacctcattgagatggacattctcggcgcctcccgccatgatggggcttacagtgacgggcacttcctcttcaagcctggaggcacctccccgctcttctgcaccacatcaccagggtacccactgacgtccagcacagtgtactctcctccgccccgacccctgccccgcagcaccttcgcccggccggcctttaacctcaagaagccctccaagtactgtaactggaagtgcgcagccctgagcgccatcgtcatctcagccactctggtcatcctgctggcatactttgtggccatgcacctgtttggcctaaactggcacctgcagccgatggaggggcagatgtatgagatcacggaggacacagccagcagttggcctgtgccaaccgacgtctccctatacccctcagggggcactggcttagagacccctgacaggaaaggcaaaggaaccacagaaggaaagcccagtagtttctttccagaggacagtttcatagattctggagaaattgatgtgggaaggcgagcttcccagaagattcctcctggcactttctggagatctcaagtgttcatagaccatcctgtgcatctgaaattcaatgtgtctctgggaaaggcagccctggttggcatttatggcagaaaaggcctccctccttcacatacacagtttgactttgtggagctgctggatggcaggaggctcctaacccaggaggcgcggagcctagaggggaccccgcgccagtctcggggaactgtgcccccctccagccatgagacaggcttcatccagtatttggattcaggaatctggcacttggctttttacaatgacggaaaggagtcagaagtggtttcctttctcaccactgccattgagtcggtggataactgccccagcaactgctatggcaatggtgactgcatctctgggacctgccactgcttcctgggtttcctgggccccgactgtggcagagcctcctgccccgtgctctgtagcggaaatggccaatacatgaaaggcagatgcttgtgccacagtggctggaaaggcgctgagtgcgatgtgcccaccaaccagtgtatcgatgtggcctgcagcaaccatggcacctgcatcacgggcacctgcatctgcaaccctggctacaagggcgagagctgtgaggaagtggactgcatggaccccacatgttcaggccggggtgtctgcgtgagaggcgaatgccactgctctgtgggatggggaggcaccaactgcgagacccccagggccacatgcttagaccagtgttcaggccacggaaccttcctcccggacaccgggctttgcagctgtgacccaagctggactggacacgactgttctatcgagatctgtgctgccgactgtggtggccatggcgtgtgcgtagggggcacctgccgctgcgaggatggctggatgggggcagcctgcgaccagcgggcctgccacccgcgctgtgccgagcatgggacctgccgcgacggcaagtgcgagtgcagccctggctggaatggcgaacactgcaccatcgctcactatctggatagggtagttaaagagggttgccctgggttgtgcaatggcaacggcagatgtaccttagacctgaatggttggcactgcgtctgccagctgggctggagaggagctggctgtgacacttccatggagactgcctgcggtgacagcaaagacaatgatggagatggcctggtggactgcatggaccctgactgctgcctccagcccctgtgccatatcaacccgctgtgccttggctcccctaaccctctggacatcatccaggagacacaggtccctgtgtcacagcagaacctacactccttctatgaccgcatcaagttcctcgtgggcagggacagcacgcacataatccccggggagaacccctttgatggagggcatgcttgtgttattcgtggccaagtgatgacatcagatggaacccccctggttggtgtgaacatcagttttgtcaataaccctctctttggatatacaatcagcaggcaagatggcagctttgacttggtgacaaatggcggcatctccatcatcctgcggttcgagcgggcacctttcatcacacaggagcacaccctgtggctgccatgggatcgcttctttgtcatggaaaccatcatcatgagacatgaggagaatgagattcccagctgtgacctgagcaattttgcccgccccaacccagtcgtctctccatccccactgacgtccttcgccagctcctgtgcagagaaaggccccattgtgccggaaattcaggctttgcaggaggaaatctctatctctggctgcaagatgaggctgagctacctgagcagccggacccctggctacaaatctgtcctgaggatcagcctcacccacccgaccatccccttcaacctcatgaaggtgcacctcatggtagcggtggagggccgcctcttcaggaagtggttcgctgcagccccagacctgtcctattatttcatttgggacaagacagacgtctacaaccagaaggtgtttgggctttcagaagcctttgtttccgtgggttatgaatatgaatcctgcccagatctaatcctgtgggaaaaaagaacaacagtgctgcagggctatgaaattgacgcgtccaagcttggaggatggagcctagacaaacatcatgccctcaacattcaaagtggcatcctgcacaaagggaatggggagaaccagtttgtgtctcagcagcctcctgtcattgggagcatcatgggcaatgggcgccggagaagcatctcctgccccagctgcaacggccttgctgacggcaacaagctcctggccccagtggccctcacctgtggctctgacgggagcctctatgtgggtgatttcaactacattagaaggatcttcccctctggaaatgtcaccaacatcctagagctgagaaataaagatttcagacatagtcacagtccagcacacaaatactacctggccacagaccccatgagtggggccgtcttcctttctgacagcaacagccggcgggtctttaaaatcaagtccactgtggtggtgaaggaccttgtcaagaactctgaggtggttgcggggacaggtgaccagtgcctcccctttgatgacactcgctgcggggatggtgggaaggccacagaagccacactcaccaatcccaggggcattacagtggacaagtttgggctgatctacttcgtggatggcaccatgatcagacgcatcgatcagaatgggatcatctccaccctgctcggctctaatgatctcacatcagcccggccactcagctgtgattctgtcatggatatttcccaggttcacctggagtggcccacagacttagccatcaacccaatggacaactcactttatgtcctcgacaacaatgtggtcctgcaaatctctgaaaaccaccaggtgcgcattgtcgccgggaggcccatgcactgccaggtccctggcattgaccacttcctgctaagcaaggtggccatccacgcaaccctggagtcagccaccgctttggctgtttcacacaatggggtcctgtatattgctgagactgatgagaaaaagatcaaccgcatcaggcaggtcaccactagtggagagatctcactcgttgctggggcccccagtggctgtgactgtaaaaatgatgccaactgtgattgtttttctggagacgatggttatgccaaggatgcaaagttaaataccccatcttccttggctgtgtgtgctgatggggagctctacgtggccgaccttgggaacatccgaattcggtttatccggaagaacaagcctttcctcaacacccagaacatgtatgagctgtcttcaccaattgaccaggagctctatctgtttgataccaccggcaagcacctgtacacccaaagcctgcccacaggagactacctgtacaacttcacctacactggggacggcgacatcacactcatcacagacaacaatggcaacatggtaaatgtccgccgagactctactgggatgcccctctggctggtggtcccagatggccaggtgtactgggtgaccatgggcaccaacagtgcactcaagagtgtgaccacacaaggacacgagttggccatgatgacataccatggcaattccggccttctggcaaccaaaagcaatgaaaacggatggacaacattttatgagtacgacagctttggccgcctgacaaatgtgaccttccctactggccaggtgagcagtttccgaagtgatacagacagttcagtgcatgtccaggtagagacctccagcaaggatgatgtcaccataaccaccaacctgtctgcctcaggcgccttctacacactgctgcaagaccaagtccggaacagctactacatcggggccgatggctccttgcggctgctgctggccaacggcatggaggtggcgctgcagactgagccccacttgctggctggcaccgtcaaccccaccgtgggcaagaggaatgtcacgctgcccatcgacaacggcctcaacctggtggagtggcgccagcgcaaagagcaggctcggggccaggtcactgtctttgggcgccggctgcgggttcacaaccgaaatctcctatctctggactttgatcgcgtaacacgcacagagaagatctatgatgaccaccgcaagttcacccttcggattctgtacgaccaggcggggcggcccagcctctggtcacccagcagcaggctgaatggtgtcaacgtgacatactcccctgggggttacattgctggcatccagaggggcatcatgtctgaaagaatggaatacgaccaggcgggccgcatcacatccaggatcttcgctgatgggaagacatggagctacacatacttagagaagtccatggtgctgctactacacagccagaggcagtatatctttgagttcgacaagaatgaccgcctctcttctgtgacgatgcccaacgtggcgcggcagacactagagaccatccgctcagtgggctactacagaaacatctatcagccccctgagggcaatgcctcagtcatacaggacttcactgaggatgggcacctccttcacaccttctacctgggcactggccgcagggtgatatacaagtatggcaaactgtcaaagctggcagagacgctctatgacaccaccaaggtcagtttcacctatgacgagacggcaggcatgctgaagaccatcaacctacagaatgagggcttcacctgcaccatccgctaccgtcagattgggcccctgattgaccgacagatcttccgcttcactgaggaaggcatggtcaacgcccgttttgactacaactatgacaacagcttccgggtgaccagcatgcaggctgtgatcaacgagaccccactgcccattgatctctatcgctatgatgatgtgtcaggcaagacagagcagtttgggaagtttggtgtcatttactatgacattaaccagatcatcaccacagctgtcatgacccacaccaagcattttgatgcatatggcaggatgaaggaagtgcagtatgagatcttccgctcgctcatgtactggatgaccgtccagtatgataacatggggcgagtagtgaagaaggagctgaaggtaggaccctacgccaataccactcgctactcctatgagtatgatgctgacggccagctgcagacagtctccatcaatgacaagccactctggcgctacagctacgacctcaatgggaacctgcacttactgagccctgggaacagtgcacggctcacaccactacggtatgacatccgcgaccgcatcactcggctgggtgacgtgcaatacaagatggatgaggatggcttcctgaggcagcggggcggtgatatctttgagtacaactcagctggcctgctcatcaaggcctacaaccgggctggcagctggagtgtcaggtaccgctacgatggcctggggcggcgcgtgtccagcaagagcagccacagccaccacctgcagttcttctatgcagacctgaccaaccccaccaaggtcacccacctgtacaaccactccagctctgagatcacctccctctactacgacttgcaaggacacctctttgccatggagctgagcagtggtgatgagttttacatagcttgtgacaacatcgggacccctcttgctgtctttagtggaacaggtttgatgatcaagcaaatcctgtacacagcctatggggagatctacatggataccaaccccaactttcagatcatcataggctaccatggtggcctctatgatccactcaccaagcttgtccacatgggccggcgagattatgatgtgctggccggacgctggactagcccagaccacgagctgtggaagcaccttagtagcagcaacgtcatgccttttaatctctatatgttcaaaaacaacaaccccatcagcaactcccaggacatcaagtgcttcatgacagatgttaacagctggctgctcacctttggattccagctacacaacgtgatccctggttatcccaaaccagacatggatgccatggaaccctcctacgagctcatccacacacagatgaaaacgcaggagtgggacaacagcaagtctatcctcggggtacagtgtgaagtacagaagcagctcaaggcctttgtcaccttagaacggtttgaccagctctatggctccacaatcaccagctgccagcaggctccaaagaccaagaagtttgcatccagcggctcagtctttggcaagggggtcaagtttgccttgaaggatggccgagtgaccacagacatcatcagtgtggccaatgaggatgggcgaagggttgctgccatcttgaaccatgcccactacctagagaacctgcacttcaccattgatggggtggatacccattactttgtgaaaccaggaccttcagaaggtgacctggccatcctgggcctcagtggggggcggcgaaccctggagaatggggtcaacgtcactgtgtcccagatcaacacagtacttaatggcaggactagacgctacacagacatccagctccagtacggggcactgtgcttgaacacacgctacgggacaacgttggatgaggagaaggcacgggtcctggagctggcccggcagagagccgtgcgccaagcgtgggcccgcgagcagcagagactgcgggaaggggaggaaggcctgcgggcctggacagagggggagaagcagcaggtgctgagcacagggcgggtgcaaggctacgacggctttttcgtgatctctgtcgagcagtacccagaactgtcagacagcgccaacaacatccacttcatgagacagagcgagatgggccggaggtgacagagaggaccaaggacttcttgccaaagacagctactcttttgtggccgcatacctgactgtgttgtacttttaaaaaaatgattttttaacaagtgcagaaacaaaaagatactggttgcattgtaactcatgcaacatccttttttttagaaaagaaaaacacagatttggccttcgcacattttttgcaaagaacagaaggtatttttttctgtagtgtgatcacaatgaaaactttattgtcttttgttccctttttccttgaggatttttcccttgtcgtttggggtatgtatctcctctctgagatgcatctcctggggtgtgtcctcgtctgtccctaggtacccagtgtgatgtgggacatgaatgtctgtgctaacttgtctcatgtgcaaccctttcttcttcgactggggtcgggcaggagtaaagggagtgatgggccagtacaacaccccttccaagggggcctgggaggagggtctgtaggacctgaggctccttggcagggctcctgcagaagagtggtggatttcttctcaccttgttctctgcctccagaggatcatagatggcttcatcttgctccagggaatttcatggtgttgttcagcaccttttttaagctgccccaaactcctgttcaagctttctattttgatgctgaatgaaaccccctaccacttttgcaaatcctgtgtagttgtcggtgccacccccatgctgggatagagaaagtgtctcccaggtcctttcccccagaccagtgacataacatcctgggctcagagtcccatcctcccgggagggaaagcacccaggatgcctgtgattggttggtcctccatgatgttcctgttcatctcctcctttctcccaaagccagatgtgagaacgagcactgcacagcaagccttcaatgtgggcaccatgtccacagaacagaaggccacccatggcaaaggcatggcagtggtggcgagggcaccagcctgccttccgaggcaaagccctctctctatgactttgagtatcttccctccaccactcagccgccaccactgagacgtaggaatgtggagggaggtgcttggtggcctttgattctggaaaaatgcttaacaaaaaaagccagccaaagagaggaaggcataagctaagcatccttctaaccagttcccaaagtcccatctgcctccatgtaccagctgatcgcagagctggactggggcaggctgggcttccaggaaattcctgaagttctgaaacagcttcccctctagagaagcccacccaatgtgttttttagtgacaggaagaaaggagggaagagctgatgtggtgtggcctgcccatatcatacaaccccaccaggagcagggcagttcccaaggtgggtgcccgtagatctgggaggccaggctggcatgattcctgtgaagaactgtgcctgtgtcgtcagggagaggcctgagccctctcagaagcagggacagcccacacctgaagagcacgcccaagctgaggcagcagccagcaggctgggggagcagtgagggcagggggagtcacagccagagctgggagccccttgttcaaggattccattcctggttcatccgcctaattaccattgtcattaccactcacaggaggctctgggagatgggaggggaagccaaatgcttccttttaagctgggcttcttagaaaatggaacttttatgggttacatttacattaagtgtggaaaatgaattctgagtctgagctattccccgtggaaaccttgttggactgataagctcatggcacctctatagccttactcacatagtcttcagaatattacacaagttaatgaaactgagaaggtctgactgcatgaggatcggagcagcatgtagtctgggttctgcctggcagagggaggcaaccaaaacttcttggggagaggagatttcgccttaacgtcatcccactgggattagaggatgtgtttcgctaagtgctcttcctgtttccaaaaaaaaagccaccctgctgcagcagtgcgctttggcctgcttgtccactggttgcccattgcccctggatccagagctctactgagtcagatacagtgctctgcaggcctgctgtgggaggcatgagctggagatgggggctcccatctggcaggatcattcttggatgagatggaaaacagtttggcctgaagaacacaagttttgtcctccagaagggacttacgcctctcaaaatgtactcttcataccaagggcccttgggcaaagtgctcctgcccagttgatcagtcccatcctggctgcctgacatcagtgaagacctgctggggatgtctgctcagaggtcaggaacggcatgcggtccacaggaaccagctccctacgcttcccccacgccctgtccctcctccacagccccctccccaaaggaatagggtggacttttagggatcaaaaacagaattattgggtgtttcatttatttttttctttctttcttttttttttcatagagatggggtctcactatgttgcccaggctgttctcaaactcctggcctcaggcgatccaccttggcctcctgaagtgctggggttacaggtgtgagccactgcgcctggactgagtgtttgtttctttaaaggatcttatatttttcctgtgctacataccaccacagcagcccagcttctgtggggagagaagttgaaggatcccgaagctttagaaaaaggatctcagctgtggcacaggcagtgttatgcgcctcactgccacattggtgctgttgtattgaaggtggtgcttctggccttggcccttttgagttggtttccatttgggctgcaggtgactcagtgactccctcctcaagctgtcctcctgctaagaccagcagtcacaaacccatggcaagggtgagtgtgaaggcctaaccctgtgcctatgtaataggctccaagcatcgactcccatcctgagaggaccggcccttttgacactcaccaaccaaatctgttcattcgatagagtgaccaggcctccctcacctgcccaggtgtatgatcctacagttcctgccttctctcctaccccgcacagctgccaactggtcctacatcctcagcccctctgccaccaccttaaataggactttactgattccccaactttgtttttttgtaggatgagatttcctttttatcccacccccccacaccccaaacagacattgctggagggcagactggaggaaggggaaggcatgcaggtaaattactgccttgtcagcctctgaccctcatctctcagaattgttggctgagaattaacccaaggaccacaccagtgcctgatttctacttagggagagaggattggaaacgatccctaagaaactgactgagggtgagaatggccaggaggtgtgtgtccaaataaccaggagggggcacagaagatgatggcaaggcagactgggcagtgttttgtagacacagaacaaagaatcagaatttgaaaaaagaagaaaaacaaatcttcgcagctgcaactttaaagtatcacctttatagatggcagggatttccattatgcaaatggaatctaagatttcaatgtgaaatcttagaatgcagttttaccacttgcagtcttgtatttgtggtggccatgtggtgagggcggtgatgctgagctttctgcccaggaggaatgagctttcaagctctcagcagggtgtcaggcttggggatttgagcatccactgctcaaagtccaggctattctccagtcctcacggcagccactaagcccaggagccagacctggcccggggacacatctcctgagggatcccagaaagaacccagtctttcctttcccttggggtccttgttagaatgaaaacctctctatttaaggcacatcattcccagctaggtttatacacttgtctatattttactggaggaaagggaattaaaaaagaactctgcagttcaaggccctttcatttaaccttccaaaaacagcaaactcattttaaagactcattgctgaggtgatagagagaaaccttatcctctccaaccttcacattcacaaaaaccatccttgtgtacttgactgccctagacagtggtgactcttaggtttcattacgaatgtggaatatcagagtgtgggaaggcccaggcgagggccaatgttgtgtttcttaccccctctggaatgccaaaggcaaggtactaggtgacctcctggtccccaagaaaatgtgatttattctgagggcgaacagccaagggaggactagtctggagcacgctcggccgtcctggcaggagctgagcctcaggtgtctggcggtgccccagcagccctggattcacccaacaccagaatcccacttttctaaatccacctgttgttctgagcacctctgaacccgcagcttcggcaaaaggagtctgtaccaagctgcttctggatgaccaacactggagactctggccttaccatgtggaaatcattttcctgaagtctggaactaattttgagaagtttttttctcaacacttttgtgtttctaacactgtatcttgactgtgtaaataccaacaaggctgtaaataaatgcagatgtagataccttctagaaaaaaaaaagcataaaaacaaaaccagaagtgatcccgtgtagccttcgttgacaaataaagactattttgtgtttacaggtgtctggtggcctttgcttggagataaaggcttcctcttgcctgtcccagcccccgagccatcctgggtttgcacttccctgctggctgctatcaggatgacctgggagaggactcagtcctaggccccagggtccctctaaatccctccaggctgcagctctgtcaagagggatgtccagagggtctctaagaccctgaagcttgactttgcaattgcatgacaggaataaatatcacagctcctctgacatcactagtgcagcgtggctccccatcccactgctgccctcgttcagggacaggctgaaggggccaacgaacccaaccctcccagaggagggagccttgctccaccactgggcacacagagtcatccaccatgccactgccttccacaagggatgtgagccgttgcactttaaaaataaatgactgtatattcatca

SEQ ID NO: 190097 - DNA, 3048 bp, Homo sapiens
  Payload ID: 17537
  Gene Symbol: TENM4
  Gene Name: teneurin transmembrane protein 4
  ENST ID: ENST00000530738
  CDS Start-End: 1-2856
aataccccatcttccttggctgtgtgtgctgatggggagctctacgtggccgaccttgggaacatccgaattcggtttatccggaagaacaagcctttcctcaacacccagaacatgtatgagctgtcttcaccaattgaccaggagctctatctgtttgataccaccggcaagcacctgtacacccaaagcctgcccacaggagactacctgtacaacttcacctacactggggacggcgacatcacactcatcacagacaacaatggcaacatggtaaatgtccgccgagactctactgggatgcccctctggctggtggtcccagatggccaggtgtactgggtgaccatgggcaccaacagtgcactcaagagtgtgaccacacaaggacacgagttggccatgatgacataccatggcaattccggccttctggcaaccaaaagcaatgaaaacggatggacaacattttatgagtacgacagctttggccgcctgacaaatgtgaccttccctactggccaggtgagcagtttccgaagtgatacagacagttcagtgcatgtccaggtagagacctccagcaaggatgatgtcaccataaccaccaacctgtctgcctcaggcgccttctacacactgctgcaagaccaagtccggaacagctactacatcggggccgatggctccttgcggctgctgctggccaacggcatggaggtggcgctgcagactgagccccacttgctggctggcaccgtcaaccccaccgtgggcaagaggaatgtcacgctgcccatcgacaacggcctcaacctggtggagtggcgccagcgcaaagagcaggctcggggccaggtcactgtctttgggcgccggctgcgggttcacaaccgaaatctcctatctctggactttgatcgcgtaacacgcacagagaagatctatgatgaccaccgcaagttcacccttcggattctgtacgaccaggcggggcggcccagcctctggtcacccagcagcaggctgaatggtgtcaacgtgacatactcccctgggggttacattgctggcatccagaggggcatcatgtctgaaagaatggaatacgaccaggcgggccgcatcacatccaggatcttcgctgatgggaagacatggagctacacatacttagagaagtccatggtgctgctactacacagccagaggcagtatatctttgagttcgacaagaatgaccgcctctcttctgtgacgatgcccaacgtggcgcggcagacactagagaccatccgctcagtgggctactacagaaacatctatcagccccctgagggcaatgcctcagtcatacaggacttcactgaggatgggcacctccttcacaccttctacctgggcactggccgcagggtgatatacaagtatggcaaactgtcaaagctggcagagacgctctatgacaccaccaaggtcagtttcacctatgacgagacggcaggcatgctgaagaccatcaacctacagaatgagggcttcacctgcaccatccgctaccgtcagattgggcccctgattgaccgacagatcttccgcttcactgaggaaggcatggtcaacgcccgttttgactacaactatgacaacagcttccgggtgaccagcatgcaggctgtgatcaacgagaccccactgcccattgatctctatcgctatgatgatgtgtcaggcaagacagagcagtttgggaagtttggtgtcatttactatgacattaaccagatcatcaccacagctgtcatgacccacaccaagcattttgatgcatatggcaggatgaaggaagtgcagtatgagatcttccgctcgctcatgtactggatgaccgtccagtatgataacatggggcgagtagtgaagaaggagctgaaggtaggaccctacgccaataccactcgctactcctatgagtatgatgctgacggccagctgcagacagtctccatcaatgacaagccactctggcgctacagctacgacctcaatgggaacctgcacttactgagccctgggaacagtgcacggctcacaccactacggtatgacatccgcgaccgcatcactcggctgggtgacgtgcaatacaagatggatgaggatggcttcctgaggcagcggggcggtgatatctttgagtacaactcagctggcctgctcatcaaggcctacaaccgggctggcagctggagtgtcaggtaccgctacgatggcctggggcggcgcgtgtccagcaagagcagccacagccaccacctgcagttcttctatgcagacctgaccaaccccaccaaggtcacccacctgtacaaccactccagctctgagatcacctccctctactacgacttgcaaggacacctctttgccatggagctgagcagtggtgatgagttttacatagcttgtgacaacatcgggacccctcttgctgtctttagtggaacaggtttgatgatcaagcaaatcctgtacacagcctatggggagatctacatggataccaaccccaactttcagatcatcataggctaccatggtggcctctatgatccactcaccaagcttgtccacatgggccggcgagattatgatgtgctggccggacgctggactagcccagaccacgagctgtggaagcaccttagtagcagcaacgtcatgccttttaatctctatatgttcaaaaacaacaaccccatcagcaactcccaggacatcaagtgcttcatgacagagaggaccaaggacttcttgccaaagacagctactcttttgtggccgcatacctgactgtgttgtacttttaaaaaaatgattttttaacaagtgcagaaacaaaaagatactggttgcattgtaactcatgcaacatccttttttttagaaaagaaaaacacagatttggccttcgcacattttttgcaaagaacagaaggtatttttttctgtagtgtgatcacaatgaaaactttattgtctttt

SEQ ID NO: 190098 - DNA, 453 bp, Homo sapiens
  Payload ID: 17537
  Gene Symbol: TENM4
  Gene Name: teneurin transmembrane protein 4
  ENST ID: ENST00000533525
  CDS Start-End: 1-453
ccaactgcgagacccccagggccacatgcttagaccagtgttcaggccacggaaccttcctcccggacaccgggctttgcagctgtgacccaagctggactggacacgactgttctatcgagatctgtgctgccgactgtggtggccatggcgtgtgcgtagggggcacctgccgctgcgaggatggctggatgggggcagcctgcgaccagcgggcctgccacccgcgctgtgccgagcatgggacctgccgcgacggcaagtgcgagtgcagccctggctggaatggcgaacactgcaccatcgagggttgccctgggttgtgcaatggcaacggcagatgtaccttagacctgaatggttggcactgcgtctgccagctgggctggagaggagctggctgtgacacttccatggagactgcctgcggtgacagcaaagacaatgatggag

SEQ ID NO: 190099 - DNA, 524 bp, Homo sapiens
  Payload ID: 17537
  Gene Symbol: TENM4
  Gene Name: teneurin transmembrane protein 4
  ENST ID: ENST00000533074
  CDS Start-End: 54-524
gatgctgaagctgctggtccctggccacactttaaaaaccacgtcctaaaagcatgaaacaatgtgaagttgctgagatggatcatccgggcggcctgcagaaccacgcgcggctccggacgccgccgccgccgctctcgcacgcccacacccccaaccagcaccacgcggcctccattaactccctgaaccggggcaacttcacgccgaggagcaaccccagcccggcccccacggaccactcgctctccggagagccccctgccggcggcgcccaggagcctgcccacgcccaggagaactggctgctcaacagcaacatccccctggagaccagaaacctaggcaagcagccattcctagggacattgcaggacaacctcattgagatggacattctcggcgcctcccgccatgatggggcttacagtgacgggcacttcctcttcaagcctggaggcacctccccgctcttctgcaccacatcaccagggtacccactgacgtccagcacagtgtactct

SEQ ID NO: 190100 - DNA, 170 bp, Homo sapiens
  Payload ID: 17537
  Gene Symbol: TENM4
  Gene Name: teneurin transmembrane protein 4
  ENST ID: ENST00000527736
  CDS Start-End: 31-33
aaaagatcccgcaccatcctccaggatccaatggccttggagagagggctgcagggcccacggacattgctgactcttcagaacgtgctgacatggagccagaccactcggccctgagtgcggcgaggaccctgtttgtggatgtggaggagcgcgggccggaggccatg

SEQ ID NO: 190101 - DNA, 13350 bp, Homo sapiens
  Payload ID: 17537
  Gene Symbol: TENM4
  Gene Name: teneurin transmembrane protein 4
  Uniprot ID: Q6N022
  ENST ID: ENST00000612046
  CDS Start-End: 267-8576
agaaaagatcccgcaccatcctccaggatccaatggccttggagagagggctgcagggcccacggacattgctgactcttcagaacgtgctgacatggagccaggtagactgaaattaccatgtgtccaaattaaaattgcatacttcaaggattatttgaaggactattcttagacccttttaagaagatttaaagaaaaaccactcggccctgagtgcggcgaggaccctgtttgtggatgtggaggagcgcgggccggaggccatggacgtgaaggagaggaagccttaccgctcgctgacccggcgccgcgacgccgagcgccgctacaccagctcgtccgcggacagcgaggagggcaaagccccgcagaaatcgtacagctccagcgagaccctgaaggcctacgaccaggacgcccgcctagcctatggcagccgcgtcaaggacattgtgccgcaggaggccgaggaattctgccgcacaggtgccaacttcaccctgcgggagctggggctggaagaagtaacgccccctcacgggaccctgtaccggacagacattggcctcccccactgcggctactccatgggggctggctctgatgccgacatggaggctgacacggtgctgtcccctgagcaccccgtgcgtctgtggggccggagcacacggtcagggcgcagctcctgcctgtccagccgggccaattccaatctcacactcaccgacaccgagcatgaaaacactgagactgatcatccgggcggcctgcagaaccacgcgcggctccggacgccgccgccgccgctctcgcacgcccacacccccaaccagcaccacgcggcctccattaactccctgaaccggggcaacttcacgccgaggagcaaccccagcccggcccccacggaccactcgctctccggagagccccctgccggcggcgcccaggagcctgcccacgcccaggagaactggctgctcaacagcaacatccccctggagaccagaaacctaggcaagcagccattcctagggacattgcaggacaacctcattgagatggacattctcggcgcctcccgccatgatggggcttacagtgacgggcacttcctcttcaagcctggaggcacctccccgctcttctgcaccacatcaccagggtacccactgacgtccagcacagtgtactctcctccgccccgacccctgccccgcagcaccttcgcccggccggcctttaacctcaagaagccctccaagtactgtaactggaagtgcgcagccctgagcgccatcgtcatctcagccactctggtcatcctgctggcatactttgtggccatgcacctgtttggcctaaactggcacctgcagccgatggaggggcagatgtatgagatcacggaggacacagccagcagttggcctgtgccaaccgacgtctccctatacccctcagggggcactggcttagagacccctgacaggaaaggcaaaggaaccacagaaggaaagcccagtagtttctttccagaggacagtttcatagattctggagaaattgatgtgggaaggcgagcttcccagaagattcctcctggcactttctggagatctcaagtgttcatagaccatcctgtgcatctgaaattcaatgtgtctctgggaaaggcagccctggttggcatttatggcagaaaaggcctccctccttcacatacacagtttgactttgtggagctgctggatggcaggaggctcctaacccaggaggcgcggagcctagaggggaccccgcgccagtctcggggaactgtgcccccctccagccatgagacaggcttcatccagtatttggattcaggaatctggcacttggctttttacaatgacggaaaggagtcagaagtggtttcctttctcaccactgccattgagtcggtggataactgccccagcaactgctatggcaatggtgactgcatctctgggacctgccactgcttcctgggtttcctgggccccgactgtggcagagcctcctgccccgtgctctgtagcggaaatggccaatacatgaaaggcagatgcttgtgccacagtggctggaaaggcgctgagtgcgatgtgcccaccaaccagtgtatcgatgtggcctgcagcaaccatggcacctgcatcacgggcacctgcatctgcaaccctggctacaagggcgagagctgtgaggaagtggactgcatggaccccacatgttcaggccggggtgtctgcgtgagaggcgaatgccactgctctgtgggatggggaggcaccaactgcgagacccccagggccacatgcttagaccagtgttcaggccacggaaccttcctcccggacaccgggctttgcagctgtgacccaagctggactggacacgactgttctatcgagatctgtgctgccgactgtggtggccatggcgtgtgcgtagggggcacctgccgctgcgaggatggctggatgggggcagcctgcgaccagcgggcctgccacccgcgctgtgccgagcatgggacctgccgcgacggcaagtgcgagtgcagccctggctggaatggcgaacactgcaccatcgctcactatctggatagggtagttaaagagggttgccctgggttgtgcaatggcaacggcagatgtaccttagacctgaatggttggcactgcgtctgccagctgggctggagaggagctggctgtgacacttccatggagactgcctgcggtgacagcaaagacaatgatggagatggcctggtggactgcatggaccctgactgctgcctccagcccctgtgccatatcaacccgctgtgccttggctcccctaaccctctggacatcatccaggagacacaggtccctgtgtcacagcagaacctacactccttctatgaccgcatcaagttcctcgtgggcagggacagcacgcacataatccccggggagaacccctttgatggagggcatgcttgtgttattcgtggccaagtgatgacatcagatggaacccccctggttggtgtgaacatcagttttgtcaataaccctctctttggatatacaatcagcaggcaagatggcagctttgacttggtgacaaatggcggcatctccatcatcctgcggttcgagcgggcacctttcatcacacaggagcacaccctgtggctgccatgggatcgcttctttgtcatggaaaccatcatcatgagacatgaggagaatgagattcccagctgtgacctgagcaattttgcccgccccaacccagtcgtctctccatccccactgacgtccttcgccagctcctgtgcagagaaaggccccattgtgccggaaattcaggctttgcaggaggaaatctctatctctggctgcaagatgaggctgagctacctgagcagccggacccctggctacaaatctgtcctgaggatcagcctcacccacccgaccatccccttcaacctcatgaaggtgcacctcatggtagcggtggagggccgcctcttcaggaagtggttcgctgcagccccagacctgtcctattatttcatttgggacaagacagacgtctacaaccagaaggtgtttgggctttcagaagcctttgtttccgtgggttatgaatatgaatcctgcccagatctaatcctgtgggaaaaaagaacaacagtgctgcagggctatgaaattgacgcgtccaagcttggaggatggagcctagacaaacatcatgccctcaacattcaaagtggcatcctgcacaaagggaatggggagaaccagtttgtgtctcagcagcctcctgtcattgggagcatcatgggcaatgggcgccggagaagcatctcctgccccagctgcaacggccttgctgacggcaacaagctcctggccccagtggccctcacctgtggctctgacgggagcctctatgtgggtgatttcaactacattagaaggatcttcccctctggaaatgtcaccaacatcctagagctgagaaataaagatttcagacatagtcacagtccagcacacaaatactacctggccacagaccccatgagtggggccgtcttcctttctgacagcaacagccggcgggtctttaaaatcaagtccactgtggtggtgaaggaccttgtcaagaactctgaggtggttgcggggacaggtgaccagtgcctcccctttgatgacactcgctgcggggatggtgggaaggccacagaagccacactcaccaatcccaggggcattacagtggacaagtttgggctgatctacttcgtggatggcaccatgatcagacgcatcgatcagaatgggatcatctccaccctgctcggctctaatgatctcacatcagcccggccactcagctgtgattctgtcatggatatttcccaggttcacctggagtggcccacagacttagccatcaacccaatggacaactcactttatgtcctcgacaacaatgtggtcctgcaaatctctgaaaaccaccaggtgcgcattgtcgccgggaggcccatgcactgccaggtccctggcattgaccacttcctgctaagcaaggtggccatccacgcaaccctggagtcagccaccgctttggctgtttcacacaatggggtcctgtatattgctgagactgatgagaaaaagatcaaccgcatcaggcaggtcaccactagtggagagatctcactcgttgctggggcccccagtggctgtgactgtaaaaatgatgccaactgtgattgtttttctggagacgatggttatgccaaggatgcaaagttaaataccccatcttccttggctgtgtgtgctgatggggagctctacgtggccgaccttgggaacatccgaattcggtttatccggaagaacaagcctttcctcaacacccagaacatgtatgagctgtcttcaccaattgaccaggagctctatctgtttgataccaccggcaagcacctgtacacccaaagcctgcccacaggagactacctgtacaacttcacctacactggggacggcgacatcacactcatcacagacaacaatggcaacatggtaaatgtccgccgagactctactgggatgcccctctggctggtggtcccagatggccaggtgtactgggtgaccatgggcaccaacagtgcactcaagagtgtgaccacacaaggacacgagttggccatgatgacataccatggcaattccggccttctggcaaccaaaagcaatgaaaacggatggacaacattttatgagtacgacagctttggccgcctgacaaatgtgaccttccctactggccaggtgagcagtttccgaagtgatacagacagttcagtgcatgtccaggtagagacctccagcaaggatgatgtcaccataaccaccaacctgtctgcctcaggcgccttctacacactgctgcaagaccaagtccggaacagctactacatcggggccgatggctccttgcggctgctgctggccaacggcatggaggtggcgctgcagactgagccccacttgctggctggcaccgtcaaccccaccgtgggcaagaggaatgtcacgctgcccatcgacaacggcctcaacctggtggagtggcgccagcgcaaagagcaggctcggggccaggtcactgtctttgggcgccggctgcgggttcacaaccgaaatctcctatctctggactttgatcgcgtaacacgcacagagaagatctatgatgaccaccgcaagttcacccttcggattctgtacgaccaggcggggcggcccagcctctggtcacccagcagcaggctgaatggtgtcaacgtgacatactcccctgggggttacattgctggcatccagaggggcatcatgtctgaaagaatggaatacgaccaggcgggccgcatcacatccaggatcttcgctgatgggaagacatggagctacacatacttagagaagtccatggtgctgctactacacagccagaggcagtatatctttgagttcgacaagaatgaccgcctctcttctgtgacgatgcccaacgtggcgcggcagacactagagaccatccgctcagtgggctactacagaaacatctatcagccccctgagggcaatgcctcagtcatacaggacttcactgaggatgggcacctccttcacaccttctacctgggcactggccgcagggtgatatacaagtatggcaaactgtcaaagctggcagagacgctctatgacaccaccaaggtcagtttcacctatgacgagacggcaggcatgctgaagaccatcaacctacagaatgagggcttcacctgcaccatccgctaccgtcagattgggcccctgattgaccgacagatcttccgcttcactgaggaaggcatggtcaacgcccgttttgactacaactatgacaacagcttccgggtgaccagcatgcaggctgtgatcaacgagaccccactgcccattgatctctatcgctatgatgatgtgtcaggcaagacagagcagtttgggaagtttggtgtcatttactatgacattaaccagatcatcaccacagctgtcatgacccacaccaagcattttgatgcatatggcaggatgaaggaagtgcagtatgagatcttccgctcgctcatgtactggatgaccgtccagtatgataacatggggcgagtagtgaagaaggagctgaaggtaggaccctacgccaataccactcgctactcctatgagtatgatgctgacggccagctgcagacagtctccatcaatgacaagccactctggcgctacagctacgacctcaatgggaacctgcacttactgagccctgggaacagtgcacggctcacaccactacggtatgacatccgcgaccgcatcactcggctgggtgacgtgcaatacaagatggatgaggatggcttcctgaggcagcggggcggtgatatctttgagtacaactcagctggcctgctcatcaaggcctacaaccgggctggcagctggagtgtcaggtaccgctacgatggcctggggcggcgcgtgtccagcaagagcagccacagccaccacctgcagttcttctatgcagacctgaccaaccccaccaaggtcacccacctgtacaaccactccagctctgagatcacctccctctactacgacttgcaaggacacctctttgccatggagctgagcagtggtgatgagttttacatagcttgtgacaacatcgggacccctcttgctgtctttagtggaacaggtttgatgatcaagcaaatcctgtacacagcctatggggagatctacatggataccaaccccaactttcagatcatcataggctaccatggtggcctctatgatccactcaccaagcttgtccacatgggccggcgagattatgatgtgctggccggacgctggactagcccagaccacgagctgtggaagcaccttagtagcagcaacgtcatgccttttaatctctatatgttcaaaaacaacaaccccatcagcaactcccaggacatcaagtgcttcatgacagatgttaacagctggctgctcacctttggattccagctacacaacgtgatccctggttatcccaaaccagacatggatgccatggaaccctcctacgagctcatccacacacagatgaaaacgcaggagtgggacaacagcaagtctatcctcggggtacagtgtgaagtacagaagcagctcaaggcctttgtcaccttagaacggtttgaccagctctatggctccacaatcaccagctgccagcaggctccaaagaccaagaagtttgcatccagcggctcagtctttggcaagggggtcaagtttgccttgaaggatggccgagtgaccacagacatcatcagtgtggccaatgaggatgggcgaagggttgctgccatcttgaaccatgcccactacctagagaacctgcacttcaccattgatggggtggatacccattactttgtgaaaccaggaccttcagaaggtgacctggccatcctgggcctcagtggggggcggcgaaccctggagaatggggtcaacgtcactgtgtcccagatcaacacagtacttaatggcaggactagacgctacacagacatccagctccagtacggggcactgtgcttgaacacacgctacgggacaacgttggatgaggagaaggcacgggtcctggagctggcccggcagagagccgtgcgccaagcgtgggcccgcgagcagcagagactgcgggaaggggaggaaggcctgcgggcctggacagagggggagaagcagcaggtgctgagcacagggcgggtgcaaggctacgacggctttttcgtgatctctgtcgagcagtacccagaactgtcagacagcgccaacaacatccacttcatgagacagagcgagatgggccggaggtgacagagaggaccaaggacttcttgccaaagacagctactcttttgtggccgcatacctgactgtgttgtacttttaaaaaaatgattttttaacaagtgcagaaacaaaaagatactggttgcattgtaactcatgcaacatccttttttttagaaaagaaaaacacagatttggccttcgcacattttttgcaaagaacagaaggtatttttttctgtagtgtgatcacaatgaaaactttattgtcttttgttccctttttccttgaggatttttcccttgtcgtttggggtatgtatctcctctctgagatgcatctcctggggtgtgtcctcgtctgtccctaggtacccagtgtgatgtgggacatgaatgtctgtgctaacttgtctcatgtgcaaccctttcttcttcgactggggtcgggcaggagtaaagggagtgatgggccagtacaacaccccttccaagggggcctgggaggagggtctgtaggacctgaggctccttggcagggctcctgcagaagagtggtggatttcttctcaccttgttctctgcctccagaggatcatagatggcttcatcttgctccagggaatttcatggtgttgttcagcaccttttttaagctgccccaaactcctgttcaagctttctattttgatgctgaatgaaaccccctaccacttttgcaaatcctgtgtagttgtcggtgccacccccatgctgggatagagaaagtgtctcccaggtcctttcccccagaccagtgacataacatcctgggctcagagtcccatcctcccgggagggaaagcacccaggatgcctgtgattggttggtcctccatgatgttcctgttcatctcctcctttctcccaaagccagatgtgagaacgagcactgcacagcaagccttcaatgtgggcaccatgtccacagaacagaaggccacccatggcaaaggcatggcagtggtggcgagggcaccagcctgccttccgaggcaaagccctctctctatgactttgagtatcttccctccaccactcagccgccaccactgagacgtaggaatgtggagggaggtgcttggtggcctttgattctggaaaaatgcttaacaaaaaaagccagccaaagagaggaaggcataagctaagcatccttctaaccagttcccaaagtcccatctgcctccatgtaccagctgatcgcagagctggactggggcaggctgggcttccaggaaattcctgaagttctgaaacagcttcccctctagagaagcccacccaatgtgttttttagtgacaggaagaaaggagggaagagctgatgtggtgtggcctgcccatatcatacaaccccaccaggagcagggcagttcccaaggtgggtgcccgtagatctgggaggccaggctggcatgattcctgtgaagaactgtgcctgtgtcgtcagggagaggcctgagccctctcagaagcagggacagcccacacctgaagagcacgcccaagctgaggcagcagccagcaggctgggggagcagtgagggcagggggagtcacagccagagctgggagccccttgttcaaggattccattcctggttcatccgcctaattaccattgtcattaccactcacaggaggctctgggagatgggaggggaagccaaatgcttccttttaagctgggcttcttagaaaatggaacttttatgggttacatttacattaagtgtggaaaatgaattctgagtctgagctattccccgtggaaaccttgttggactgataagctcatggcacctctatagccttactcacatagtcttcagaatattacacaagttaatgaaactgagaaggtctgactgcatgaggatcggagcagcatgtagtctgggttctgcctggcagagggaggcaaccaaaacttcttggggagaggagatttcgccttaacgtcatcccactgggattagaggatgtgtttcgctaagtgctcttcctgtttccaaaaaaaaagccaccctgctgcagcagtgcgctttggcctgcttgtccactggttgcccattgcccctggatccagagctctactgagtcagatacagtgctctgcaggcctgctgtgggaggcatgagctggagatgggggctcccatctggcaggatcattcttggatgagatggaaaacagtttggcctgaagaacacaagttttgtcctccagaagggacttacgcctctcaaaatgtactcttcataccaagggcccttgggcaaagtgctcctgcccagttgatcagtcccatcctggctgcctgacatcagtgaagacctgctggggatgtctgctcagaggtcaggaacggcatgcggtccacaggaaccagctccctacgcttcccccacgccctgtccctcctccacagccccctccccaaaggaatagggtggacttttagggatcaaaaacagaattattgggtgtttcatttatttttttctttctttcttttttttttcatagagatggggtctcactatgttgcccaggctgttctcaaactcctggcctcaggcgatccaccttggcctcctgaagtgctggggttacaggtgtgagccactgcgcctggactgagtgtttgtttctttaaaggatcttatatttttcctgtgctacataccaccacagcagcccagcttctgtggggagagaagttgaaggatcccgaagctttagaaaaaggatctcagctgtggcacaggcagtgttatgcgcctcactgccacattggtgctgttgtattgaaggtggtgcttctggccttggcccttttgagttggtttccatttgggctgcaggtgactcagtgactccctcctcaagctgtcctcctgctaagaccagcagtcacaaacccatggcaagggtgagtgtgaaggcctaaccctgtgcctatgtaataggctccaagcatcgactcccatcctgagaggaccggcccttttgacactcaccaaccaaatctgttcattcgatagagtgaccaggcctccctcacctgcccaggtgtatgatcctacagttcctgccttctctcctaccccgcacagctgccaactggtcctacatcctcagcccctctgccaccaccttaaataggactttactgattccccaactttgtttttttgtaggatgagatttcctttttatcccacccccccacaccccaaacagacattgctggagggcagactggaggaaggggaaggcatgcaggtaaattactgccttgtcagcctctgaccctcatctctcagaattgttggctgagaattaacccaaggaccacaccagtgcctgatttctacttagggagagaggattggaaacgatccctaagaaactgactgagggtgagaatggccaggaggtgtgtgtccaaataaccaggagggggcacagaagatgatggcaaggcagactgggcagtgttttgtagacacagaacaaagaatcagaatttgaaaaaagaagaaaaacaaatcttcgcagctgcaactttaaagtatcacctttatagatggcagggatttccattatgcaaatggaatctaagatttcaatgtgaaatcttagaatgcagttttaccacttgcagtcttgtatttgtggtggccatgtggtgagggcggtgatgctgagctttctgcccaggaggaatgagctttcaagctctcagcagggtgtcaggcttggggatttgagcatccactgctcaaagtccaggctattctccagtcctcacggcagccactaagcccaggagccagacctggcccggggacacatctcctgagggatcccagaaagaacccagtctttcctttcccttggggtccttgttagaatgaaaacctctctatttaaggcacatcattcccagctaggtttatacacttgtctatattttactggaggaaagggaattaaaaaagaactctgcagttcaaggccctttcatttaaccttccaaaaacagcaaactcattttaaagactcattgctgaggtgatagagagaaaccttatcctctccaaccttcacattcacaaaaaccatccttgtgtacttgactgccctagacagtggtgactcttaggtttcattacgaatgtggaatatcagagtgtgggaaggcccaggcgagggccaatgttgtgtttcttaccccctctggaatgccaaaggcaaggtactaggtgacctcctggtccccaagaaaatgtgatttattctgagggcgaacagccaagggaggactagtctggagcacgctcggccgtcctggcaggagctgagcctcaggtgtctggcggtgccccagcagccctggattcacccaacaccagaatcccacttttctaaatccacctgttgttctgagcacctctgaacccgcagcttcggcaaaaggagtctgtaccaagctgcttctggatgaccaacactggagactctggccttaccatgtggaaatcattttcctgaagtctggaactaattttgagaagtttttttctcaacacttttgtgtttctaacactgtatcttgactgtgtaaataccaacaaggctgtaaataaatgcagatgtagataccttctagaaaaaaaaaagcataaaaacaaaaccagaagtgatcccgtgtagccttcgttgacaaataaagactattttgtgttt

SEQ ID NO: 190102 - DNA, 1339 bp, Homo sapiens
  Payload ID: 17538
  Gene Symbol: TNMD
  Gene Name: tenomodulin
  Uniprot ID: Q9H2S6
  ENST ID: ENST00000373031
  CDS Start-End: 218-1171
tgtgcacagaagttatatacatatatgggtatatctatgtaacaaatcgcagcacaggagtcccctgggctccctcaggctctggtatgacatatttgagccatataaattcagcttctcctctggcatctgttagccgactcacttgcaactccacctcagcagtggtctctcagtcctctcaaagcaaggaaagagtactgtgtgctgagagaccatggcaaagaatcctccagagaattgtgaagactgtcacattctaaatgcagaagcttttaaatccaagaaaatatgtaaatcacttaagatttgtggactggtgtttggtatcctggccctaactctaattgtcctgttttgggggagcaagcacttctggccggaggtacccaaaaaagcctatgacatggagcacactttctacagcaatggagagaagaagaagatttacatggaaattgatcctgtgaccagaactgaaatattcagaagcggaaatggcactgatgaaacattggaagtgcacgactttaaaaacggatacactggcatctacttcgtgggtcttcaaaaatgttttatcaaaactcagattaaagtgattcctgaattttctgaaccagaagaggaaatagatgagaatgaagaaattaccacaactttctttgaacagtcagtgatttgggtcccagcagaaaagcctattgaaaaccgagattttcttaaaaattccaaaattctggagatttgtgataacgtgaccatgtattggatcaatcccactctaatatcagtttctgagttacaagactttgaggaggagggagaagatcttcactttcctgccaacgaaaaaaaagggattgaacaaaatgaacagtgggtggtccctcaagtgaaagtagagaagacccgtcacgccagacaagcaagtgaggaagaacttccaataaatgactatactgaaaatggaatagaatttgatcccatgctggatgagagaggttattgttgtatttactgccgtcgaggcaaccgctattgccgccgcgtctgtgaacctttactaggctactacccatatccatactgctaccaaggaggacgagtcatctgtcgtgtcatcatgccttgtaactggtgggtggcccgcatgctggggagggtctaataggaggtttgagctcaaatgcttaaactgctggcaacatataataaatgcatgctattcaatgaatttctgcctatgaggcatctggcccctggtagccagctctccagaattacttgtaggtaattcctctcttcatgttctaataaacttctacattatcaccaa

SEQ ID NO: 190103 - DNA, 10331 bp, Homo sapiens
  Payload ID: 17539
  Gene Symbol: TNS1
  Gene Name: tensin 1
  Uniprot ID: Q9HBL0
  ENST ID: ENST00000171887
  CDS Start-End: 454-5661
gttggcccgccccctgggctggcctgggagggaacccgactagcagagccctctgctcagttgctcccagcagtggccctgggaccagctctgctccttgcaccccgctccctgcctggacacaggctcactcgctgccttcttctgggggaaaccagcttcttgccagccacagctgctgcctccgccactggccaccgcccctgtcctgggagtcccttggcccagacacccacctgacttagtggctcctctgcaggaaaggtggctgccccctgcgttcctccatccaaccatgagctggtgcccatcaccactgagaatgcaccaaagaatgtagtggacaagggagaaggagcctcccggggtggaaacacacggaaaagcctcgaggacaacggctccaccagggtcaccccgagtgtccagccccacctccagcccatcagaaacatgagtgtgagccggaccatggaggacagctgtgagctggacctggtgtacgtcacagagaggatcatcgctgtctccttccccagcacagccaatgaggagaacttccggagcaacctccgtgaggtggcgcagatgctcaagtccaaacatggaggcaactacctgctgttcaacctctctgagcggagacctgacatcacgaagctccatgccaaggtactggaatttggctggcccgacctccacaccccagccctggagaagatctgcagcatctgtaaggccatggacacatggctcaatgcagaccctcacaatgtcgttgttctacacaacaagggaaaccgaggcaggataggagttgtcatcgcggcttacatgcactacagcaacatttctgccagtgcggaccaggctctggaccggtttgcaatgaagcggttctatgaggataagattgtgcccattggccagccatcccaaagaaggtacgtgcattacttcagtggcctgctctccggctccatcaaaatgaacaacaagcccttgtttctgcaccacgtgatcatgcacggcatccccaactttgagtctaaaggaggatgtcggccatttctccgcatctaccaggccatgcaacctgtgtacacatctggcatctacaacatcccaggagacagccagactagcgtctgcatcaccatcgagccaggactgctcttgaagggagacatcttgctgaagtgctaccacaagaagttccgaagcccagcccgagacgtcatcttccgtgtgcagttccacacctgtgccatccatgacctgggggttgtctttgggaaggaggaccttgatgatgctttcaaagatgatcgatttccagagtatggcaaagtggagtttgtattttcttatgggccagagaaaattcaaggcatggagcacctggagaacgggccgagcgtgtctgtggactataacacctccgaccccctcatccgctgggactcctacgacaacttcagtgggcatcgagatgacggcatggaggaggtggtgggacacacgcaggggccactagatgggagcctgtatgctaaggtgaagaagaaagactccctgcacggcagcaccggggctgttaatgccacacgtcctacactgtcggccacccccaaccacgtggaacacacgctttctgtgagcagcgactcgggcaactccacagcctccaccaagaccgacaagaccgacgagcctgtccccggggcctccagtgccactgctgccttgagtccccaggagaagcgggagctggaccgcctgctgagtggctttggcttagagcgagagaagcaaggcgccatgtaccacacccagcacctcaggtcccgcccagcagggggctcggctgtgccctcctctggacgccacgttgtcccagcccaggttcatgtcaatggtggggcgttagcatctgagcgggagacagacatcctggacgatgaattgccaaaccaggatggtcacagtgcgggcagcatgggcacactctcttctctggacggggtcaccaacaccagtgaggggggctacccagaggccctgtccccactgaccaacggtctggacaagtcctaccccatggagcctatggtcaatggaggaggctacccctacgagtctgccagccgggcggggcctgcccatgctggccacacggcccccatgcggccctcctactctgcacaggagggtttagctggctaccagagggaggggccccacccagcctggccacagccagtgaccacctcccactatgcccatgaccccagcggtatgttccgctctcaatccttttcggaagctgaaccccagctgcccccagctccggtccgagggggaagcagccgggaggctgtgcaaaggggactgaattcgtggcagcagcagcagcagcagcagcagcagcctcgcccacctccacgccagcaggaaagagcccacttggagagtcttgtagccagcaggcccagccctcagccattggcagagacccccatccccagtctccctgagttcccgcgagcagcctcccagcaggagattgaacagtccatcgaaacactcaatatgctgatgctggacctggagccagcctccgctgctgccccactacacaagtcccagagtgtccccggggcctggccaggggcttctccactctcctcccagcccctctctggatcctcccgtcagtcccatccactgacccagtccagatctggctatatccccagtgggcattcgttgggaacccctgagccagccccacgggcctctctggagtctgtccctcctggcaggtcttactcaccttatgactatcagccatgtttggctgggcctaaccaggatttccattcaaagagcccagcctcttcctccttgcctgccttccttccgaccacccacagccctccagggcctcagcaacccccagcctctctccctggcctcactgctcagcctctgctctcaccaaaggaagcgacttcagacccctcccggactccagaggaggagccattgaatttagaagggctggtggcccacagggtagcaggggtacaggctcgggagaagcagcctgcagagcccccagcccctctgcggaggcgggcggccagtgatggacagtatgagaaccagtctccagaagccacatcccctcgtagccctggggttcgctcccctgtccagtgtgtctccccggagctggctcttaccatcgctctcaatcctggagggcggcccaaagagccccatttgcacagctacaaggaggccttcgaggagatggagggaacctccccgagcagcccaccacccagtggggtgcggtcccccccgggtctggccaagacacccctgtctgctctgggcctgaaacctcacaacccagcggacatcctgttgcaccccacaggagttaccagaagacggatccagccagaggaagatgaggggaaggtggtggtcaggctgtcagaagagccccggagctatgtggagtctgtggcacggacagcggtggctggaccccgagctcaggactctgagcccaagagctttagtgctccagccacccaggcctatggccatgagatacccctgaggaacgggaccctgggtggctcctttgtctcccccagccccctctccaccagcagccccatcctcagtgctgacagcacttcagtggggagtttcccgtcgggagagagcagtgaccagggtccccggacgcccacccagcctctgttggagtctggcttccgctcaggcagcctgggacagcccagcccgtctgcccagagaaactaccagagctcttctcctctcccgactgtgggcagtagctacagcagccccgactactcacttcagcatttcagctcctctccggaaagccaggctcgagctcagttcagtgtggctggcgtccacacggtgcctgggagccctcaggcgcgccacagaacagtgggcaccaacactccccctagtcctggcttcggctggcgggccatcaatcccagcatggctgcccccagcagtcccagtttgagccatcaccagatgatgggtccaccaggcactggcttccatggtagcactgtctccagcccccagagcagtgcagcgaccaccccggggagccccagcctgtgtcggcacccagcaggggtctaccaggtttctggcctccacaacaaagtggccaccaccccggggagtcccagcctgggccggcaccctggggctcaccaaggcaacctggcctccggtcttcatagcaatgcaatagccagccctggaagccccagcctgggccgtcacctcggagggtctggatctgtggttcccggcagcccctgcttggaccggcatgtggcctatggtggctattctaccccggaggatcggagacccacactgtcccggcagagcagtgcctctggctaccaggctccttccacgccctccttccctgtctcccctgcctactaccctggcctgagcagccctgccacctccccgtcaccagactccgcagccttccggcaagggagcccaacaccagccttgccagagaagcgaaggatgtcagtgggagaccgggcaggcagcctccccaactatgccaccatcaatgggaaggtgtcttcgcctgtcgccagcggcatgtccagtcccagtgggggcagcaccgtctccttctcccacactctgcccgacttctccaagtactccatgccagacaacagcccggagacgcgggctaaagtgaagtttgtccaggacacttctaagtattggtacaagcctgagatctccagggagcaggccatcgcgctcctcaaggaccaggagccgggggccttcatcatccgcgacagtcactccttccgaggcgcgtacgggctggccatgaaggtgtcttcgccacctccaaccatcatgcagcagaataaaaaaggagacatgacccatgagctggtcaggcattttctgatagagactggccccagaggagtcaagctcaagggctgccccaatgagccaaacttcggatcgctgtctgccctggtctaccagcactccatcatcccattggccctgccttgcaagctggtcattccaaaccgagaccccacagatgaatcgaaagatagctccggccctgccaactcaactgcagacctgctgaaacaaggggcagcctgcaatgtgctcttcgtcaactctgtggacatggagtcactcactgggccacaggccatctctaaagccacatctgagacgttggctgcagaccccacgccagctgccaccatcgttcacttcaaagtctctgcccagggaatcactctgactgacaaccagagaaagctctttttcagacgccactaccctctcaacactgtcaccttctgtgacctggatccacaggaaagaaagtggatgaaaacagagggtggtgcccctgctaagctcttcggcttcgtggcccggaagcagggcagcaccacggacaacgcctgccacctctttgctgagcttgaccccaaccagccggcctctgccatcgtcaacttcgtctccaaggtcatgctgaatgccggccaaaagagatgaaccctgccccttgcccagggccagtgccatggggaaggggcttgtggggaggggacccatgaatcctgaccactcttgaacccagaaggaggactttgggccaatttcggaggagagaagaaagtgcaacgtggggagagggaagtgaattgcagaggggagggggaaaagagagagagagagagagagagagagagagagaaagatggaggagaagaacttggattcccctgggtagatggaaactgcaaaaacccaaagcctccaaaactaaccaggtccacctaacaccccctccctcccctaagaagatggatgtcctcaaaagagaaggaacaaacctccttgggaatccacattttttgggggaatggaaaagctctgtctccctaactcaactgctttgcaaggggaaatcaagctgggagaatctttttctggccacctgtggggtaggttgtcaaaccaaacagagccaccgtgggacatcaagtggaagaacttgtttgcttgaaagtatctcagacccaaggcacctcaggtctctttgctgtgcctccactatattgtcgtgtgggtgtgtgtctgcacccacatcctcacacattgatctagatctgcctttatccactcgaattataaacagctcggcttgtccttgtcccatgtgtttgtagacacacatgcatactgtccaaagattagggttggtggtggcagtgcagcaggggagggacaaacaaccaagctatgggtgacagaggctctctcctggtgcctgcacctgcactctagtgaccctgggtgccgccagacccttctcttctacaaagaccccagcaggagtgggagggtctgcaatggcatcgccctgtcctgccttggccagaagcctggagctttggtttgaggaggtagagatatgtgtatccataggaagagatctgtcagaacaggcagctgttgagctcggggtgtcttccccaaggcatgtggctcagcagcaagaaaggcaagttgctcctgctggggccctggactctgccttagctcccacctctcagccttgttattgggtttcatgcccctggaccagccttatctcagacctgcttacctgcatgatgcctttttgggggctggggattgagtcttgctgctctgcccagccctgttctattctgcagggtccctgtgttggaattctccctggggaacctactttctgctcagtgaggctccggccagaaacctggagtccttatcctcccctctgtaagtgttttagggtctggcttttgcaggcaccctctgacctcagcagagctcctgggcctgctgcctgcacaccacatcgcctacctacaatgccaaagcctcactgtcaccctttctgccttggtttccctagctgagccacgctgcccatgcagcagagggcagaaggcttgcacttgggccaaagggcctaaggtccactggacagttgggaaaacacctgaccaccatttaaggactctaagccagaatggaaaattcaccaggactccattcttaagcctatgcgagtcccctagagagaggcattgtactgatatataaatattatataatatatacatgagacatactgacagaatctgtaagctaataaaatgtaagaaaaggttaaaaaaagaataggtaaattgacaagaagtatttattgtttttccatattgctttattgccttccttggggataaaccaattcctatccttttttatatgtgtaagtaaagcctgaagtgtagggggcctttgttcttgaagcagccagggtctccttgccctggccttggccttccctagactgtgtggggctcagcattgggaggggttgcacatgtcccagcctttggcccccttacttttcagcaagccaggggcccagcagtcagctcccaggatgtgtggggagctgtccctgactctgcaggcctgagcgagtgtgtgagcatgcggggacatgggtgtgtatggcacacataggtgcgtgtgtgtcttttgtattttttctcctccaaggagctgtgtcagtgtggacgttctgtttcagggagttggaaaggagggtgtctgcagaaggtggagagcaggggcagaggccccactggccaccccctgcttcccagagtgaaaccttgtgcctggtgaccaaagtccctccaaagtgctcttccttctgggttattcaagccaaatatctgggtttccccctctcctcattccctagcaaaccccaattatcttccaagataggagatatttcccatccccttcctttgtaaatatctcatctcccactggagagcccaggagcctattcctggcatggatgttctgtccacacttgaggctgggcggtgtatcagacccttcaagcagcctggctggggcccaggactgagtctggggtcagctttcacggtcgcttttcccttcctcaccacccaccacagcccaccttgcatgcatggccagcccctccactccagcctgagccatgtgtgcccctgcgggaggacccattcatgccagaaagctggtaactccctcccagcatccctgcggaaggagtcagtttctgagagtgtgacttttcaaggcgaatgatggggaagggttccccagtccccacagtggccccacctctgggccctgcaccagagcccttctgtgtcacggcgggctgtgcacccatgcacacacctacgcacacacaacactccgcactgcagtatattcttgccaaagatttcctttaaaagcaagcacttttactaattattattttgtaaatgtttatcttcttctgtcttctccctccctgaatctattttactgttgtttattgttgaatctgtgtgtcagccaggagagcgctgtctggccttgaacatgggctgggatgggaaagggtctgggagaagatgggcaacaaagagccagggagtcatggacatcgcagcgacgcagaccccagcaggttcagtcccgtgctgccaccagctgtccagctgggtgtctggagggaagagggcagaggagggtcatgtcccttcagctgggggaggggcccagtgagctccacgtggctttttcccaaagggagcaagagggaaggattgggcgagaaaacaatggagaggggacctgcgaaggaaaacagggaggaagtgagcggtttgatcagcctgctatcacggtgttctggctctcttatttagccaggcgcttaagggacagatacatcacatcctaagtttgggaaaggcctttgacccatgtcatctgagcgtctcctccagtagctctgaaagctgtggacaccaatggccaggattccttctcccctggtttttgaggatccctgggtcttctgagactggccaggagagggatggtggggccagtggttgtgtgaaagcaggaggggcagccctcctggacaagtgtgatccccctataaacggctctcaggaggttagtgagtaggagattctgccttgttctgatgagcctgtgcaggggctccaggggagcatgctgtccagggggcacagaagggtggtgagtgtgatcaaatctagtctcactcccactttttagtctcactcctacttttgtccaccacccctgcctcctggatcttctcccactttttttttcagctttaggacctggggagatcctgtgagtcaaggcagacacccaatcctgcccccacactcggggtcctccaagaggttggggggcagagtcccagagcagccctttaccccaggtccaggccctggaatcctgagactcgcgtttccttggccagtggtaacacaggacgtgtgtgcgcatgtgcaagtgtggatgtatgtgtgtgcgtgtgttttgctcatttctttagggaacttgggagtcggggttggaggtgctgggcaatggaacttcaaattcaatgtcgcccagcagtgaggggagtcgggaggtgaggcctgtaggccaaccaattggtggagtctcagcgatagcccaggtgagaagtggttcacccagaggggcagggtgggggcctcgggcagatctgtccctcttggcacctctgtcctcaaatgtccaaaatgttggaggacctctgttcatatcccacgcctgggctcttgccagcagtggagttactgtagagggatgtcccaagcttgttttccaatcagtgttaagctgtttgaaactctcctgtgtctgtgttttgtttgtgcgtgtgtgtgagagcacatcagtgtgtgcaggctgtgtttccccatttctctcctcccttcagacccatcattgagaacaaatgtaagaaatcccttcccaccaccctccctgcctcccaggccctctgcgggggaaacaagatcacccagcatccttccccaccccagctgtgtatttatatagatggaaatatactttatattttgtatcatcgtgcctatagccgctgccaccgtgtataaatcctggtgtatgctccttatcctggacatgaatgtattgtacactgacgcgtccccactcctgtacagctgctttgtttctttgcaatgcattgtatggctttataaatgataaagttaaagaaaactctg

SEQ ID NO: 190104 - DNA, 1792 bp, Homo sapiens
  Payload ID: 17539
  Gene Symbol: TNS1
  Gene Name: tensin 1
  Uniprot ID: Q9HBL0
  ENST ID: ENST00000310858
  CDS Start-End: 173-1423
gagccacccagtagtgtctgagtggtgatccactcttgcctgcaatgaggaccaaggcaaaaagagttggctgaatctgcagcaggaaggatgagggttagataccaggaggaaattcctgacagtgagaaaagtaagacactctgtctgggaggctgtcgaatttcctttcatggtgccctttcagcaaaggaaggattgtgttttggagggctccaccagggtcaccccgagtgtccagccccacctccagcccatcagaaacatgagtgtgagccggaccatggaggacagctgtgagctggacctggtgtacgtcacagagaggatcatcgctgtctccttccccagcacagccaatgaggagaacttccggagcaacctccgtgaggtggcgcagatgctcaagtccaaacatggaggcaactacctgctgttcaacctctctgagcggagacctgacatcacgaagctccatgccaaggtactggaatttggctggcccgacctccacaccccagccctggagaagatctgcagcatctgtaaggccatggacacatggctcaatgcagaccctcacaatgtcgttgttctacacaacaagggaaaccgaggcaggataggagttgtcatcgcggcttacatgcactacagcaacatttctgccagtgcggaccaggctctggaccggtttgcaatgaagcggttctatgaggataagattgtgcccattggccagccatcccaaagaaggtacgtgcattacttcagtggcctgctctccggctccatcaaaatgaacaacaagcccttgtttctgcaccacgtgatcatgcacggcatccccaactttgagtctaaaggaggatgtcggccatttctccgcatctaccaggccatgcaacctgtgtacacatctggcatctacaacatcccaggagacagccagactagcgtctgcatcaccatcgagccaggactgctcttgaagggagacatcttgctgaagtgctaccacaagaagttccgaagcccagcccgagacgtcatcttccgtgtgcagttccacacctgtgccatccatgacctgggggttgtctttgggaaggaggaccttgatgatgctttcaaagatgatcgatttccagagtatggcaaagtggagtttgtattttcttatgggccagagaaaattcaaggcatggagcacctggagaacgggccgagcgtgtctgtggactataacacctccgaccccctcatccgctgggactcctacgacaacttcagtgggcatcgagatgacggcatggaggatgggaacaaacagaataccaatagccagtcaattggaagcatctcaggtggcctggaggatcaatatacctggccagacacacactggccttcccaaagttaggccctccaaaatgtcaagttgccaagccagaatccaaagctttgcactgagaacttcatgttggggctcctgtcccctcctggagccctgcctgggtgacaccccagtccttctattcaggtcctgtgttcacctctgggaagtgcaggaccctgtggggttttttctttttccttttccaagccaaggaagtgttctggctcctggactctgccctgtggaggggaaagggggagagagagggaaaaaaagatttccaccttattgttcagcagctggaaaattgttgtcatctgttctgccttccatttgctgagaatggaaaaaaaatgtggaaaatttggggaaataaatctcaataccctcata

SEQ ID NO: 190105 - DNA, 582 bp, Homo sapiens
  Payload ID: 17539
  Gene Symbol: TNS1
  Gene Name: tensin 1
  ENST ID: ENST00000449814
  CDS Start-End: 510-582
agttgctcccagcagtggccctgggaccagctctgctccttgcaccccgctccctgcctggacacaggctcactcgctgccttcttctgggggaaaccagcttcttgccagccacagctgctgcctccgccactggccaccgcccctgtcctgggagtcccttggcccagacacccacctgacttagtggctcctctgcaggaaaggtggctgccccctgcgttcctccatccaaccatgagctggtgcccatcaccactgagaatgcaccaaagaatgtagtggacaagggagaaggagcctcccggggtggaaacacacggaaaagcctcgaggacaacgcactgcggagccaggagaggggtgcaggggctcctcttcttggagaccccgtggtcaagccccaggttggagtgtgaatcctgcctggccgtcaacttcccagggacttgaggggctccaccagggtcaccccgagtgtccagccccacctccagcccatcagaaacatgagtgtgagccggaccatggaggacagctgtgagctggacctggtgtacgtcacagagaggatcatcgctg

SEQ ID NO: 190106 - DNA, 4292 bp, Homo sapiens
  Payload ID: 17539
  Gene Symbol: TNS1
  Gene Name: tensin 1
  ENST ID: ENST00000446688
  CDS Start-End: 82-2622
agaggtcccaaggatggagtcctggaacctcccacattccaaggctacagacaggaggagggaaccagcataggaactggcatggagcagcttgtgaaggagaggaaaggggtacaggctcgggagaagcagcctgcagagcccccagcccctctgcggaggcgggcggccagtgatggacagtatgagaaccagtctccagaagccacatcccctcgtagccctggggttcgctcccctgtccagtgtgtctccccggagctggctcttaccatcgctctcaatcctggagggcggcccaaagagccccatttgcacagctacaaggaggccttcgaggagatggagggaacctccccgagcagcccaccacccagtggggtgcggtcccccccgggtctggccaagacacccctgtctgctctgggcctgaaacctcacaacccagcggacatcctgttgcaccccacaggagagccccggagctatgtggagtctgtggcacggacagcggtggctggaccccgagctcaggactctgagcccaagagctttagtgctccagccacccaggcctatggccatgagatacccctgaggaacgggaccctgggtggctcctttgtctcccccagccccctctccaccagcagccccatcctcagtgctgacagcacttcagtggggagtttcccgtcgggagagagcagtgaccagggtccccggacgcccacccagcctctgttggagtctggcttccgctcaggcagcctgggacagcccagcccgtctgcccagagaaactaccagagctcttctcctctcccgactgtgggcagtagctacagcagccccgactactcacttcagcatttcagctcctctccggaaagccaggctcgagctcagttcagtgtggctggcgtccacacggtgcctgggagccctcaggcgcgccacagaacagtgggcaccaacactccccctagtcctggcttcggctggcgggccatcaatcccagcatggctgcccccagcagtcccagtttgagccatcaccagatgatgggtccaccaggcactggcttccatggtagcactgtctccagcccccagagcagtgcagcgaccaccccggggagccccagcctgtgtcggcacccagcaggggtctaccaggtttctggcctccacaacaaagtggccaccaccccggggagtcccagcctgggccggcaccctggggctcaccaaggcaacctggcctccggtcttcatagcaatgcaatagccagccctggaagccccagcctgggccgtcacctcggagggtctggatctgtggttcccggcagcccctgcttggaccggcatgtggcctatggtggctattctaccccggaggatcggagacccacactgtcccggcagagcagtgcctctggctaccaggctccttccacgccctccttccctgtctcccctgcctactaccctggcctgagcagccctgccacctccccgtcaccagactccgcagccttccggcaagggagcccaacaccagccttgccagagaagcgaaggatgtcagtgggagaccgggcaggcagcctccccaactatgccaccatcaatgggaaggtgtcttcgcctgtcgccagcggcatgtccagtcccagtgggggcagcaccgtctccttctcccacactctgcccgacttctccaagtactccatgccagacaacagcccggagacgcgggctaaagtgaagtttgtccaggacacttctaagtattggtacaagcctgagatctccagggagcaggccatcgcgctcctcaaggaccaggagccgggggccttcatcatccgcgacagtcactccttccgaggcgcgtacgggctggccatgaaggtgtcttcgccacctccaaccatcatgcagcagaataaaaaaggagacatgacccatgagctggtcaggcattttctgatagagactggccccagaggagtcaagctcaagggctgccccaatgagccaaacttcggatcgctgtctgccctggtctaccagcactccatcatcccattggccctgccttgcaagctggtcattccaaaccgagaccccacagatgaatcgaaagatagctccggccctgccaactcaactgcagacctgctgaaacaaggggcagcctgcaatgtgctcttcgtcaactctgtggacatggagtcactcactgggccacaggccatctctaaagccacatctgagacgttggctgcagaccccacgccagctgccaccatcgttcacttcaaagtctctgcccagggaatcactctgactgacaaccagagaaagctctttttcagacgccactaccctctcaacactgtcaccttctgtgacctggatccacaggaaagaaagtggatgaaaacagagggtggtgcccctgctaagctcttcggcttcgtggcccggaagcagggcagcaccacggacaacgcctgccacctctttgctgagcttgaccccaaccagccggcctctgccatcgtcaacttcgtctccaaggtcatgctgaatgccggccaaaagagatgaaccctgccccttgcccagggccagtgccatggggaaggggcttgtggggaggggacccatgaatcctgaccactcttgaacccagaaggaggactttgggccaatttcggaggagagaagaaagtgcaacgtggggagagggaagtgaattgcagaggggagggggaaaagagagagagagagagagagagagagagagagaaagatggaggagaagaacttggattcccctgggtagatggaaactgcaaaaacccaaagcctccaaaactaaccaggtccacctaacaccccctccctcccctaagaagatggatgtcctcaaaagagaaggaacaaacctccttgggaatccacattttttgggggaatggaaaagctctgtctccctaactcaactgctttgcaaggggaaatcaagctgggagaatctttttctggccacctgtggggtaggttgtcaaaccaaacagagccaccgtgggacatcaagtggaagaacttgtttgcttgaaagtatctcagacccaaggcacctcaggtctctttgctgtgcctccactatattgtcgtgtgggtgtgtgtctgcacccacatcctcacacattgatctagatctgcctttatccactcgaattataaacagctcggcttgtccttgtcccatgtgtttgtagacacacatgcatactgtccaaagattagggttggtggtggcagtgcagcaggggagggacaaacaaccaagctatgggtgacagaggctctctcctggtgcctgcacctgcactctagtgaccctgggtgccgccagacccttctcttctacaaagaccccagcaggagtgggagggtctgcaatggcatcgccctgtcctgccttggccagaagcctggagctttggtttgaggaggtagagatatgtgtatccataggaagagatctgtcagaacaggcagctgttgagctcggggtgtcttccccaaggcatgtggctcagcagcaagaaaggcaagttgctcctgctggggccctggactctgccttagctcccacctctcagccttgttattgggtttcatgcccctggaccagccttatctcagacctgcttacctgcatgatgcctttttgggggctggggattgagtcttgctgctctgcccagccctgttctattctgcagggtccctgtgttggaattctccctggggaacctactttctgctcagtgaggctccggccagaaacctggagtccttatcctcccctctgtaagtgttttagggtctggcttttgcaggcaccctctgacctcagcagagctcctgggcctgctgcctgcacaccacatcgcctacctacaatgccaaagcctcactgtcaccctttctgccttggtttccctagctgagccacgctgcccatgcagcagagggcagaaggcttgcacttgggccaaagggcctaaggtccactggacagttgggaaaacacctgaccaccatttaaggactctaagccagaatggaaaattcaccaggactccattcttaagcctatgcgagtcccctagagagaggcattgtactgatatataaatattatataatatatacatgagacatactgacagaatctgtaagctaataaaatgtaagaaaaggtt

SEQ ID NO: 190107 - DNA, 667 bp, Homo sapiens
  Payload ID: 17539
  Gene Symbol: TNS1
  Gene Name: tensin 1
  ENST ID: ENST00000413280
  CDS Start-End: 360-667
cttccctccgtccctccttccctccttccttcccgagcgcggattgcgggctggggtgggaggagatttcgcggagtttccatttcatacctcgcggctaaaactttctttctgtgtctcgccctcttgcagtctgcagcttctcctgtcatcggaaatgccaggccaaggtggctgccccctgcgttcctccatccaaccatgagctggtgcccatcaccactgagaatgcaccaaagaatgtagtggacaagggagaaggagcctcccggggtggaaacacacggaaaagcctcgaggacaacggctccaccagggtcaccccgagtgtccagccccacctccagcccatcagaaacatgagtgtgagccggaccatggaggacagctgtgagctggacctggtgtacgtcacagagaggatcatcgctgtctccttccccagcacagccaatgaggagaacttccggagcaacctccgtgaggtggcgcagatgctcaagtccaaacatggaggcaactacctgctgttcaacctctctgagcggagacctgacatcacgaagctccatgccaaggtactggaatttggctggcccgacctccacaccccagccctggagaagatctgcagcatctgtaaggccatggacacatggctcaatgc

SEQ ID NO: 190108 - DNA, 1478 bp, Homo sapiens
  Payload ID: 17539
  Gene Symbol: TNS1
  Gene Name: tensin 1
  ENST ID: ENST00000413554
  CDS Start-End: 17-1478
aggcagcctgactcccatggtgagcccactgccaccaccacattgccctggggcagccctgcatgtccagccctacaaagcggcagcatcccatggaccgcatggggcctctccaggtggagcagggagcatgcctcttaaattagtggggaaggttctgctcaagggctccaccagggtcaccccgagtgtccagccccacctccagcccatcagaaacatgagtgtgagccggaccatggaggacagctgtgagctggacctggtgtacgtcacagagaggatcatcgctgtctccttccccagcacagccaatgaggagaacttccggagcaacctccgtgaggtggcgcagatgctcaagtccaaacatggaggcaactacctgctgttcaacctctctgagcggagacctgacatcacgaagctccatgccaaggtactggaatttggctggcccgacctccacaccccagccctggagaagatctgcagcatctgtaaggccatggacacatggctcaatgcagaccctcacaatgtcgttgttctacacaacaagggaaaccgaggcaggataggagttgtcatcgcggcttacatgcactacagcaacatttctgccagtgcggaccaggctctggaccggtttgcaatgaagcggttctatgaggataagattgtgcccattggccagccatcccaaagaaggtacgtgcattacttcagtggcctgctctccggctccatcaaaatgaacaacaagcccttgtttctgcaccacgtgatcatgcacggcatccccaactttgagtctaaaggaggatgtcggccatttctccgcatctaccaggccatgcaacctgtgtacacatctggcatctacaacatcccaggagacagccagactagcgtctgcatcaccatcgagccaggactgctcttgaagggagacatcttgctgaagtgctaccacaagaagttccgaagcccagcccgagacgtcatcttccgtgtgcagttccacacctgtgccatccatgacctgggggttgtctttgggaaggaggaccttgatgatgctttcaaagatgatcgatttccagagtatggcaaagtggagtttgtattttcttatgggccagagaaaattcaaggcatggagcacctggagaacgggccgagcgtgtctgtggactataacacctccgaccccctcatccgctgggactcctacgacaacttcagtgggcatcgagatgacggcatggaggaggtggtgggacacacgcaggggccactagatgggagcctgtatgctaaggtgaagaagaaagactccctgcacggcagcaccggggctgttaatgccacacgtcctacactgtcggccacccccaaccacgtggaacacacgctttctgtgagcagcgactcgggcaactccacagcctccaccaagaccgacaagaccgacg

SEQ ID NO: 190109 - DNA, 538 bp, Homo sapiens
  Payload ID: 17539
  Gene Symbol: TNS1
  Gene Name: tensin 1
  ENST ID: ENST00000439083
  CDS Start-End: 355-538
agtagccccacttggctcttccctccttcactgctgaggagctgctcattggtccgaggcagctgggactctgggcagagccttcttccggacagctggatggagggtccccctcttagcagagctgctctaacttggggctcagctgggagctggacctcggaacccacctatcctgcctcgtaggcactgcggagccaggagaggggtgcaggggctcctcttcttggagaccccgtggtcaagccccaggttggagtgtgaatcctgcctggccgtcaacttcccagggacttgaggggctccaccagggtcaccccgagtgtccagccccacctccagcccatcagaaacatgagtgtgagccggaccatggaggacagctgtgagctggacctggtgtacgtcacagagaggatcatcgctgtctccttccccagcacagccaatgaggagaacttccggagcaacctccgtgaggtggcgcagatgctcaagtccaaacatggaggcaactacctgctgttcaacctctctg

SEQ ID NO: 190110 - DNA, 2464 bp, Homo sapiens
  Payload ID: 17539
  Gene Symbol: TNS1
  Gene Name: tensin 1
  ENST ID: ENST00000446903
  CDS Start-End: 124-2464
agatgctggcggagccggagcagccgcggactcagagagcccttctgccagcgccgcggggactctagcttcaggggctcttcacaggccctgggcgtgcctcagtgacgggacccagcaaagatgacgtggatctgtctgtcctgcatgctctggccagaggatctggaggcccccaagacacaccgcttcaaggtgaagaccttcaagaaggtgaagccctgtgggatctgccgccaggtcatcacccaggaaggctgcacctgcaaagtctgcagcttctcctgtcatcggaaatgccaggccaaggtggctgccccctgcgttcctccatccaaccatgagctggtgcccatcaccactgagaatgcaccaaagaatgtagtggacaagggagaaggagcctcccggggtggaaacacacggaaaagcctcgaggacaacggctccaccagggtcaccccgagtgtccagccccacctccagcccatcagaaacatgagtgtgagccggaccatggaggacagctgtgagctggacctggtgtacgtcacagagaggatcatcgctgtctccttccccagcacagccaatgaggagaacttccggagcaacctccgtgaggtggcgcagatgctcaagtccaaacatggaggcaactacctgctgttcaacctctctgagcggagacctgacatcacgaagctccatgccaaggtactggaatttggctggcccgacctccacaccccagccctggagaagatctgcagcatctgtaaggccatggacacatggctcaatgcagaccctcacaatgtcgttgttctacacaacaagggaaaccgaggcaggataggagttgtcatcgcggcttacatgcactacagcaacatttctgccagtgcggaccaggctctggaccggtttgcaatgaagcggttctatgaggataagattgtgcccattggccagccatcccaaagaaggtacgtgcattacttcagtggcctgctctccggctccatcaaaatgaacaacaagcccttgtttctgcaccacgtgatcatgcacggcatccccaactttgagtctaaaggaggatgtcggccatttctccgcatctaccaggccatgcaacctgtgtacacatctggcatctacaacatcccaggagacagccagactagcgtctgcatcaccatcgagccaggactgctcttgaagggagacatcttgctgaagtgctaccacaagaagttccgaagcccagcccgagacgtcatcttccgtgtgcagttccacacctgtgccatccatgacctgggggttgtctttgggaaggaggaccttgatgatgctttcaaagatgatcgatttccagagtatggcaaagtggagtttgtattttcttatgggccagagaaaattcaaggcatggagcacctggagaacgggccgagcgtgtctgtggactataacacctccgaccccctcatccgctgggactcctacgacaacttcagtgggcatcgagatgacggcatggaggaggtggtgggacacacgcaggggccactagatgggagcctgtatgctaaggtgaagaagaaagactccctgcacggcagcaccggggctgttaatgccacacgtcctacactgtcggccacccccaaccacgtggaacacacgctttctgtgagcagcgactcgggcaactccacagcctccaccaagaccgacaagaccgacgagcctgtccccggggcctccagtgccactgctgccttgagtccccaggagaagcgggagctggaccgcctgctgagtggctttggcttagagcgagagaagcaaggcgccatgtaccacacccagcacctcaggtcccgcccagcagggggctcggctgtgccctcctctggacgccacgttgtcccagcccaggttcatgtcaatggtggggcgttagcatctgagcgggagacagacatcctggacgatgaattgccaaaccaggatggtcacagtgcgggcagcatgggcacactctcttctctggacggggtcaccaacaccagtgaggggggctacccagaggccctgtccccactgaccaacggtctggacaagtcctaccccatggagcctatggtcaatggaggaggctacccctacgagtctgccagccgggcggggcctgcccatgctggccacacggcccccatgcggccctcctactctgcacaggagggtttagctggctaccagagggaggggccccacccagcctggccacagccagtgaccacctcccactatgcccatgaccccagcggtatgttccgctctcaatccttttcggaagctgaaccccagctgcccccagctccggtccgagggggaagcagccgggaggctgtgcaaaggggactgaattcgtggcagcagcagcagcagc

SEQ ID NO: 190111 - DNA, 5900 bp, Homo sapiens
  Payload ID: 17539
  Gene Symbol: TNS1
  Gene Name: tensin 1
  ENST ID: ENST00000430930
  CDS Start-End: 163-5307
aaccatgagctggtgcccatcaccactgagaatgcaccaaagaatgtagtggacaagggagaaggagcctcccggggtggaaacacacggaaaagcctcgaggacaacggctccaccagggtcaccccgagtgtccagccccacctccagcccatcagaaacatgagtgtgagccggaccatggaggacagctgtgagctggacctggtgtacgtcacagagaggatcatcgctgtctccttccccagcacagccaatgaggagaacttccggagcaacctccgtgaggtggcgcagatgctcaagtccaaacatggaggcaactacctgctgttcaacctctctgagcggagacctgacatcacgaagctccatgccaaggtactggaatttggctggcccgacctccacaccccagccctggagaagatctgcagcatctgtaaggccatggacacatggctcaatgcagaccctcacaatgtcgttgttctacacaacaagggaaaccgaggcaggataggagttgtcatcgcggcttacatgcactacagcaacatttctgccagtgcggaccaggctctggaccggtttgcaatgaagcggttctatgaggataagattgtgcccattggccagccatcccaaagaaggtacgtgcattacttcagtggcctgctctccggctccatcaaaatgaacaacaagcccttgtttctgcaccacgtgatcatgcacggcatccccaactttgagtctaaaggaggatgtcggccatttctccgcatctaccaggccatgcaacctgtgtacacatctggcatctacaacatcccaggagacagccagactagcgtctgcatcaccatcgagccaggactgctcttgaagggagacatcttgctgaagtgctaccacaagaagttccgaagcccagcccgagacgtcatcttccgtgtgcagttccacacctgtgccatccatgacctgggggttgtctttgggaaggaggaccttgatgatgctttcaaagatgatcgatttccagagtatggcaaagtggagtttgtattttcttatgggccagagaaaattcaaggcatggagcacctggagaacgggccgagcgtgtctgtggactataacacctccgaccccctcatccgctgggactcctacgacaacttcagtgggcatcgagatgacggcatggaggaggtggtgggacacacgcaggggccactagatgggagcctgtatgctaaggtgaagaagaaagactccctgcacggcagcaccggggctgttaatgccacacgtcctacactgtcggccacccccaaccacgtggaacacacgctttctgtgagcagcgactcgggcaactccacagcctccaccaagaccgacaagaccgacgagcctgtccccggggcctccagtgccactgctgccttgagtccccaggagaagcgggagctggaccgcctgctgagtggctttggcttagagcgagagaagcaaggcgccatgtaccacacccagcacctcaggtcccgcccagcagggggctcggctgtgccctcctctggacgccacgttgtcccagcccaggttcatgtcaatggtggggcgttagcatctgagcgggagacagacatcctggacgatgaattgccaaaccaggatggtcacagtgcgggcagcatgggcacactctcttctctggacggggtcaccaacaccagtgaggggggctacccagaggccctgtccccactgaccaacggtctggacaagtcctaccccatggagcctatggtcaatggaggaggctacccctacgagtctgccagccgggcggggcctgcccatgctggccacacggcccccatgcggccctcctactctgcacaggagggtttagctggctaccagagggaggggccccacccagcctggccacagccagtgaccacctcccactatgcccatgaccccagcggtatgttccgctctcaatccttttcggaagctgaaccccagctgcccccagctccggtccgagggggaagcagccgggaggctgtgcaaaggggactgaattcgtggcagcagcagcagcagcagcagcagcagcctcgcccacctccacgccagcaggaaagagcccacttggagagtcttgtagccagcaggcccagccctcagccattggcagagacccccatccccagtctccctgagttcccgcgagcagcctcccagcaggagattgaacagtccatcgaaacactcaatatgctgatgctggacctggagccagcctccgctgctgccccactacacaagtcccagagtgtccccggggcctggccaggggcttctccactctcctcccagcccctctctggatcctcccgtcagtcccatccactgacccagtccagatctggctatatccccagtgggcattcgttgggaacccctgagccagccccacgggcctctctggagtctgtccctcctggcaggtcttactcaccttatgactatcagccatgtttggctgggcctaaccaggatttccattcaaagagcccagcctcttcctccttgcctgccttccttccgaccacccacagccctccagggcctcagcaacccccagcctctctccctggcctcactgctcagcctctgctctcaccaaaggaagcgacttcagacccctcccggactccagaggaggagccattgaatttagaagggctggtggcccacagggtagcaggggtacaggctcgggagaagcagcctgcagagcccccagcccctctgcggaggcgggcggccagtgatggacagtatgagaaccagtctccagaagccacatcccctcgtagccctggggttcgctcccctgtccagtgtgtctccccggagctggctcttaccatcgctctcaatcctggagggcggcccaaagagccccatttgcacagctacaaggaggccttcgaggagatggagggaacctccccgagcagcccaccacccagtggggtgcggtcccccccgggtctggccaagacacccctgtctgctctgggcctgaaacctcacaacccagcggacatcctgttgcaccccacaggagagccccggagctatgtggagtctgtggcacggacagcggtggctggaccccgagctcaggactctgagcccaagagctttagtgctccagccacccaggcctatggccatgagatacccctgaggaacgggaccctgggtggctcctttgtctcccccagccccctctccaccagcagccccatcctcagtgctgacagcacttcagtggggagtttcccgtcgggagagagcagtgaccagggtccccggacgcccacccagcctctgttggagtctggcttccgctcaggcagcctgggacagcccagcccgtctgcccagagaaactaccagagctcttctcctctcccgactgtgggcagtagctacagcagccccgactactcacttcagcatttcagctcctctccggaaagccaggctcgagctcagttcagtgtggctggcgtccacacggtgcctgggagccctcaggcgcgccacagaacagtgggcaccaacactccccctagtcctggcttcggctggcgggccatcaatcccagcatggctgcccccagcagtcccagtttgagccatcaccagatgatgggtccaccaggcactggcttccatggtagcactgtctccagcccccagagcagtgcagcgaccaccccggggagccccagcctgtgtcggcacccagcaggggtctaccaggtttctggcctccacaacaaagtggccaccaccccggggagtcccagcctgggccggcaccctggggctcaccaaggcaacctggcctccggtcttcatagcaatgcaatagccagccctggaagccccagcctgggccgtcacctcggagggtctggatctgtggttcccggcagcccctgcttggaccggcatgtggcctatggtggctattctaccccggaggatcggagacccacactgtcccggcagagcagtgcctctggctaccaggctccttccacgccctccttccctgtctcccctgcctactaccctggcctgagcagccctgccacctccccgtcaccagactccgcagccttccggcaagggagcccaacaccagccttgccagagaagcgaaggatgtcagtgggagaccgggcaggcagcctccccaactatgccaccatcaatgggaaggtgtcttcgcctgtcgccagcggcatgtccagtcccagtgggggcagcaccgtctccttctcccacactctgcccgacttctccaagtactccatgccagacaacagcccggagacgcgggctaaagtgaagtttgtccaggacacttctaagtattggtacaagcctgagatctccagggagcaggccatcgcgctcctcaaggaccaggagccgggggccttcatcatccgcgacagtcactccttccgaggcgcgtacgggctggccatgaaggtgtcttcgccacctccaaccatcatgcagcagaataaaaaaggagacatgacccatgagctggtcaggcattttctgatagagactggccccagaggagtcaagctcaagggctgccccaatgagccaaacttcggatcgctgtctgccctggtctaccagcactccatcatcccattggccctgccttgcaagctggtcattccaaaccgagaccccacagatgaatcgaaagatagctccggccctgccaactcaactgcagacctgctgaaacaaggggcagcctgcaatgtgctcttcgtcaactctgtggacatggagtcactcactgggccacaggccatctctaaagccacatctgagacgttggctgcagaccccacgccagctgccaccatcgttcacttcaaagtctctgcccagggaatcactctgactgacaaccagagaaagctctttttcagacgccactaccctctcaacactgtcaccttctgtgacctggatccacaggaaagaaagtggatgaaaacagagggtggtgcccctgctaagctcttcggcttcgtggcccggaagcagggcagcaccacggacaacgcctgccacctctttgctgagcttgaccccaaccagccggcctctgccatcgtcaacttcgtctccaaggtcatgctgaatgccggccaaaagagatgaaccctgccccttgcccagggccagtgccatggggaaggggcttgtggggaggggacccatgaatcctgaccactcttgaacccagaaggaggactttgggccaatttcggaggagagaagaaagtgcaacgtggggagagggaagtgaattgcagaggggagggggaaaagagagagagagagagagagagagagagagagaaagatggaggagaagaacttggattcccctgggtagatggaaactgcaaaaacccaaagcctccaaaactaaccaggtccacctaacaccccctccctcccctaagaagatggatgtcctcaaaagagaaggaacaaacctccttgggaatccacattttttgggggaatggaaaagctctgtctccctaactcaactgctttgcaaggggaaatcaagctgggagaatctttttctggccacctgtggggtaggttgtcaaaccaaacagagccaccgtgggacatcaagtggaagaacttgtttgcttgaaagtatctcagacccaaggcacctcaggtctctttgctgtgcctccactatattgtcgtgtgggtgtgtgtctgcaccc

SEQ ID NO: 190112 - DNA, 5921 bp, Homo sapiens
  Payload ID: 17539
  Gene Symbol: TNS1
  Gene Name: tensin 1
  ENST ID: ENST00000419504
  CDS Start-End: 163-5328
aaccatgagctggtgcccatcaccactgagaatgcaccaaagaatgtagtggacaagggagaaggagcctcccggggtggaaacacacggaaaagcctcgaggacaacggctccaccagggtcaccccgagtgtccagccccacctccagcccatcagaaacatgagtgtgagccggaccatggaggacagctgtgagctggacctggtgtacgtcacagagaggatcatcgctgtctccttccccagcacagccaatgaggagaacttccggagcaacctccgtgaggtggcgcagatgctcaagtccaaacatggaggcaactacctgctgttcaacctctctgagcggagacctgacatcacgaagctccatgccaaggtactggaatttggctggcccgacctccacaccccagccctggagaagatctgcagcatctgtaaggccatggacacatggctcaatgcagaccctcacaatgtcgttgttctacacaacaagggaaaccgaggcaggataggagttgtcatcgcggcttacatgcactacagcaacatttctgccagtgcggaccaggctctggaccggtttgcaatgaagcggttctatgaggataagattgtgcccattggccagccatcccaaagaaggtacgtgcattacttcagtggcctgctctccggctccatcaaaatgaacaacaagcccttgtttctgcaccacgtgatcatgcacggcatccccaactttgagtctaaaggaggatgtcggccatttctccgcatctaccaggccatgcaacctgtgtacacatctggcatctacaacatcccaggagacagccagactagcgtctgcatcaccatcgagccaggactgctcttgaagggagacatcttgctgaagtgctaccacaagaagttccgaagcccagcccgagacgtcatcttccgtgtgcagttccacacctgtgccatccatgacctgggggttgtctttgggaaggaggaccttgatgatgctttcaaagatgatcgatttccagagtatggcaaagtggagtttgtattttcttatgggccagagaaaattcaaggcatggagcacctggagaacgggccgagcgtgtctgtggactataacacctccgaccccctcatccgctgggactcctacgacaacttcagtgggcatcgagatgacggcatggaggaggtggtgggacacacgcaggggccactagatgggagcctgtatgctaaggtgaagaagaaagactccctgcacggcagcaccggggctgttaatgccacacgtcctacactgtcggccacccccaaccacgtggaacacacgctttctgtgagcagcgactcgggcaactccacagcctccaccaagaccgacaagaccgacgagcctgtccccggggcctccagtgccactgctgccttgagtccccaggagaagcgggagctggaccgcctgctgagtggctttggcttagagcgagagaagcaaggcgccatgtaccacacccagcacctcaggtcccgcccagcagggggctcggctgtgccctcctctggacgccacgttgtcccagcccaggttcatgtcaatggtggggcgttagcatctgagcgggagacagacatcctggacgatgaattgccaaaccaggatggtcacagtgcgggcagcatgggcacactctcttctctggacggggtcaccaacaccagtgaggggggctacccagaggccctgtccccactgaccaacggtctggacaagtcctaccccatggagcctatggtcaatggaggaggctacccctacgagtctgccagccgggcggggcctgcccatgctggccacacggcccccatgcggccctcctactctgcacaggagggtttagctggctaccagagggaggggccccacccagcctggccacagccagtgaccacctcccactatgcccatgaccccagcggtatgttccgctctcaatccttttcggaagctgaaccccagctgcccccagctccggtccgagggggaagcagccgggaggctgtgcaaaggggactgaattcgtggcagcagcagcagcagcagcagcagcagcctcgcccacctccacgccagcaggaaagagcccacttggagagtcttgtagccagcaggcccagccctcagccattggcagagacccccatccccagtctccctgagttcccgcgagcagcctcccagcaggagattgaacagtccatcgaaacactcaatatgctgatgctggacctggagccagcctccgctgctgccccactacacaagtcccagagtgtccccggggcctggccaggggcttctccactctcctcccagcccctctctggatcctcccgtcagtcccatccactgacccagtccagatctggctatatccccagtgggcattcgttgggaacccctgagccagccccacgggcctctctggagtctgtccctcctggcaggtcttactcaccttatgactatcagccatgtttggctgggcctaaccaggatttccattcaaagagcccagcctcttcctccttgcctgccttccttccgaccacccacagccctccagggcctcagcaacccccagcctctctccctggcctcactgctcagcctctgctctcaccaaaggaagcgacttcagacccctcccggactccagaggaggagccattgaatttagaagggctggtggcccacagggtagcaggggtacaggctcgggagaagcagcctgcagagcccccagcccctctgcggaggcgggcggccagtgatggacagtatgagaaccagtctccagaagccacatcccctcgtagccctggggttcgctcccctgtccagtgtgtctccccggagctggctcttaccatcgctctcaatcctggagggcggcccaaagagccccatttgcacagctacaaggaggccttcgaggagatggagggaacctccccgagcagcccaccacccagtggggtgcggtcccccccgggtctggccaagacacccctgtctgctctgggcctgaaacctcacaacccagcggacatcctgttgcaccccacaggagttaccagaagacggatccagccagagccccggagctatgtggagtctgtggcacggacagcggtggctggaccccgagctcaggactctgagcccaagagctttagtgctccagccacccaggcctatggccatgagatacccctgaggaacgggaccctgggtggctcctttgtctcccccagccccctctccaccagcagccccatcctcagtgctgacagcacttcagtggggagtttcccgtcgggagagagcagtgaccagggtccccggacgcccacccagcctctgttggagtctggcttccgctcaggcagcctgggacagcccagcccgtctgcccagagaaactaccagagctcttctcctctcccgactgtgggcagtagctacagcagccccgactactcacttcagcatttcagctcctctccggaaagccaggctcgagctcagttcagtgtggctggcgtccacacggtgcctgggagccctcaggcgcgccacagaacagtgggcaccaacactccccctagtcctggcttcggctggcgggccatcaatcccagcatggctgcccccagcagtcccagtttgagccatcaccagatgatgggtccaccaggcactggcttccatggtagcactgtctccagcccccagagcagtgcagcgaccaccccggggagccccagcctgtgtcggcacccagcaggggtctaccaggtttctggcctccacaacaaagtggccaccaccccggggagtcccagcctgggccggcaccctggggctcaccaaggcaacctggcctccggtcttcatagcaatgcaatagccagccctggaagccccagcctgggccgtcacctcggagggtctggatctgtggttcccggcagcccctgcttggaccggcatgtggcctatggtggctattctaccccggaggatcggagacccacactgtcccggcagagcagtgcctctggctaccaggctccttccacgccctccttccctgtctcccctgcctactaccctggcctgagcagccctgccacctccccgtcaccagactccgcagccttccggcaagggagcccaacaccagccttgccagagaagcgaaggatgtcagtgggagaccgggcaggcagcctccccaactatgccaccatcaatgggaaggtgtcttcgcctgtcgccagcggcatgtccagtcccagtgggggcagcaccgtctccttctcccacactctgcccgacttctccaagtactccatgccagacaacagcccggagacgcgggctaaagtgaagtttgtccaggacacttctaagtattggtacaagcctgagatctccagggagcaggccatcgcgctcctcaaggaccaggagccgggggccttcatcatccgcgacagtcactccttccgaggcgcgtacgggctggccatgaaggtgtcttcgccacctccaaccatcatgcagcagaataaaaaagacatgacccatgagctggtcaggcattttctgatagagactggccccagaggagtcaagctcaagggctgccccaatgagccaaacttcggatcgctgtctgccctggtctaccagcactccatcatcccattggccctgccttgcaagctggtcattccaaaccgagaccccacagatgaatcgaaagatagctccggccctgccaactcaactgcagacctgctgaaacaaggggcagcctgcaatgtgctcttcgtcaactctgtggacatggagtcactcactgggccacaggccatctctaaagccacatctgagacgttggctgcagaccccacgccagctgccaccatcgttcacttcaaagtctctgcccagggaatcactctgactgacaaccagagaaagctctttttcagacgccactaccctctcaacactgtcaccttctgtgacctggatccacaggaaagaaagtggatgaaaacagagggtggtgcccctgctaagctcttcggcttcgtggcccggaagcagggcagcaccacggacaacgcctgccacctctttgctgagcttgaccccaaccagccggcctctgccatcgtcaacttcgtctccaaggtcatgctgaatgccggccaaaagagatgaaccctgccccttgcccagggccagtgccatggggaaggggcttgtggggaggggacccatgaatcctgaccactcttgaacccagaaggaggactttgggccaatttcggaggagagaagaaagtgcaacgtggggagagggaagtgaattgcagaggggagggggaaaagagagagagagagagagagagagagagagagaaagatggaggagaagaacttggattcccctgggtagatggaaactgcaaaaacccaaagcctccaaaactaaccaggtccacctaacaccccctccctcccctaagaagatggatgtcctcaaaagagaaggaacaaacctccttgggaatccacattttttgggggaatggaaaagctctgtctccctaactcaactgctttgcaaggggaaatcaagctgggagaatctttttctggccacctgtggggtaggttgtcaaaccaaacagagccaccgtgggacatcaagtggaagaacttgtttgcttgaaagtatctcagacccaaggcacctcaggtctctttgctgtgcctccactatattgtcgtgtgggtgtgtgtctgcaccc

SEQ ID NO: 190113 - DNA, 548 bp, Homo sapiens
  Payload ID: 17539
  Gene Symbol: TNS1
  Gene Name: tensin 1
  ENST ID: ENST00000423413
  CDS Start-End: 183-548
gcaaaacgcagtgggaatgtcaagcaggaggcagctcatgtgagctggcagagcggaggaagctttggagaagaggtaccatttgagatggattttgaagtttggcaaggagttttgcggggaggaaaaggggcaaagacttcttcaggcacaggggaaggcatgtgcagaggcccagtggcatgcaggtggctgccccctgcgttcctccatccaaccatgagctggtgcccatcaccactgagaatgcaccaaagaatgtagtggacaagggagaaggagcctcccggggtggaaacacacggaaaagcctcgaggacaacggctccaccagggtcaccccgagtgtccagccccacctccagcccatcagaaacatgagtgtgagccggaccatggaggacagctgtgagctggacctggtgtacgtcacagagaggatcatcgctgtctccttccccagcacagccaatgaggagaacttccggagcaacctccgtgaggtggcgcagatgctcaagtccaaacatggaggcaactacctggtg

SEQ ID NO: 190114 - DNA, 601 bp, Homo sapiens
  Payload ID: 17539
  Gene Symbol: TNS1
  Gene Name: tensin 1
  ENST ID: ENST00000453356
  CDS Start-End: 1-448
aggagacagccagactagcgtctgcatcaccatcgagccaggactgctcttgaagggagacatcttgctgaagtgctaccacaagaagttccgaagcccagcccgagacgtcatcttccgtgtgcagttccacacctgtgccatccatgacctgggggttgtctttgggaaggaggaccttgatgatgctttcaaagatgatcgatttccagagtatggcaaagtggagtttgtattttcttatgggccagagaaaattcaaggcatggagcacctggagaacgggccgagcgtgtctgtggactataacacctccgaccccctcatccgctgggactcctacgacaacttcagtgggcatcgagatgacggcatggagggggcccagcaccctcagattggccaagacaccccaccaggcccctccgaccccccaggctgcttgtgaaaagcactcctccatccccgggcgctgagcggccaagcagaaagcagaggctggagcgaatttgttctgaggtttcagtggctgccagcctaattggtcgttgtgctggggatgtttgcatttttaacaagaacatttggcaattggaaagaa

SEQ ID NO: 190115 - DNA, 6488 bp, Homo sapiens
  Payload ID: 17539
  Gene Symbol: TNS1
  Gene Name: tensin 1
  ENST ID: ENST00000615025
  CDS Start-End: 1378-5475
aggctcactcgctgccttcttctgggggaaaccagcttcttgccagccacagctgctgcctccgccactggccaccgcccctgtcctgggagtcccttggcccagacacccacctgacttagtggctcctctgcaggaaaggtggctgccccctgcgttcctccatccaaccatgagctggtgcccatcaccactgagaatgcaccaaagaatgtagtggacaagggagaaggagcctcccggggtggaaacacacggaaaagcctcgaggacaacggctccaccagggtcaccccgagtgtccagccccacctccagcccatcagaaacatgagtgtgagccggaccatggaggacagctgtgagctggacctggtgtacgtcacagagaggatcatcgctgtctccttccccagcacagccaatgaggagaacttccggagcaacctccgtgaggtggcgcagatgctcaagtccaaacatggaggcaactacctgctgttcaacctctctgagcggagacctgacatcacgaagctccatgccaaggtactggaatttggctggcccgacctccacaccccagccctggagaagatctgcagcatctgtaaggccatggacacatggctcaatgcagaccctcacaatgtcgttgttctacacaacaagggaaaccgaggcaggataggagttgtcatcgcggcttacatgcactacagcaacatttctgccagtgcggaccaggctctggaccggtttgcaatgaagcggttctatgaggataagattgtgcccattggccagccatcccaaagaaggtacgtgcattacttcagtggcctgctctccggctccatcaaaatgaacaacaagcccttgtttctgcaccacgtgatcatgcacggcatccccaactttgagtctaaaggaggatgtcggccatttctccgcatctaccaggccatgcaacctgtgtacacatctggcatctacaacatcccaggagacagccagactagcgtctgcatcaccatcgagccaggactgctcttgaagggagacatcttgctgaagtgctaccacaagaagttccgaagcccagcccgagacgtcatcttccgtgtgcagttccacacctgtgccatccatgacctgggggttgtctttgggaaggaggaccttgatgatgctttcaaagatgatcgatttccagagtatggcaaagtggagtttgtattttcttatgggccagagaaaattcaaggcatggagcacctggagaacgggccgagcgtgtctgtggactataacacctccgaccccctcatccgctgggactcctacgacaacttcagtgggcatcgagatgacggcatggaggaggtggtgggacacacgcaggggccactagatgggagcctgtatgctaaggtgaagaagaaagactccctgcacggcagcaccggggctgttaatgccacacgtcctacactgtcggccacccccaaccacgtggaacacacgctttctgtgagcagcgactcgggcaactccacagcctccaccaagaccgacaagaccgacgagcctgtccccggggcctccagtgccactgctgccttgagtccccaggagaagcgggagctggaccgcctgctgagtggctttggcttagagcgagagaagcaaggcgccatgtaccacacccagcacctcaggtcccgcccagcagggggctcggctgtgccctcctctggacgccacgttgtcccagcccaggttcatgtcaatggtggggcgttagcatctgagcgggagacagacatcctggacgatgaattgccaaaccaggatggtcacagtgcgggcagcatgggcacactctcttctctggacggggtcaccaacaccagtgaggggggctacccagaggccctgtccccactgaccaacggtctggacaagtcctaccccatggagcctatggtcaatggaggaggctacccctacgagtctgccagccgggcggggcctgcccatgctggccacacggcccccatgcggccctcctactctgcacaggagggtttagctggctaccagagggaggggccccacccagcctggccacagccagtgaccacctcccactatgcccatgaccccagcggtatgttccgctctcaatccttttcggaagctgaaccccagctgcccccagctccggtccgagggggaagcagccgggaggctgtgcaaaggggactgaattcgtggcagcagcagcagcagcagcagcagcagcctcgcccacctccacgccagcaggaaagagcccacttggagagtcttgtagccagcaggcccagccctcagccattggcagagacccccatccccagtctccctgagttcccgcgagcagcctcccagcaggagattgaacagtccatcgaaacactcaatatgctgatgctggacctggagccagcctccgctgctgccccactacacaagtcccagagtgtccccggggcctggccaggggcttctccactctcctcccagcccctctctggatcctcccgtcagtcccatccactgacccagtccagatctggctatatccccagtgggcattcgttgggaacccctgagccagccccacgggcctctctggagtctgtccctcctggcaggtcttactcaccttatgactatcagccatgtttggctgggcctaaccaggatttccattcaaagagcccagcctcttcctccttgcctgccttccttccgaccacccacagccctccagggcctcagcaacccccagcctctctccctggcctcactgctcagcctctgctctcaccaaaggaagcgacttcagacccctcccggactccagaggaggagccattgaatttagaagggctggtggcccacagggtagcaggggtacaggctcgggagaagcagcctgcagagcccccagcccctctgcggaggcgggcggccagtgatggacagtatgagaaccagtctccagaagccacatcccctcgtagccctggggttcgctcccctgtccagtgtgtctccccggagctggctcttaccatcgctctcaatcctggagggcggcccaaagagccccatttgcacagctacaaggaggccttcgaggagatggagggaacctccccgagcagcccaccacccagtggggtgcggtcccccccgggtctggccaagacacccctgtctgctctgggcctgaaacctcacaacccagcggacatcctgttgcaccccacaggagagccccggagctatgtggagtctgtggcacggacagcggtggctggaccccgagctcaggactctgagcccaagagctttagtgctccagccacccaggcctatggccatgagatacccctgaggaacgggaccctgggtggctcctttgtctcccccagccccctctccaccagcagccccatcctcagtgctgacagcacttcagtggggagtttcccgtcgggagagagcagtgaccagggtccccggacgcccacccagcctctgttggagtctggcttccgctcaggcagcctgggacagcccagcccgtctgcccagagaaactaccagagctcttctcctctcccgactgtgggcagtagctacagcagccccgactactcacttcagcatttcagctcctctccggaaagccaggctcgagctcagttcagtgtggctggcgtccacacggtgcctgggagccctcaggcgcgccacagaacagtgggcaccaacactccccctagtcctggcttcggctggcgggccatcaatcccagcatggctgcccccagcagtcccagtttgagccatcaccagatgatgggtccaccaggcactggcttccatggtagcactgtctccagcccccagagcagtgcagcgaccaccccggggagccccagcctgtgtcggcacccagcaggggtctaccaggtttctggcctccacaacaaagtggccaccaccccggggagtcccagcctgggccggcaccctggggctcaccaaggcaacctggcctccggtcttcatagcaatgcaatagccagccctggaagccccagcctgggccgtcacctcggagggtctggatctgtggttcccggcagcccctgcttggaccggcatgtggcctatggtggctattctaccccggaggatcggagacccacactgtcccggcagagcagtgcctctggctaccaggctccttccacgccctccttccctgtctcccctgcctactaccctggcctgagcagccctgccacctccccgtcaccagactccgcagccttccggcaagggagcccaacaccagccttgccagagaagcgaaggatgtcagtgggagaccgggcaggcagcctccccaactatgccaccatcaatgggaaggtgtcttcgcctgtcgccagcggcatgtccagtcccagtgggggcagcaccgtctccttctcccacactctgcccgacttctccaagtactccatgccagacaacagcccggagacgcgggctaaagtgaagtttgtccaggacacttctaagtattggtacaagcctgagatctccagggagcaggccatcgcgctcctcaaggaccaggagccgggggccttcatcatccgcgacagtcactccttccgaggcgcgtacgggctggccatgaaggtgtcttcgccacctccaaccatcatgcagcagaataaaaaaggagacatgacccatgagctggtcaggcattttctgatagagactggccccagaggagtcaagctcaagggctgccccaatgagccaaacttcggatcgctgtctgccctggtctaccagcactccatcatcccattggccctgccttgcaagctggtcattccaaaccgagaccccacagatgaatcgaaagatagctccggccctgccaactcaactgcagacctgctgaaacaaggggcagcctgcaatgtgctcttcgtcaactctgtggacatggagtcactcactgggccacaggccatctctaaagccacatctgagacgttggctgcagaccccacgccagctgccaccatcgttcacttcaaagtctctgcccagggaatcactctgactgacaaccagagaaagctctttttcagacgccactaccctctcaacactgtcaccttctgtgacctggatccacaggaaagaaagtggatgaaaacagagggtggtgcccctgctaagctcttcggcttcgtggcccggaagcagggcagcaccacggacaacgcctgccacctctttgctgagcttgaccccaaccagccggcctctgccatcgtcaacttcgtctccaaggtcatgctgaatgccggccaaaagagatgaaccctgccccttgcccagggccagtgccatggggaaggggcttgtggggaggggacccatgaatcctgaccactcttgaacccagaaggaggactttgggccaatttcggaggagagaagaaagtgcaacgtggggagagggaagtgaattgcagaggggagggggaaaagagagagagagagagagagagagagagagagaaagatggaggagaagaacttggattcccctgggtagatggaaactgcaaaaacccaaagcctccaaaactaaccaggtccacctaacaccccctccctcccctaagaagatggatgtcctcaaaagagaaggaacaaacctccttgggaatccacattttttgggggaatggaaaagctctgtctccctaactcaactgctttgcaaggggaaatcaagctgggagaatctttttctggccacctgtggggtaggttgtcaaaccaaacagagccaccgtgggacatcaagtggaagaacttgtttgcttgaaagtatctcagacccaaggcacctcaggtctctttgctgtgcctccactatattgtcgtgtgggtgtgtgtctgcacccacatcctcacacattgatctagatctgcctttatccactcgaattataaacagctcggcttgtccttgtcccatgtgtttgtagacacacatgcatactgtccaaagattagggttggtggtggcagtgcagcaggggagggacaaacaaccaagctatgggtgacagaggctctctcctggtgcctgcacctgcactctagtgaccctgggtgccgccagacccttctcttctacaaagaccccagcaggagtgggagggtctgcaatggcatcgccctgtcctgccttggccagaagcctggagctttggtttgaggaggtagagatatgtgtatccataggaagagatctgtcagaacaggcagctgttgagctcggggtgtcttccccaaggcatgtggctcagcagcaagaaagg

SEQ ID NO: 190116 - DNA, 6509 bp, Homo sapiens
  Payload ID: 17539
  Gene Symbol: TNS1
  Gene Name: tensin 1
  ENST ID: ENST00000611415
  CDS Start-End: 331-5496
aggctcactcgctgccttcttctgggggaaaccagcttcttgccagccacagctgctgcctccgccactggccaccgcccctgtcctgggagtcccttggcccagacacccacctgacttagtggctcctctgcaggaaaggtggctgccccctgcgttcctccatccaaccatgagctggtgcccatcaccactgagaatgcaccaaagaatgtagtggacaagggagaaggagcctcccggggtggaaacacacggaaaagcctcgaggacaacggctccaccagggtcaccccgagtgtccagccccacctccagcccatcagaaacatgagtgtgagccggaccatggaggacagctgtgagctggacctggtgtacgtcacagagaggatcatcgctgtctccttccccagcacagccaatgaggagaacttccggagcaacctccgtgaggtggcgcagatgctcaagtccaaacatggaggcaactacctgctgttcaacctctctgagcggagacctgacatcacgaagctccatgccaaggtactggaatttggctggcccgacctccacaccccagccctggagaagatctgcagcatctgtaaggccatggacacatggctcaatgcagaccctcacaatgtcgttgttctacacaacaagggaaaccgaggcaggataggagttgtcatcgcggcttacatgcactacagcaacatttctgccagtgcggaccaggctctggaccggtttgcaatgaagcggttctatgaggataagattgtgcccattggccagccatcccaaagaaggtacgtgcattacttcagtggcctgctctccggctccatcaaaatgaacaacaagcccttgtttctgcaccacgtgatcatgcacggcatccccaactttgagtctaaaggaggatgtcggccatttctccgcatctaccaggccatgcaacctgtgtacacatctggcatctacaacatcccaggagacagccagactagcgtctgcatcaccatcgagccaggactgctcttgaagggagacatcttgctgaagtgctaccacaagaagttccgaagcccagcccgagacgtcatcttccgtgtgcagttccacacctgtgccatccatgacctgggggttgtctttgggaaggaggaccttgatgatgctttcaaagatgatcgatttccagagtatggcaaagtggagtttgtattttcttatgggccagagaaaattcaaggcatggagcacctggagaacgggccgagcgtgtctgtggactataacacctccgaccccctcatccgctgggactcctacgacaacttcagtgggcatcgagatgacggcatggaggaggtggtgggacacacgcaggggccactagatgggagcctgtatgctaaggtgaagaagaaagactccctgcacggcagcaccggggctgttaatgccacacgtcctacactgtcggccacccccaaccacgtggaacacacgctttctgtgagcagcgactcgggcaactccacagcctccaccaagaccgacaagaccgacgagcctgtccccggggcctccagtgccactgctgccttgagtccccaggagaagcgggagctggaccgcctgctgagtggctttggcttagagcgagagaagcaaggcgccatgtaccacacccagcacctcaggtcccgcccagcagggggctcggctgtgccctcctctggacgccacgttgtcccagcccaggttcatgtcaatggtggggcgttagcatctgagcgggagacagacatcctggacgatgaattgccaaaccaggatggtcacagtgcgggcagcatgggcacactctcttctctggacggggtcaccaacaccagtgaggggggctacccagaggccctgtccccactgaccaacggtctggacaagtcctaccccatggagcctatggtcaatggaggaggctacccctacgagtctgccagccgggcggggcctgcccatgctggccacacggcccccatgcggccctcctactctgcacaggagggtttagctggctaccagagggaggggccccacccagcctggccacagccagtgaccacctcccactatgcccatgaccccagcggtatgttccgctctcaatccttttcggaagctgaaccccagctgcccccagctccggtccgagggggaagcagccgggaggctgtgcaaaggggactgaattcgtggcagcagcagcagcagcagcagcagcagcctcgcccacctccacgccagcaggaaagagcccacttggagagtcttgtagccagcaggcccagccctcagccattggcagagacccccatccccagtctccctgagttcccgcgagcagcctcccagcaggagattgaacagtccatcgaaacactcaatatgctgatgctggacctggagccagcctccgctgctgccccactacacaagtcccagagtgtccccggggcctggccaggggcttctccactctcctcccagcccctctctggatcctcccgtcagtcccatccactgacccagtccagatctggctatatccccagtgggcattcgttgggaacccctgagccagccccacgggcctctctggagtctgtccctcctggcaggtcttactcaccttatgactatcagccatgtttggctgggcctaaccaggatttccattcaaagagcccagcctcttcctccttgcctgccttccttccgaccacccacagccctccagggcctcagcaacccccagcctctctccctggcctcactgctcagcctctgctctcaccaaaggaagcgacttcagacccctcccggactccagaggaggagccattgaatttagaagggctggtggcccacagggtagcaggggtacaggctcgggagaagcagcctgcagagcccccagcccctctgcggaggcgggcggccagtgatggacagtatgagaaccagtctccagaagccacatcccctcgtagccctggggttcgctcccctgtccagtgtgtctccccggagctggctcttaccatcgctctcaatcctggagggcggcccaaagagccccatttgcacagctacaaggaggccttcgaggagatggagggaacctccccgagcagcccaccacccagtggggtgcggtcccccccgggtctggccaagacacccctgtctgctctgggcctgaaacctcacaacccagcggacatcctgttgcaccccacaggagttaccagaagacggatccagccagagccccggagctatgtggagtctgtggcacggacagcggtggctggaccccgagctcaggactctgagcccaagagctttagtgctccagccacccaggcctatggccatgagatacccctgaggaacgggaccctgggtggctcctttgtctcccccagccccctctccaccagcagccccatcctcagtgctgacagcacttcagtggggagtttcccgtcgggagagagcagtgaccagggtccccggacgcccacccagcctctgttggagtctggcttccgctcaggcagcctgggacagcccagcccgtctgcccagagaaactaccagagctcttctcctctcccgactgtgggcagtagctacagcagccccgactactcacttcagcatttcagctcctctccggaaagccaggctcgagctcagttcagtgtggctggcgtccacacggtgcctgggagccctcaggcgcgccacagaacagtgggcaccaacactccccctagtcctggcttcggctggcgggccatcaatcccagcatggctgcccccagcagtcccagtttgagccatcaccagatgatgggtccaccaggcactggcttccatggtagcactgtctccagcccccagagcagtgcagcgaccaccccggggagccccagcctgtgtcggcacccagcaggggtctaccaggtttctggcctccacaacaaagtggccaccaccccggggagtcccagcctgggccggcaccctggggctcaccaaggcaacctggcctccggtcttcatagcaatgcaatagccagccctggaagccccagcctgggccgtcacctcggagggtctggatctgtggttcccggcagcccctgcttggaccggcatgtggcctatggtggctattctaccccggaggatcggagacccacactgtcccggcagagcagtgcctctggctaccaggctccttccacgccctccttccctgtctcccctgcctactaccctggcctgagcagccctgccacctccccgtcaccagactccgcagccttccggcaagggagcccaacaccagccttgccagagaagcgaaggatgtcagtgggagaccgggcaggcagcctccccaactatgccaccatcaatgggaaggtgtcttcgcctgtcgccagcggcatgtccagtcccagtgggggcagcaccgtctccttctcccacactctgcccgacttctccaagtactccatgccagacaacagcccggagacgcgggctaaagtgaagtttgtccaggacacttctaagtattggtacaagcctgagatctccagggagcaggccatcgcgctcctcaaggaccaggagccgggggccttcatcatccgcgacagtcactccttccgaggcgcgtacgggctggccatgaaggtgtcttcgccacctccaaccatcatgcagcagaataaaaaagacatgacccatgagctggtcaggcattttctgatagagactggccccagaggagtcaagctcaagggctgccccaatgagccaaacttcggatcgctgtctgccctggtctaccagcactccatcatcccattggccctgccttgcaagctggtcattccaaaccgagaccccacagatgaatcgaaagatagctccggccctgccaactcaactgcagacctgctgaaacaaggggcagcctgcaatgtgctcttcgtcaactctgtggacatggagtcactcactgggccacaggccatctctaaagccacatctgagacgttggctgcagaccccacgccagctgccaccatcgttcacttcaaagtctctgcccagggaatcactctgactgacaaccagagaaagctctttttcagacgccactaccctctcaacactgtcaccttctgtgacctggatccacaggaaagaaagtggatgaaaacagagggtggtgcccctgctaagctcttcggcttcgtggcccggaagcagggcagcaccacggacaacgcctgccacctctttgctgagcttgaccccaaccagccggcctctgccatcgtcaacttcgtctccaaggtcatgctgaatgccggccaaaagagatgaaccctgccccttgcccagggccagtgccatggggaaggggcttgtggggaggggacccatgaatcctgaccactcttgaacccagaaggaggactttgggccaatttcggaggagagaagaaagtgcaacgtggggagagggaagtgaattgcagaggggagggggaaaagagagagagagagagagagagagagagagagaaagatggaggagaagaacttggattcccctgggtagatggaaactgcaaaaacccaaagcctccaaaactaaccaggtccacctaacaccccctccctcccctaagaagatggatgtcctcaaaagagaaggaacaaacctccttgggaatccacattttttgggggaatggaaaagctctgtctccctaactcaactgctttgcaaggggaaatcaagctgggagaatctttttctggccacctgtggggtaggttgtcaaaccaaacagagccaccgtgggacatcaagtggaagaacttgtttgcttgaaagtatctcagacccaaggcacctcaggtctctttgctgtgcctccactatattgtcgtgtgggtgtgtgtctgcacccacatcctcacacattgatctagatctgcctttatccactcgaattataaacagctcggcttgtccttgtcccatgtgtttgtagacacacatgcatactgtccaaagattagggttggtggtggcagtgcagcaggggagggacaaacaaccaagctatgggtgacagaggctctctcctggtgcctgcacctgcactctagtgaccctgggtgccgccagacccttctcttctacaaagaccccagcaggagtgggagggtctgcaatggcatcgccctgtcctgccttggccagaagcctggagctttggtttgaggaggtagagatatgtgtatccataggaagagatctgtcagaacaggcagctgttgagctcggggtgtcttccccaaggcatgtggctcagcagcaagaaagg

SEQ ID NO: 190117 - DNA, 5010 bp, Homo sapiens
  Payload ID: 17540
  Gene Symbol: TNS2
  Gene Name: tensin 2
  Uniprot ID: Q63HR2
  ENST ID: ENST00000314250
  CDS Start-End: 291-4520
gggggagcaaaagatcacaggctgacactcccagcagggtagatcctgggaatctgatctcctggcctcccccacatcctcccccctccacttcctggagcagcgacctgcccccttcccgcctgcacttccctccacttccagggccgggcttctcctcacaccagccagacagcctaccctccgcccaggggaagcggctgcctccgccaggccgcttccaggaagccccgggccaggccccagcattgttcaggccctggggccagcaccccagccagccgaacaccatgaagtccagcggccctgtggagaggctgctcagagccctggggaggagggacagcagccgggccgcaagcaggcctaggaaagctgagcctcatagcttccgggagaaggttttccggaagaaacctccagtctgtgcagtatgtaaggtgaccatcgatgggacaggcgtttcgtgcagagtctgcaaggtggcgacgcacagaaaatgtgaagcaaaggtgacttcagcctgtcaggccttgcctcccgtggagttgcggcgaaacacggccccagtcaggcgcatagagcacctgggatccaccaaatctctgaaccactcaaagcagcgcagcactctgcccaggagcttcagcctggacccgctcatggagcggcgctgggacttagacctcacctacgtgacggagcgcatcttggccgccgccttccccgcgcggcccgatgaacagcggcaccggggccacctgcgcgagctggcccatgtgctgcaatccaagcaccgggacaagtacctgctcttcaacctttcagagaaaaggcatgacctgacccgcttaaaccccaaggttcaagacttcggctggcctgagctgcatgctccacccctggacaagctgtgctccatctgcaaagccatggagacatggctcagtgctgacccacagcacgtggtcgtactatactgcaagggaaacaagggcaagcttggggtcatcgtttctgcctacatgcactacagcaagatctctgcaggggcggaccaggcactggccactcttaccatgcggaaattctgcgaggacaaggtggccacagaactgcagccctcccagcgtcgatatatcagctacttcagtgggctgctatctggctccatcagaatgaacagcagccctctcttcctgcactatgtgctcatccccatgctgccagcctttgaacctggcacaggcttccagcccttccttaaaatctaccagtccatgcagcttgtctacacatctggagtctatcacattgcaggccctggtccccagcagctttgcatcagcctggagccagccctcctcctcaaaggcgatgtcatggtaacatgttatcacaagggtggccggggcacagaccggaccctcgtgttccgagtccagttccacacctgcaccatccacggaccacagctcactttccccaaggaccagcttgacgaggcctggactgatgagaggttccccttccaagcctccgtggagtttgtcttctcctccagccccgagaagatcaaaggcagcactccacggaacgacccctcggtctctgtcgactacaacaccactgagccagccgtgcgctgggactcctatgagaacttcaaccagcaccacgaggacagtgtggatggctccttgacccacacccggggtcccctggatggcagtccttatgcccaggtgcagcggcctccccggcagacccccccggcaccctctccagagcctccaccaccccccatgctctctgtcagcagcgactcaggccattcctccacgctgaccacagagccggctgctgagtcccctggccggccgccccctacagctgctgaacggcaggagctggatcgcctcctaggaggctgcggagtggccagtgggggccggggagctgggcgcgagacggccatcctagatgacgaagagcagcccactgtgggcggaggcccccacctcggagtgtatccaggccataggcctggcctcagccgccactgctcctgccgccagggctaccgggagccctgcggggttcccaatgggggctactaccggccagagggaaccctggagaggaggcgactggcctacgggggctatgagggatccccccagggctacgccgaggcctcgatggagaagaggcgcctctgccgatcgctgtcagaggggctatacccctacccacctgagatggggaaaccagccactggggactttggctaccgcgccccaggctaccgggaggtggtcatcctggaggaccctgggctgcctgccctatacccatgcccagcctgcgaggagaagctggcgctgcctacagcagccttgtatggactgcggctggagagggaggctggagaagggtgggcaagtgaggctggcaagcctctcctgcacccagtgcggcctgggcacccgctgcctctgctcttgcctgcctgtgggcatcaccatgccccgatgcctgactacagctgcctgaagccacccaaggcaggcgaggaagggcacgagggctgctcctacaccatgtgccccgaaggcaggtatgggcatccagggtaccctgccctggtgacatacagctatggaggagcagttcccagttactgcccagcatatggccgtgtgcctcatagctgtggctctccaggagagggcagagggtatcccagccctggtgcccactccccacgggctggctccatttccccgggcagcccgccctatccacaatctaggaagctgagctacgagatccctacggaggagggaggggacaggtacccattgcctgggcacctggcctcagcaggacctttggcatctgcagagtcgctggagccggtgtcctggagggagggccccagtgggcacagcacactgcctcggtctccccgagatgccccatgcagtgcttcgtcagagttgtctggtccctccacgcccctgcacaccagcagtccagtccagggcaaggaaagcacccggcgacaggacaccaggtcccccacctcagcgcccactcagagactgagtcctggcgaggccttgccccctgtttcccaggcaggcaccggaaaggcccctgagctgccgtcgggaagtgggcctgagcctctggcccctagcccagtctctccgaccttccctcccagctcgcccagtgactggcctcaggaaaggagtccagggggccactcagatggcgccagtcctcggagccctgtgcccaccacacttcctggcctccgccacgccccctggcaaggccctcgaggcccccccgacagcccagatgggtctcccctcactcctgtgccttcccagatgccctggcttgtggccagcccagagccgcctcagagctcacctacacctgctttccccctggctgcctcctatgacaccaatggccttagccagcccccacttcctgagaaacgccacctgcccgggccggggcaacagccaggaccctggggcccagagcaggcatcatcgccagccagaggcatcagtcaccatgtcaccttcgcacctctgctctcagataatgtcccccaaaccccagagcctcctacacaagagagccaaagcaatgtcaagtttgtccaggatacatccaagttctggtacaagccacacctgtcccgtgaccaagccattgccctgctgaaggacaaggaccctggggccttcctgatcagggacagtcattcattccaaggagcttatgggctggccctcaaggtggccacaccgccacccagtgcccagccctggaaaggggaccccgtggaacagctggtccgccatttcctcatcgagactgggcccaaaggggtgaagatcaagggctgccccagtgagccctactttggcagcctgtccgccttggtctcccagcactccatctcccccatctccctgccctgctgcctgcgcattcccagcaaagatcctctggaagagaccccagaggctccagtgcccaccaacatgagcacagcggcagacctcctgcgtcagggtgctgcctgcagcgtgctctacttgacctcagtggagacagagtcactgacgggcccccaagctgtggcccgggccagctctgcagctctgagctgtagcccccgcccgacaccagctgttgtccacttcaaggtgtcagcccagggcattacactgacggacaaccaaaggaagctcttctttcgccgccattatccagtgaacagcatcaccttctccagcactgaccctcaagaccggagatggaccaacccagacgggaccacctccaagatctttggtttcgtggccaagaagccgggaagcccctgggagaatgtgtgtcacctctttgcagagcttgacccagatcagcctgctggcgccattgtcaccttcatcaccaaagttctactgggccagagaaaatgaaggaaggccacaagctcagagcccacatcaacactgcccccctcccagcaccccacagccctcacatcccctggcctggacccaggagacccaggagaaagcaccctcccttaggaatgaggagtgggcatcaggcctgggacactgctctccttccccgcccccagcctgctaagttaagtggacaggcccacaagatgaccttgcatgtgagcagatggcagagatgggtgtgtgaggggtgaggaggcatcagcagttgagccccgaaggagatcaggcagccccacctgcaggagaacgtcagccctccaggggatcagcccctgccagttccacccagctgcaggtgccagcacggcagggatgggagaggggtggggagcgagtcactgcctcctctgagcagagattcagagtaggatcacatgaataggggaaaaaagagagtctatttttgtctaataataaagaatttctataaacttta

SEQ ID NO: 190118 - DNA, 4944 bp, Homo sapiens
  Payload ID: 17540
  Gene Symbol: TNS2
  Gene Name: tensin 2
  Uniprot ID: Q63HR2
  ENST ID: ENST00000314276
  CDS Start-End: 196-4455
gcacattctttcaagtgacagctatagcctgtcccaggggctgctgtccacagcttggggctgaagactcccaggccattaaccccttagcttttaggaagattactccccctttttcaaggccccatccacctccctcccttgactcccaggacgggaagttggccatgttcccaggagggaggccggaggcccatggatgggggtggagtatgtgttgggaggggggacctcctgtccagtcctcaggccctgggacagctgctgaggaaggagagcagacccaggagagccatgaagcctaggaaagctgagcctcatagcttccgggagaaggttttccggaagaaacctccagtctgtgcagtatgtaaggtgaccatcgatgggacaggcgtttcgtgcagagtctgcaaggtggcgacgcacagaaaatgtgaagcaaaggtgacttcagcctgtcaggccttgcctcccgtggagttgcggcgaaacacggccccagtcaggcgcatagagcacctgggatccaccaaatctctgaaccactcaaagcagcgcagcactctgcccaggagcttcagcctggacccgctcatggagcggcgctgggacttagacctcacctacgtgacggagcgcatcttggccgccgccttccccgcgcggcccgatgaacagcggcaccggggccacctgcgcgagctggcccatgtgctgcaatccaagcaccgggacaagtacctgctcttcaacctttcagagaaaaggcatgacctgacccgcttaaaccccaaggttcaagacttcggctggcctgagctgcatgctccacccctggacaagctgtgctccatctgcaaagccatggagacatggctcagtgctgacccacagcacgtggtcgtactatactgcaagggaaacaagggcaagcttggggtcatcgtttctgcctacatgcactacagcaagatctctgcaggggcggaccaggcactggccactcttaccatgcggaaattctgcgaggacaaggtggccacagaactgcagccctcccagcgtcgatatatcagctacttcagtgggctgctatctggctccatcagaatgaacagcagccctctcttcctgcactatgtgctcatccccatgctgccagcctttgaacctggcacaggcttccagcccttccttaaaatctaccagtccatgcagcttgtctacacatctggagtctatcacattgcaggccctggtccccagcagctttgcatcagcctggagccagccctcctcctcaaaggcgatgtcatggtaacatgttatcacaagggtggccggggcacagaccggaccctcgtgttccgagtccagttccacacctgcaccatccacggaccacagctcactttccccaaggaccagcttgacgaggcctggactgatgagaggttccccttccaagcctccgtggagtttgtcttctcctccagccccgagaagatcaaaggcagcactccacggaacgacccctcggtctctgtcgactacaacaccactgagccagccgtgcgctgggactcctatgagaacttcaaccagcaccacgaggacagtgtggatggctccttgacccacacccggggtcccctggatggcagtccttatgcccaggtgcagcggcctccccggcagacccccccggcaccctctccagagcctccaccaccccccatgctctctgtcagcagcgactcaggccattcctccacgctgaccacagagccggctgctgagtcccctggccggccgccccctacagctgctgaacggcaggagctggatcgcctcctaggaggctgcggagtggccagtgggggccggggagctgggcgcgagacggccatcctagatgacgaagagcagcccactgtgggcggaggcccccacctcggagtgtatccaggccataggcctggcctcagccgccactgctcctgccgccagggctaccgggagccctgcggggttcccaatgggggctactaccggccagagggaaccctggagaggaggcgactggcctacgggggctatgagggatccccccagggctacgccgaggcctcgatggagaagaggcgcctctgccgatcgctgtcagaggggctatacccctacccacctgagatggggaaaccagccactggggactttggctaccgcgccccaggctaccgggaggtggtcatcctggaggaccctgggctgcctgccctatacccatgcccagcctgcgaggagaagctggcgctgcctacagcagccttgtatggactgcggctggagagggaggctggagaagggtgggcaagtgaggctggcaagcctctcctgcacccagtgcggcctgggcacccgctgcctctgctcttgcctgcctgtgggcatcaccatgccccgatgcctgactacagctgcctgaagccacccaaggcaggcgaggaagggcacgagggctgctcctacaccatgtgccccgaaggcaggtatgggcatccagggtaccctgccctggtgacatacagctatggaggagcagttcccagttactgcccagcatatggccgtgtgcctcatagctgtggctctccaggagagggcagagggtatcccagccctggtgcccactccccacgggctggctccatttccccgggcagcccgccctatccacaatctaggaagctgagctacgagatccctacggaggagggaggggacaggtacccattgcctgggcacctggcctcagcaggacctttggcatctgcagagtcgctggagccggtgtcctggagggagggccccagtgggcacagcacactgcctcggtctccccgagatgccccatgcagtgcttcgtcagagttgtctggtccctccacgcccctgcacaccagcagtccagtccagggcaaggaaagcacccggcgacaggacaccaggtcccccacctcagcgcccactcagagactgagtcctggcgaggccttgccccctgtttcccaggcaggcaccggaaaggcccctgagctgccgtcgggaagtgggcctgagcctctggcccctagcccagtctctccgaccttccctcccagctcgcccagtgactggcctcaggaaaggagtccagggggccactcagatggcgccagtcctcggagccctgtgcccaccacacttcctggcctccgccacgccccctggcaaggccctcgaggcccccccgacagcccagatgggtctcccctcactcctgtgccttcccagatgccctggcttgtggccagcccagagccgcctcagagctcacctacacctgctttccccctggctgcctcctatgacaccaatggccttagccagcccccacttcctgagaaacgccacctgcccgggccggggcaacagccaggaccctggggcccagagcaggcatcatcgccagccagaggcatcagtcaccatgtcaccttcgcacctctgctctcagataatgtcccccaaaccccagagcctcctacacaagagagccaaagcaatgtcaagtttgtccaggatacatccaagttctggtacaagccacacctgtcccgtgaccaagccattgccctgctgaaggacaaggaccctggggccttcctgatcagggacagtcattcattccaaggagcttatgggctggccctcaaggtggccacaccgccacccagtgcccagccctggaaaggggaccccgtggaacagctggtccgccatttcctcatcgagactgggcccaaaggggtgaagatcaagggctgccccagtgagccctactttggcagcctgtccgccttggtctcccagcactccatctcccccatctccctgccctgctgcctgcgcattcccagcaaagatcctctggaagagaccccagaggctccagtgcccaccaacatgagcacagcggcagacctcctgcgtcagggtgctgcctgcagcgtgctctacttgacctcagtggagacagagtcactgacgggcccccaagctgtggcccgggccagctctgcagctctgagctgtagcccccgcccgacaccagctgttgtccacttcaaggtgtcagcccagggcattacactgacggacaaccaaaggaagctcttctttcgccgccattatccagtgaacagcatcaccttctccagcactgaccctcaagaccggagatggaccaacccagacgggaccacctccaagatctttggtttcgtggccaagaagccgggaagcccctgggagaatgtgtgtcacctctttgcagagcttgacccagatcagcctgctggcgccattgtcaccttcatcaccaaagttctactgggccagagaaaatgaaggaaggccacaagctcagagcccacatcaacactgcccccctcccagcaccccacagccctcacatcccctggcctggacccaggagacccaggagaaagcaccctcccttaggaatgaggagtgggcatcaggcctgggacactgctctccttccccgcccccagcctgctaagttaagtggacaggcccacaagatgaccttgcatgtgagcagatggcagagatgggtgtgtgaggggtgaggaggcatcagcagttgagccccgaaggagatcaggcagccccacctgcaggagaacgtcagccctccaggggatcagcccctgccagttccacccagctgcaggtgccagcacggcagggatgggagaggggtggggagcgagtcactgcctcctctgagcagagattcagagtaggatcacatgaataggggaaaaaagagagtctatttttgtctaataataaagaatttctataaacttt

SEQ ID NO: 190119 - DNA, 4737 bp, Homo sapiens
  Payload ID: 17540
  Gene Symbol: TNS2
  Gene Name: tensin 2
  Uniprot ID: Q63HR2
  ENST ID: ENST00000379902
  CDS Start-End: 393-4250
caactctctccccctctcagccacttcctgtctccagtatgtccctggcgcggcccggctggccgtctgcgcaccctctctcccctcggctctttcctaggaaagctgagcctcatagcttccgggagaaggttttccggaagaaacctccagtctgtgcagtatgtaaggtgaccatcgatgggacaggcgtttcgtgcagagtctgcaaggtggcgacgcacagaaaatgtgaagcaaaggtgacttcagcctgtcaggccttgcctcccgtggagttgcggcgaaacacggccccagtcaggcgcatagagcacctgggatccaccaaatctctgaaccactcaaagcagcgcagcactctgcccaggagcttcagcctggacccgctcatggagcggcgctgggacttagacctcacctacgtgacggagcgcatcttggccgccgccttccccgcgcggcccgatgaacagcggcaccggggccacctgcgcgagctggcccatgtgctgcaatccaagcaccgggacaagtacctgctcttcaacctttcagagaaaaggcatgacctgacccgcttaaaccccaaggttcaagacttcggctggcctgagctgcatgctccacccctggacaagctgtgctccatctgcaaagccatggagacatggctcagtgctgacccacagcacgtggtcgtactatactgcaagggaaacaagggcaagcttggggtcatcgtttctgcctacatgcactacagcaagatctctgcaggggcggaccaggcactggccactcttaccatgcggaaattctgcgaggacaaggtggccacagaactgcagccctcccagcgtcgatatatcagctacttcagtgggctgctatctggctccatcagaatgaacagcagccctctcttcctgcactatgtgctcatccccatgctgccagcctttgaacctggcacaggcttccagcccttccttaaaatctaccagtccatgcagcttgtctacacatctggagtctatcacattgcaggccctggtccccagcagctttgcatcagcctggagccagccctcctcctcaaaggcgatgtcatggtaacatgttatcacaagggtggccggggcacagaccggaccctcgtgttccgagtccagttccacacctgcaccatccacggaccacagctcactttccccaaggaccagcttgacgaggcctggactgatgagaggttccccttccaagcctccgtggagtttgtcttctcctccagccccgagaagatcaaaggcagcactccacggaacgacccctcggtctctgtcgactacaacaccactgagccagccgtgcgctgggactcctatgagaacttcaaccagcaccacgaggacagtgtggatggctccttgacccacacccggggtcccctggatggcagtccttatgcccaggtgcagcggcctccccggcagacccccccggcaccctctccagagcctccaccaccccccatgctctctgtcagcagcgactcaggccattcctccacgctgaccacagagccggctgctgagtcccctggccggccgccccctacagctgctgaacggcaggagctggatcgcctcctaggaggctgcggagtggccagtgggggccggggagctgggcgcgagacggccatcctagatgacgaagagcagcccactgtgggcggaggcccccacctcggagtgtatccaggccataggcctggcctcagccgccactgctcctgccgccagggctaccgggagccctgcggggttcccaatgggggctactaccggccagagggaaccctggagaggaggcgactggcctacgggggctatgagggatccccccagggctacgccgaggcctcgatggagaagaggcgcctctgccgatcgctgtcagaggggctatacccctacccacctgagatggggaaaccagccactggggactttggctaccgcgccccaggctaccgggaggtggtcatcctggaggaccctgggctgcctgccctatacccatgcccagcctgcgaggagaagctggcgctgcctacagcagccttgtatggactgcggctggagagggaggctggagaagggtgggcaagtgaggctggcaagcctctcctgcacccagtgcggcctgggcacccgctgcctctgctcttgcctgcctgtgggcatcaccatgccccgatgcctgactacagctgcctgaagccacccaaggcaggcgaggaagggcacgagggctgctcctacaccatgtgccccgaaggcaggtatgggcatccagggtaccctgccctggtgacatacagctatggaggagcagttcccagttactgcccagcatatggccgtgtgcctcatagctgtggctctccaggagagggcagagggtatcccagccctggtgcccactccccacgggctggctccatttccccgggcagcccgccctatccacaatctaggaagctgagctacgagatccctacggaggagggaggggacaggtacccattgcctgggcacctggcctcagcaggacctttggcatctgcagagtcgctggagccggtgtcctggagggagggccccagtgggcacagcacactgcctcggtctccccgagatgccccatgcagtgcttcgtcagagttgtctggtccctccacgcccctgcacaccagcagtccagtccagggcaaggaaagcacccggcgacaggacaccaggtcccccacctcagcgcccactcagagactgagtcctggcgaggccttgccccctgtttcccaggcaggcaccggaaaggcccctgagctgccgtcgggaagtgggcctgagcctctggcccctagcccagtctctccgaccttccctcccagctcgcccagtgactggcctcaggaaaggagtccagggggccactcagatggcgccagtcctcggagccctgtgcccaccacacttcctggcctccgccacgccccctggcaaggccctcgaggcccccccgacagcccagatgggtctcccctcactcctgtgccttcccagatgccctggcttgtggccagcccagagccgcctcagagctcacctacacctgctttccccctggctgcctcctatgacaccaatggccttagccagcccccacttcctgagaaacgccacctgcccgggccggggcaacagccaggaccctggggcccagagcaggcatcatcgccagccagaggcatcagtcaccatgtcaccttcgcacctctgctctcagataatgtcccccaaaccccagagcctcctacacaagagagccaaagcaatgtcaagtttgtccaggatacatccaagttctggtacaagccacacctgtcccgtgaccaagccattgccctgctgaaggacaaggaccctggggccttcctgatcagggacagtcattcattccaaggagcttatgggctggccctcaaggtggccacaccgccacccagtgcccagccctggaaaggggaccccgtggaacagctggtccgccatttcctcatcgagactgggcccaaaggggtgaagatcaagggctgccccagtgagccctactttggcagcctgtccgccttggtctcccagcactccatctcccccatctccctgccctgctgcctgcgcattcccagcaaagatcctctggaagagaccccagaggctccagtgcccaccaacatgagcacagcggcagacctcctgcgtcagggtgctgcctgcagcgtgctctacttgacctcagtggagacagagtcactgacgggcccccaagctgtggcccgggccagctctgcagctctgagctgtagcccccgcccgacaccagctgttgtccacttcaaggtgtcagcccagggcattacactgacggacaaccaaaggaagctcttctttcgccgccattatccagtgaacagcatcaccttctccagcactgaccctcaagaccggagatggaccaacccagacgggaccacctccaagatctttggtttcgtggccaagaagccgggaagcccctgggagaatgtgtgtcacctctttgcagagcttgacccagatcagcctgctggcgccattgtcaccttcatcaccaaagttctactgggccagagaaaatgaaggaaggccacaagctcagagcccacatcaacactgcccccctcccagcaccccacagccctcacatcccctggcctggacccaggagacccaggagaaagcaccctcccttaggaatgaggagtgggcatcaggcctgggacactgctctccttccccgcccccagcctgctaagttaagtggacaggcccacaagatgaccttgcatgtgagcagatggcagagatgggtgtgtgaggggtgaggaggcatcagcagttgagccccgaaggagatcaggcagccccacctgcaggagaacgtcagccctccaggggatcagcccctgccagttccacccagctgcaggtgccagcacggcagggatgggagaggggtggggagcgagtcactgcctcctctgagcagagattcagagtaggatcacatgaataggggaaaaaagagagtctatttttgtctaataataaagaatttctataaact

SEQ ID NO: 190120 - DNA, 4714 bp, Homo sapiens
  Payload ID: 17540
  Gene Symbol: TNS2
  Gene Name: tensin 2
  Uniprot ID: Q63HR2
  ENST ID: ENST00000552570
  CDS Start-End: 1-4224
atgaagtccagcggccctgtggagaggctgctcagagccctggggaggagggacagcagccgggccgcaagcaggcctaggaaagctgagcctcatagcttccgggagaaggttttccggaagaaacctccagtctgtgcagtatgtaaggtgaccatcgatgggacaggcgtttcgtgcagagtctgcaaggtggcgacgcacagaaaatgtgaagcaaaggtgacttcagcctgtcaggccttgcctcccgtggagttgcggcgaaacacggccccagtcaggcgcatagagcacctgggatccaccaaatctctgaaccactcaaagcagcgcagcactctgcccaggagcttcagcctggacccgctcatggagcggcgctgggacttagacctcacctacgtgacggagcgcatcttggccgccgccttccccgcgcggcccgatgaacagcggcaccggggccacctgcgcgagctggcccatgtgctgcaatccaagcaccgggacaagtacctgctcttcaacctttcagagaaaaggcatgacctgacccgcttaaaccccaaggttcaagacttcggctggcctgagctgcatgctccacccctggacaagctgtgctccatctgcaaagccatggagacatggctcagtgctgacccacagcacgtggtcgtactatactgcaagggaaacaagggcaagcttggggtcatcgtttctgcctacatgcactacagcaagatctctgcaggggcggaccaggcactggccactcttaccatgcggaaattctgcgaggacaaggtggccacagaactgcagccctcccagcgtcgatatatcagctacttcagtgggctgctatctggctccatcagaatgaacagcagccctctcttcctgcactatgtgctcatccccatgctgccagcctttgaacctggcacaggcttccagcccttccttaaaatctaccagtccatgcagcttgtctacacatctggagtctatcacattgcaggccctggtccccagcagctttgcatcagcctggagccagccctcctcctcaaaggcgatgtcatggtaacatgttatcacaagggtggccggggcacagaccggaccctcgtgttccgagtccagttccacacctgcaccatccacggaccacagctcactttccccaaggaccagcttgacgaggcctggactgatgagaggttccccttccaagcctccgtggagtttgtcttctcctccagccccgagaagatcaaaggcagcactccacggaacgacccctcggtctctgtcgactacaacaccactgagccagccgtgcgctgggactcctatgagaacttcaaccagcaccacgaggacagtgtggatggctccttgacccacacccggggtcccctggatggcagtccttatgcccaggtgcagcggcctccccggcagacccccccggcaccctctccagagcctccaccaccccccatgctctctgtcagcagcgactcaggccattcctccacgctgaccacagagccggctgctgagtcccctggccggccgccccctacagctgctgaacggcaggagctggatcgcctcctaggaggctgcggagtggccagtgggggccggggagctgggcgcgagacggccatcctagatgacgaagagcagcccactgtgggcggaggcccccacctcggagtgtatccaggccataggcctggcctcagccgccactgctcctgccgccagggctaccgggagccctgcggggttcccaatgggggctactaccggccagagggaaccctggagaggaggcgactggcctacgggggctatgagggatccccccagggctacgccgaggcctcgatggagaagaggcgcctctgccgatcgctgtcagaggggctatacccctacccacctgagatggggaaaccagccactggggactttggctaccgcgccccaggctaccgggaggtggtcatcctggaggaccctgggctgcctgccctatacccatgcccagcctgcgaggagaagctggcgctgcctacagcagccttgtatggactgcggctggagagggaggctggagaagggtgggcaagtgaggctggcaagcctctcctgcacccagtgcggcctgggcacccgctgcctctgctcttgcctgcctgtgggcatcaccatgccccgatgcctgactacagctgcctgaagccacccaaggcaggcgaggaagggcacgagggctgctcctacaccatgtgccccgaaggcaggtatgggcatccagggtaccctgccctggtgacatacagctatggaggagcagttcccagttactgcccagcatatggccgtgtgcctcatagctgtggctctccaggagagggcagagggtatcccagccctggtgcccactccccacgggctggctccatttccccgggcagcccgccctatccacaatctaggaagctgagctacgagatccctacggaggagggaggggacaggtacccattgcctgggcacctggcctcagcaggacctttggcatctgcagagtcgctggagccggtgtcctggagggagggccccagtgggcacagcacactgcctcggtctccccgagatgccccatgcagtgcttcgtcagagttgtctggtccctccacgcccctgcacaccagcagtccagtccagggcaaggaaagcacccggcgacaggacaccaggtcccccacctcagcgcccactcagagactgagtcctggcgaggccttgccccctgtttcccaggcaggcaccggaaaggcccctgagctgccgtcgggaagtgggcctgagcctctggcccctagcccagtctctccgaccttccctcccagctcgcccagtgactggcctcaggaaaggagtccagggggccactcagatggcgccagtcctcggagccctgtgcccaccacacttcctggcctccgccacgccccctggcaaggccctcgaggcccccccgacagcccagatgggtctcccctcactcctgtgccttcccagatgccctggcttgtggccagcccagagccgcctcagagctcacctacacctgctttccccctggctgcctcctatgacaccaatggccttagccagcccccacttcctgagaaacgccacctgcccgggccggggcaacagccaggaccctggggcccagagcaggcatcatcgccagccagaggcatcagtcaccatgtcaccttcgcacctctgctctcagataatgtcccccaaaccccagagcctcctacacaagagagccaaagcaatgtcaagtttgtccaggatacatccaagttctggtacaagccacacctgtcccgtgaccaagccattgccctgctgaaggacaaggaccctggggccttcctgatcagggacagtcattcattccaaggagcttatgggctggccctcaaggtggccacaccgccacccagtgcccagccctggaaaggggaccccgtggaacagctggtccgccatttcctcatcgagactgggcccaaaggggtgaagatcaagggctgccccagtgagccctactttggcagcctgtccgccttggtctcccagcactccatctcccccatctccctgccctgctgcctgcgcattcccagcaaagatcctctggaagagaccccagaggctccagtgcccaccaacatgagcacagcggcagacctcctgcgtcaggcctgcagcgtgctctacttgacctcagtggagacagagtcactgacgggcccccaagctgtggcccgggccagctctgcagctctgagctgtagcccccgcccgacaccagctgttgtccacttcaaggtgtcagcccagggcattacactgacggacaaccaaaggaagctcttctttcgccgccattatccagtgaacagcatcaccttctccagcactgaccctcaagaccggagatggaccaacccagacgggaccacctccaagatctttggtttcgtggccaagaagccgggaagcccctgggagaatgtgtgtcacctctttgcagagcttgacccagatcagcctgctggcgccattgtcaccttcatcaccaaagttctactgggccagagaaaatgaaggaaggccacaagctcagagcccacatcaacactgcccccctcccagcaccccacagccctcacatcccctggcctggacccaggagacccaggagaaagcaccctcccttaggaatgaggagtgggcatcaggcctgggacactgctctccttccccgcccccagcctgctaagttaagtggacaggcccacaagatgaccttgcatgtgagcagatggcagagatgggtgtgtgaggggtgaggaggcatcagcagttgagccccgaaggagatcaggcagccccacctgcaggagaacgtcagccctccaggggatcagcccctgccagttccacccagctgcaggtgccagcacggcagggatgggagaggggtggggagcgagtcactgcctcctctgagcagagattcagagtaggatcacatgaataggggaaaaaagagagtctatttttgtctaataataaagaatttctataaacttta

SEQ ID NO: 190121 - DNA, 678 bp, Homo sapiens
  Payload ID: 17540
  Gene Symbol: TNS2
  Gene Name: tensin 2
  ENST ID: ENST00000546772
  CDS Start-End: 1-103
ggaaagcacccggcgacaggacaccaggtcccccacctcagcgcccactcagagactgagtcctggcgaggccttgccccctgtttcccagctcgcccagtgactggcctcaggaaaggagtccagggggccactcagatggcgccagtcctcggagccctgtgcccaccacacttcctggcctccgccacgccccctggcaaggccctcgaggcccccccgacagcccagatgggtctcccctcactcctgtgccttcccagatgccctggcttgtggccagcccagagccgcctcagagctcacctacacctgctttccccctggctgcctcctatgacaccaatggccttagccagcccccacttcctgagaaacgccacctgcccgggccggggcaacagccaggaccctggggcccagagcaggcatcatcgccagccagaggcatcagtcaccatgtcaccttcgcacctctgctctcagataatgtcccccaaaccccagagcctcctacacaagagagccaaagcaatgtcaagtttgtccaggatacatccaagttctggtacaagccacacctgtcccgtgaccaagccattgccctgctgaaggacaaggaccctggggccttcctgatcagggacagtcattcattccaaggagcttatgggctgg

SEQ ID NO: 190122 - DNA, 4525 bp, Homo sapiens
  Payload ID: 17540
  Gene Symbol: TNS2
  Gene Name: tensin 2
  ENST ID: ENST00000549700
  CDS Start-End: 1-4035
atgaagtccagcggccctgtggagaggctgctcagagccctggggaggagggacagcagccgggccgcaagcaggcctaggaaagctgagcctcatagcttccgggagaaggttttccggaagaaacctccagtctgtgcagtatgtaaggtgaccatcgatgggacaggcgtttcgtgcagagtctgcaaggtggcgacgcacagaaaatgtgaagcaaaggtgacttcagcctgtcaggccttgcctcccgtggagttgcggcgaaacacggccccagtcaggcgcatagagcacctgggatccaccaaatctctgaaccactcaaagcagcgcagcactctgcccaggagcttcagcctggacccgctcatggagcggcgctgggacttagacctcacctacgtgacggagcgcatcttggccgccgccttccccgcgcggcccgatgaacagcggcaccggggccacctgcgcgagctggcccatgtgctgcaatccaagcaccgggacaagtacctgctcttcaacctttcagagaaaaggcatgacctgacccgcttaaaccccaaggttcaagacttcggctggcctgagctgcatgctccacccctggacaagctgtgctccatctgcaaagccatggagacatggctcagtgctgacccacagcacgtggtcgtactatactgcaagggaaacaagggcaagcttggggtcatcgtttctgcctacatgcactacagcaagatctctgcaggggcggaccaggcactggccactcttaccatgcggaaattctgcgaggacaaggtggccacagaactgcagccctcccagcgtcgatatatcagctacttcagtgggctgctatctggctccatcagaatgaacagcagccctctcttcctgcactatgtgctcatccccatgctgccagcctttgaacctggcacaggcttccagcccttccttaaaatctaccagtccatgcagcttgtctacacatctggagtctatcacattgcaggccctggtccccagcagctttgcatcagcctggagccagccctcctcctcaaaggcgatgtcatggtaacatgttatcacaagggtggccggggcacagaccggaccctcgtgttccgagtccagttccacacctgcaccatccacggaccacagctcactttccccaaggaccagcttgacgaggcctggactgatgagaggttccccttccaagcctccgtggagtttgtcttctcctccagccccgagaagatcaaaggcagcactccacggaacgacccctcggtctctgtcgactacaacaccactgagccagccgtgcgctgggactcctatgagaacttcaaccagcaccacgaggacagtgtggatggctccttgacccacacccggggtcccctggatggcagtccttatgcccaggtgcagcggcctccccggcagacccccccggcaccctctccagagcctccaccaccccccatgctctctgtcagcagcgactcaggccattcctccacgctgaccacagagccggctgctgagtcccctggccggccgccccctacagctgctgaacggcaggagctggatcgcctcctaggaggctgcggagtggccagtgggggccggggagctgggcgcgagacggccatcctagatgacgaagagcagcccactgtgggcggaggcccccacctcggagtgtatccaggccataggcctggcctcagccgccactgctcctgccgccagggctaccgggagccctgcggggttcccaatgggggctactaccggccagagggaaccctggagaggaggcgactggcctacgggggctatgagggatccccccagggctacgccgaggcctcgatggagaagaggcgcctctgccgatcgctgtcagaggggctatacccctacccacctgagatggggaaaccagccactggggactttggctaccgcgccccaggctaccgggaggtggtcatcctggaggaccctgggctgcctgccctatacccatgcccagcctgcgaggagaagctggcgctgcctacagcagccttgtatggactgcggctggagagggaggctggagaagggtgggcaagtgaggctggcaagcctctcctgcacccagtgcggcctgggcacccgctgcctctgctcttgcctgcctgtgggcatcaccatgccccgatgcctgactacagctgcctgaagccacccaaggcaggcgaggaagggcacgagggctgctcctacaccatgtgccccgaaggcaggaagctgagctacgagatccctacggaggagggaggggacaggtacccattgcctgggcacctggcctcagcaggacctttggcatctgcagagtcgctggagccggtgtcctggagggagggccccagtgggcacagcacactgcctcggtctccccgagatgccccatgcagtgcttcgtcagagttgtctggtccctccacgcccctgcacaccagcagtccagtccagggcaaggaaagcacccggcgacaggacaccaggtcccccacctcagcgcccactcagagactgagtcctggcgaggccttgccccctgtttcccaggcaggcaccggaaaggcccctgagctgccgtcgggaagtgggcctgagcctctggcccctagcccagtctctccgaccttccctcccagctcgcccagtgactggcctcaggaaaggagtccagggggccactcagatggcgccagtcctcggagccctgtgcccaccacacttcctggcctccgccacgccccctggcaaggccctcgaggcccccccgacagcccagatgggtctcccctcactcctgtgccttcccagatgccctggcttgtggccagcccagagccgcctcagagctcacctacacctgctttccccctggctgcctcctatgacaccaatggccttagccagcccccacttcctgagaaacgccacctgcccgggccggggcaacagccaggaccctggggcccagagcaggcatcatcgccagccagaggcatcagtcaccatgtcaccttcgcacctctgctctcagataatgtcccccaaaccccagagcctcctacacaagagagccaaagcaatgtcaagtttgtccaggatacatccaagttctggtacaagccacacctgtcccgtgaccaagccattgccctgctgaaggacaaggaccctggggccttcctgatcagggacagtcattcattccaaggagcttatgggctggccctcaaggtggccacaccgccacccagtgcccagccctggaaaggggaccccgtggaacagctggtccgccatttcctcatcgagactgggcccaaaggggtgaagatcaagggctgccccagtgagccctactttggcagcctgtccgccttggtctcccagcactccatctcccccatctccctgccctgctgcctgcgcattcccagcaaagatcctctggaagagaccccagaggctccagtgcccaccaacatgagcacagcggcagacctcctgcgtcagggtgctgcctgcagcgtgctctacttgacctcagtggagacagagtcactgacgggcccccaagctgtggcccgggccagctctgcagctctgagctgtagcccccgcccgacaccagctgttgtccacttcaaggtgtcagcccagggcattacactgacggacaaccaaaggaagctcttctttcgccgccattatccagtgaacagcatcaccttctccagcactgaccctcaagaccggagatggaccaacccagacgggaccacctccaagatctttggtttcgtggccaagaagccgggaagcccctgggagaatgtgtgtcacctctttgcagagcttgacccagatcagcctgctggcgccattgtcaccttcatcaccaaagttctactgggccagagaaaatgaaggaaggccacaagctcagagcccacatcaacactgcccccctcccagcaccccacagccctcacatcccctggcctggacccaggagacccaggagaaagcaccctcccttaggaatgaggagtgggcatcaggcctgggacactgctctccttccccgcccccagcctgctaagttaagtggacaggcccacaagatgaccttgcatgtgagcagatggcagagatgggtgtgtgaggggtgaggaggcatcagcagttgagccccgaaggagatcaggcagccccacctgcaggagaacgtcagccctccaggggatcagcccctgccagttccacccagctgcaggtgccagcacggcagggatgggagaggggtggggagcgagtcactgcctcctctgagcagagattcagagtaggatcacatgaataggggaaaaaagagagtctatttttgtctaataataaagaatttctataaacttta

SEQ ID NO: 190123 - DNA, 4429 bp, Homo sapiens
  Payload ID: 17540
  Gene Symbol: TNS2
  Gene Name: tensin 2
  Uniprot ID: Q63HR2
  ENST ID: ENST00000546602
  CDS Start-End: 1-3939
atgaagtccagcggccctgtggagaggctgctcagagccctggggaggagggacagcagccgggccgcaagcaggcctaggaaagctgagcctcatagcttccgggagaaggttttccggaagaaacctccagtctgtgcagtatgtaaggtgaccatcgatgggacaggcgtttcgtgcagagtctgcaaggtggcgacgcacagaaaatgtgaagcaaaggtgacttcagcctgtcaggccttgcctcccgtggagttgcggcgaaacacggccccagtcaggcgcatagagcacctgggatccaccaaatctctgaaccactcaaagcagcgcagcactctgcccaggagcttcagcctggacccgctcatggagcggcgctgggacttagacctcacctacgtgacggagcgcatcttggccgccgccttccccgcgcggcccgatgaacagcggcaccggggccacctgcgcgagctggcccatgtgctgcaatccaagcaccgggacaagtacctgctcttcaacctttcagagaaaaggcatgacctgacccgcttaaaccccaaggttcaagacttcggctggcctgagctgcatgctccacccctggacaagctgtgctccatctgcaaagccatggagacatggctcagtgctgacccacagcacgtggtcgtactatactgcaagggaaacaagggcaagcttggggtcatcgtttctgcctacatgcactacagcaagatctctgcaggggcggaccaggcactggccactcttaccatgcggaaattctgcgaggacaaggtggccacagaactgcagccctcccagcgtcgatatatcagctacttcagtgggctgctatctggctccatcagaatgaacagcagccctctcttcctgcactatgtgctcatccccatgctgccagcctttgaacctggcacaggcttccagcccttccttaaaatctaccagtccatgcagcttgtctacacatctggagtctatcacattgcaggccctggtccccagcagctttgcatcagcctggagccagccctcctcctcaaaggcgatgtcatggtaacatgttatcacaagggtggccggggcacagaccggaccctcgtgttccgagtccagttccacacctgcaccatccacggaccacagctcactttccccaaggaccagcttgacgaggcctggactgatgagaggttccccttccaagcctccgtggagtttgtcttctcctccagccccgagaagatcaaaggcagcactccacggaacgacccctcggtctctgtcgactacaacaccactgagccagccgtgcgctgggactcctatgagaacttcaaccagcaccacgaggacagtgtggatggctccttgacccacacccggggtcccctggatggcagtccttatgcccaggtgcagcggcctccccggcagacccccccggcaccctctccagagcctccaccaccccccatgctctctgtcagcagcgactcaggccattcctccacgctgaccacagagccggctgctgagtcccctggccggccgccccctacagctgctgaacggcaggagctggatcgcctcctaggaggctgcggagtggccagtgggggccggggagctgggcgcgagacggccatcctagatgacgaagagcagcccactgtgggcggaggcccccacctcggagtgtatccaggccataggcctggcctcagccgccactgctcctgccgccagggctaccgggagccctgcggggttcccaatgggggctactaccggccagagggaaccctggagaggaggcgactggcctacgggggctatgagggatccccccagggctacgccgaggcctcgatggagaagaggcgcctctgccgatcgctgtcagaggggctatacccctacccacctgagatggggaaaccagccactggggactttggctaccgcgccccaggctaccgggaggtggtcatcctggaggaccctgggctgcctgccctatacccatgcccagcctgcgaggagaagctggcgctgcctacagcagccttgtatggactgcggctggagagggaggctggagaagggtgggcaagtgaggctggcaagcctctcctgcacccagtgcggcctgggcacccgctgcctctgctcttgcctgcctgtgggcatcaccatgccccgatgcctgactacagctgcctgaagccacccaaggcaggcgaggaagggcacgagggctgctcctacaccatgtgccccgaagagtcgctggagccggtgtcctggagggagggccccagtgggcacagcacactgcctcggtctccccgagatgccccatgcagtgcttcgtcagagttgtctggtccctccacgcccctgcacaccagcagtccagtccagggcaaggaaagcacccggcgacaggacaccaggtcccccacctcagcgcccactcagagactgagtcctggcgaggccttgccccctgtttcccaggcaggcaccggaaaggcccctgagctgccgtcgggaagtgggcctgagcctctggcccctagcccagtctctccgaccttccctcccagctcgcccagtgactggcctcaggaaaggagtccagggggccactcagatggcgccagtcctcggagccctgtgcccaccacacttcctggcctccgccacgccccctggcaaggccctcgaggcccccccgacagcccagatgggtctcccctcactcctgtgccttcccagatgccctggcttgtggccagcccagagccgcctcagagctcacctacacctgctttccccctggctgcctcctatgacaccaatggccttagccagcccccacttcctgagaaacgccacctgcccgggccggggcaacagccaggaccctggggcccagagcaggcatcatcgccagccagaggcatcagtcaccatgtcaccttcgcacctctgctctcagataatgtcccccaaaccccagagcctcctacacaagagagccaaagcaatgtcaagtttgtccaggatacatccaagttctggtacaagccacacctgtcccgtgaccaagccattgccctgctgaaggacaaggaccctggggccttcctgatcagggacagtcattcattccaaggagcttatgggctggccctcaaggtggccacaccgccacccagtgcccagccctggaaaggggaccccgtggaacagctggtccgccatttcctcatcgagactgggcccaaaggggtgaagatcaagggctgccccagtgagccctactttggcagcctgtccgccttggtctcccagcactccatctcccccatctccctgccctgctgcctgcgcattcccagcaaagatcctctggaagagaccccagaggctccagtgcccaccaacatgagcacagcggcagacctcctgcgtcagggtgctgcctgcagcgtgctctacttgacctcagtggagacagagtcactgacgggcccccaagctgtggcccgggccagctctgcagctctgagctgtagcccccgcccgacaccagctgttgtccacttcaaggtgtcagcccagggcattacactgacggacaaccaaaggaagctcttctttcgccgccattatccagtgaacagcatcaccttctccagcactgaccctcaagaccggagatggaccaacccagacgggaccacctccaagatctttggtttcgtggccaagaagccgggaagcccctgggagaatgtgtgtcacctctttgcagagcttgacccagatcagcctgctggcgccattgtcaccttcatcaccaaagttctactgggccagagaaaatgaaggaaggccacaagctcagagcccacatcaacactgcccccctcccagcaccccacagccctcacatcccctggcctggacccaggagacccaggagaaagcaccctcccttaggaatgaggagtgggcatcaggcctgggacactgctctccttccccgcccccagcctgctaagttaagtggacaggcccacaagatgaccttgcatgtgagcagatggcagagatgggtgtgtgaggggtgaggaggcatcagcagttgagccccgaaggagatcaggcagccccacctgcaggagaacgtcagccctccaggggatcagcccctgccagttccacccagctgcaggtgccagcacggcagggatgggagaggggtggggagcgagtcactgcctcctctgagcagagattcagagtaggatcacatgaataggggaaaaaagagagtctatttttgtctaataataaagaatttctataaacttta

SEQ ID NO: 190124 - DNA, 590 bp, Homo sapiens
  Payload ID: 17540
  Gene Symbol: TNS2
  Gene Name: tensin 2
  ENST ID: ENST00000602335
  CDS Start-End: 1-590
cagccctcctcctcaaaggcgatgtcatggtaacatgttatcacaagggtggccggggcacagaccggaccctcgtgttccgagtccagttccacacctgcaccatccacggaccacagctcactttccccaaggaccagcttgacgaggcctggactgatgagaggttccccttccaagcctccgtggagtttgtcttctcctccagccccgagaagatcaaaggcagcactccacggaacgacccctcggtctctgtcgactacaacaccactgagccagccgtgcgctgggactcctatgagaacttcaaccagcaccacgaggacagtgtggatggtgcgcaggcagcctgcagggtgggaggctccttgacccacacccggggtcccctggatggcagtccttatgcccaggtgcagcggcctccccggcagacccccccggcaccctctccagagcctccaccaccccccatgctctctgtcagcagcgactcaggccattcctccacgctgaccacagagccggctgctgagtcccctggccggccgccccctacagctgctgaacggcaggagctggatcgc

SEQ ID NO: 190125 - DNA, 7618 bp, Homo sapiens
  Payload ID: 17541
  Gene Symbol: TNS3
  Gene Name: tensin 3
  Uniprot ID: Q68CZ2
  ENST ID: ENST00000311160
  CDS Start-End: 359-4696
agccagccaggaggacgggcccgcccgcgcgctactcggagcccagcctcgttgcggccatcgccctgccggaccgcgcctcaggctcccccagccggaagaattaacctcgagtctgcacgcttttaagaacaaggcctttaaaaaatccaaagtgtgtggagtttgcaaacaaattattgacggtcaaggtatttcatgccgagcctgcaagtattcctgccacaagaaatgtgaagccaaggtggtgattccctgcggtgtgcaagtccgactggaacaggctccagggagttccacgctgtccagttctctctgccgtgataaacctctgcggcccgtcatcctgagtcccaccatggaggagggccatgggctggacctcacttacatcacggagcgcatcatcgctgtgtccttccctgccggctgctctgaggagtcctacctgcacaacctacaggaggtcacgcgcatgctcaagtccaagcacggggacaactacctggtattaaacctttcagaaaagagatatgaccttacgaagcttaacccaaagatcatggatgtgggctggccagagctccacgcaccgcccctggataagatgtgtaccatatgcaaggcgcaggagtcctggctgaacagcaacctccagcatgtggtcgtcattcactgcaggggcgggaaaggacgcataggagtggtcatatcatcctacatgcatttcaccaacgtctcagccagcgccgaccaggcccttgacaggtttgcaatgaagaagttttatgatgacaaagtttcagctttaatgcagccttcccaaaaacggtatgttcagttcctcagtgggctcctgtccggatcggtgaaaatgaatgcctctcccctgttcctgcattttgtcatcctccacggcacccccaacttcgacacaggtggagtgtgccggccctttctgaagctctaccaagccatgcagcctgtgtacacctccgggatctacaacgttggcccagaaaaccccagcaggatctgcatcgtcatcgagccggcccagcttctgaagggagatgtcatggtgaaatgctaccacaagaaataccgctcggccacccgtgacgtcattttccgcctgcagtttcacactggggctgtgcagggctacgggctggtgtttgggaaggaggatctggacaatgccagcaaagatgaccgttttcctgactatgggaaggttgaattagtcttctctgccacgcctgagaagattcaagggtccgaacacttgtacaacgaccacggtgtgattgtggactacaacacaacagacccactgatacgctgggactcgtacgagaacctcagtgcagatggagaagtgctacacacgcagggccctgtcgatggcagcctttacgcgaaggtgaggaagaaaagctcctcggatcctggcatcccaggtggcccccaggcaatcccggccaccaacagcccagaccacagtgaccacaccttgtctgtcagcagtgactccggccactctacagcctctgccaggacggataagacggaagagcgcctggccccaggaaccaggaggggcctgagtgcccaggagaaggcagagttggaccagctgctcagtggctttggcctggaagatcctggaagctccctcaaggaaatgactgatgctcgaagcaagtacagtgggacccgccacgtggtgccagcccaggttcacgtgaatggagacgctgctctgaaggatcgggagacagacattctggatgacgagatgccccaccacgacctgcacagtgtggacagccttgggaccctgtcctcctcggaagggcctcagtcggcccacctgggtcccttcacctgccacaagagcagccagaactcactcctatctgacggttttggcagcaacgttggtgaagatccgcagggcaccctcgttccggacctgggccttggcatggacggcccctatgagcgggagcggacttttgggagtcgagagcccaagcagccccagcccctgctgagaaagccctcagtgtccgcccagatgcaggcctatgggcagagcagctactccacacagacctgggtgcgccagcagcagatggttgtagctcaccagtatagcttcgccccagatggggaggcccggctggtgagccgctgccctgcagacaatcctggcctcgtccaggcccagcccagagtgccactcacccccacccgagggaccagcagtagggtggctgtccagaggggtgtaggcagtgggccacatccccctgacacacagcagccctctcccagcaaagcgttcaaacccaggtttccaggagaccaggttgtgaatggagccggcccagagctgagcacaggcccctccccaggctcgcccaccctggacatcgaccagtccatcgagcagctcaacaggctgatcctggagctggatcccaccttcgagcccatccctacccacatgaacgccctcggtagccaggccaatggctctgtgtctccagacagcgtgggaggtgggctccgggcaagcagcaggctgcctgacacaggagagggccccagcagggccaccgggcggcaaggctcctctgctgaacagcccctgggcgggagactcaggaagctgagcctggggcagtacgacaacgatgctggggggcagctgcccttctccaaatgtgcatggggaaaggctggtgtggactatgccccaaacctgccgccattcccctcaccagcggacgtcaaagagacgatgacccctggctatccccaggacctcgatattatcgatggcagaattttaagtagcaaggagtccatgtgttcaactccagcatttcctgtgtctccagagacaccgtatgtgaaaacagcgctgcgccatcctccgttcagcccacctgagcccccgctgagcagcccagccagtcagcacaaaggaggacgtgaaccacgaagctgccctgagacgctcactcacgctgtggggatgtcagagagccccatcggacccaaatccacgatgctccgggctgatgcgtcctcgacgccctcctttcagcaggcttttgcttcttcctgcaccatttccagcaacggccctgggcagaggagagagagctcctcttctgcagaacgccagtgggtggagagcagccccaagcccatggtttccctgctggggagcggccggcccaccggaagtcccctcagcgctgagttctccggtaccaggaaggactccccagtgctgtcctgcttcccgccgtcagagctccaggctcctttccacagccatgagctgtccctagcagagccaccggactccctggcgcctcccagcagccaggccttcctgggcttcggcaccgccccagtgggaagtggccttccgcccgaggaggacctgggggccttgctggccaattctcatggagcgtcaccgacccccagcatcccgctgacagcgacaggggctgccgacaatggcttcctgtcccacaactttctcacggtggcgcctggacacagcagccaccacagtccaggcctgcagggccagggtgtgaccctgcccgggcagccacccctccctgagaagaagcgggcctcggagggggatcgttctttgggctcagtctctccctcctccagtggcttctccagcccgcacagcgggagcaccatcagtatccccttcccaaatgtccttcccgacttttccaaggcttcagaagcggcctcacctctgccagatagtccaggtgataaacttgtgatcgtgaaatttgttcaagacacttccaagttctggtacaaggcggatatttcaagagaacaagccatcgccatgttgaaggacaaggagccgggctcattcattgttcgagacagccattccttccgaggggcctatggcctggccatgaaggtggccacgcccccaccttcagtcctgcagctgaacaagaaagctggagatttggccaatgaactcgtccggcactttttgatcgagtgtaccccgaagggagtgcggttgaaagggtgctcgaatgaaccatatttcgggagcctgacggccttggtgtgccagcattccatcacgcccttggccttgccgtgcaagctgcttatcccagagagagatccattggaggaaatagcagaaagttctccccagacggcagccaattcagcagctgagctgttgaagcagggggcagcctgcaatgtgtggtacttgaactctgtggagatggagtccctcaccggccaccaggcgatccagaaggccctgagcatcaccctggtccaggagcctccacctgtgtccacagttgtgcacttcaaggtgtcagcccagggcatcaccctgacagacaatcagaggaagctcttcttccggaggcattaccccgtgaacagtgtgattttctgtgccttggacccacaagacaggaagtggatcaaagatggcccttcctcaaaagtctttggatttgtggcccggaagcagggcagtgccacggataatgtgtgccacctgtttgcagagcatgaccctgagcagcctgccagtgccattgtcaacttcgtatcaaaggtcatgattggttccccaaagaaggtctgagaactcccctccctccctggacccaccgatgcctctcgaagccctggagacagccgttgggtgagggtggggcccccactttttaccaaactagtaaacctgacattccaggcccatgaggggaaagaggatcttccagctctgcaaaaacaagaacaaacaacatcaccgtgaattggcctttcctgaaagtgacttatctgacacatctctgtagccacatgctttttgggtagaagaagctgggcatgggtgcaccccaccccctagggtccccatgggaaagggacatgcaaggaaacagcacagaacacgaggtggtccccatgtccctggcacactagcattccgggggatgaggaatccccagcccttgaggcagaggtgccgagtgactgccatgcttcgcccgtccgcatgggcgcttctgtccagctgcacccgaggccgggggtttccctcacctcggtcttcccaagatggagatgctaacgaaactgagaagggggcgtatgtttgacgaaggtttgtgcaagtcaggcccttctggaacacagcagggcctacaacgaggggcctttgcgatgggctgtgaggatgggggtggtgggaagaattggccacgttggagaccccatgccaccccaccatggtgagtgctctgtgcctcctgctcacctgtggtgagctgggcgagctgggcgagctgggcgagctgggctggggagagcctgtgaggaccgagaggagaaatgagaagaaggaacaaaaatattatttctatgtaatttatattttacttatgccaaattatttatgataatttgccattgctatactgtaccagtgtcaaatgctgcagcctgccaagctgtgattttgtgaggcttgtccctatgtaggatgcaccgcaggcccctggccactgaaagagtgtgcagtggactgtgggtctcccatatgcggtgccgcccaaaggtggctttgcctcaagcaacctaccctgatgttttactcattggaatgtttttccccgattgtggatgacttcttttctgatggagagagtccaggagggatggaaaactcctggatttaagctcagcatcccccacatgggcttttcgatcatcttcaggcctgaagctgcacgacctgaagttcgcctgcatttatcagccctctttgtgctgctccttgccaccttggggttcctgctggggaccatgtgtggttgtggcatgtgtgagcagaagggaggatgaggaaaaagagaagaaaccccggtactgacaagctgtttttgagtgccactgtttgccatcatctaagccactgaatcaagtgtatttcaggcttatttcaacattccaatgccctggttttcctgcttgaatctgttcgtggtcaaaggtttgggggaatttgtgaccctggaacatccccagagtgaaagatggagctgggccacatcagaataaggccttggccccatcctctcacagcctaggtgctctgcaggcatgctgactgtcctgattgcgatccagcccgaaattccctcctctgctttcaaaagtcaaatcccccattcttaggccacactggtgtcacaagctcctgtcagggagctggggtttgggaatgtgctttgtgaactctgctttaaagtgaggggccgaggaaaacttagaaacaggcagagttggaagcagccaaatcacagtgggtgttgtgtgtgtgtgcgtgtgtgcatgcgtgcgtgtatgcgtgtgtgaaagcaggtggaccattccactttttagctcctattgatgcaccaaaccaagtgcctcatttctgtgccaaatgtttgccttggtcgttgtggacctccttctctaacttgcggtggcatgactgtcaggaggtgctggcattttcagcagatcctcatgtgttgaccctgatgtctttagcagaggcctctagcatctcggtttttcatccactgcaggaatgtggccacagggagcagaggtttgtactttccccaagaggtcctcatcctgagacggtctctacccatgtttaacccaaagagtgcaggccaggttccttatccttctgatgaaggatgagagagctcatttagaagtcagagcaaactagggtctcagtattgagaaacgcagcctgccagggaatcacagagacatcggggtgcccgcgatggccctcatgaagccatgcctcgacggcattcaggaagccctgcaaacgtgctttttgaactcattggccaggtgtgatttttacacaaggtaaacgtggtcaagggcatcggggaatttgctccaagcagatagctccctctgaggaaccaaaggaagcaagtttccacgatttctgaagagctggtataggaagtttctttcttccttttgtgttacatgtgcattaaacagaacaagctgtgtgtcatcacagattgtactgtgggctcagaaaccgtgagagagcccccaccgtggacaccggctctagggccacaggaaaaggaacgtttccaggcattttgtctccagggctcccgctggacaggcacgtactgccctggggagtaaatgcggagagttcacgaactgtgcccaacgcatgttatagccagggtcctactaactactcagtaaaagaacgtattgttgtattcctccagtgttaagctatagccatgttaaaagtcactgtgcatttattctcagcatcaaataccttgtaacgtcttctctgccttgttagtgcatatttttacttttctgatactgtaaagaatatatccagtatgtaaatgaatgttctataaatcttttgtatagtcattttctctgctccttaaatatcatctctattcagagtataataaaattatgaacttggtaa

SEQ ID NO: 190126 - DNA, 5070 bp, Homo sapiens
  Payload ID: 17541
  Gene Symbol: TNS3
  Gene Name: tensin 3
  ENST ID: ENST00000428457
  CDS Start-End: 1-64
gattttctgtgccttggacccacaagacaggaagtggatcaaagatggcccttcctcaaagtaagttgctgagatttctttacattctctccttgtctgcagttgtactccaaagttgaattctcttccagatttgcacagggggtgccttataagaaaatgactacaccatgccaatttcttttaaaaaagaaaaaagtaaaagtgttctcattatggacaaggatctggatgctgttaacttttctgccggctgttggctggatgtgcaatatttacatgtgtcatataacactgtggcatagatacagggagatggatggcacagcctttttggccatttgggaatgcatgggctcagcagtgctgaggtctgcacagctagaaggaattgctccctttgtgcaggtgtgtggatgaagcgggtgttccaaatttaccaaatgcaacggaggagggccttcatcacaccgttgctccacagccagtccaggcagctgttagagtttttttttttttttgagacagagttttgctctttttgcccaggctggagtgcagtggcgcgatcttggctcactgcaacctctgcctcccgggttcaagcaattctcctgcctcagcctcccaaatagctgggattacaggcgtccgccaccaggcccagctaattttttgtatttagtagagacggggtttcaccatgttggtcaggctggtctcgaactcctgacctcaggtgatccacctgcctcagcctcccaaagtgccgggattaaaggtgtgagccaccgtgcccggcttagagttccccttttataagcacacctttccctggctccctgagtaccgtggccttgcttggcctgggctcattcctggcccagtgttcctgtcagggccagctgagggacctcatcctaacctcccacttggaggcacaatgggctgtatccccccagcctggtttcctcggcataacccggatttaatgaccacagtgcctgatcacaggcatccttccctggaatcctgttttcaaatggcttgtctgtccaggaagttgctcagtgcatgcgttagcagaagcggggagaaggagaagagaccctggtactgacgagctgggcttccccggtggggactgtgttctgggcacactcccactctggctggtagcagaaacacgggctttcatgtgcttggaatttgtgactgtattggggttacctgagtgtcattgactggtcccttcatgatgcggaaactgctaaatttaaacaaaaaaaatccttcatttttctaagaaagagaagaaagtcctttgcccaggacctggatagggatatggtcattattgtgtgaagtgcaggactcataaaagcctattaagataatggctctaattcttctaagaaaaataattcgatgggctgttctttttaaacagctccctgaagtctatgtagtttgtaatgcaggcttccaaggcctgagaggagcgcctagtgtatttccccttcggtcccagtgggtgggagtgtcgaagtccagacaggacttgcattctggcatcatctcaggagcccctgagtcccttgccactcgccttgcagactgtggtccagtatgtcaggactggggctcaggaatctgcagggacaggtgcccaggagattctggccctggcgtggggaagcatctatagaggaagttgagcctcagctttgattcaggtcctaacctggggctgtggacagggcactcacctctcagcctcagggtcctcactgcagagctagagtcagacatcccatctgtaggtctgtgaaggctggaggtaaagtgcatgaacaggtggccagcagggtgctgggcacgtggttgatttttgataggtgccacttaaaattcctcctgacagtgccgctggcagctggaggaagtagaagcttggtactttgtgggacactgaccactctgactggactttcctttggcagagtctttggatttgtggcccggaagcagggcagtgccacggataatgtgtgccacctgtttgcagagcatgaccctgagcagcctgccagtgccattgtcaacttcgtatcaaaggtcatgattggttccccaaagaaggtctgagaactcccctccctccctggacccaccgatgcctctcgaagccctggagacagccgttgggtgagggtggggcccccactttttaccaaactagtaaacctgacattccaggcccatgaggggaaagaggatcttccagctctgcaaaaacaagaacaaacaacatcaccgtgaattggcctttcctgaaagtgacttatctgacacatctctgtagccacatgctttttgggtagaagaagctgggcatgggtgcaccccaccccctagggtccccatgggaaagggacatgcaaggaaacagcacagaacacgaggtggtccccatgtccctggcacactagcattccgggggatgaggaatccccagcccttgaggcagaggtgccgagtgactgccatgcttcgcccgtccgcatgggcgcttctgtccagctgcacccgaggccgggggtttccctcacctcggtcttcccaagatggagatgctaacgaaactgagaagggggcgtatgtttgacgaaggtttgtgcaagtcaggcccttctggaacacagcagggcctacaacgaggggcctttgcgatgggctgtgaggatgggggtggtgggaagaattggccacgttggagaccccatgccaccccaccatggtgagtgctctgtgcctcctgctcacctgtggtgagctgggcgagctgggcgagctgggcgagctgggctggggagagcctgtgaggaccgagaggagaaatgagaagaaggaacaaaaatattatttctatgtaatttatattttacttatgccaaattatttatgataatttgccattgctatactgtaccagtgtcaaatgctgcagcctgccaagctgtgattttgtgaggcttgtccctatgtaggatgcaccgcaggcccctggccactgaaagagtgtgcagtggactgtgggtctcccatatgcggtgccgcccaaaggtggctttgcctcaagcaacctaccctgatgttttactcattggaatgtttttccccgattgtggatgacttcttttctgatggagagagtccaggagggatggaaaactcctggatttaagctcagcatcccccacatgggcttttcgatcatcttcaggcctgaagctgcacgacctgaagttcgcctgcatttatcagccctctttgtgctgctccttgccaccttggggttcctgctggggaccatgtgtggttgtggcatgtgtgagcagaagggaggatgaggaaaaagagaagaaaccccggtactgacaagctgtttttgagtgccactgtttgccatcatctaagccactgaatcaagtgtatttcaggcttatttcaacattccaatgccctggttttcctgcttgaatctgttcgtggtcaaaggtttgggggaatttgtgaccctggaacatccccagagtgaaagatggagctgggccacatcagaataaggccttggccccatcctctcacagcctaggtgctctgcaggcatgctgactgtcctgattgcgatccagcccgaaattccctcctctgctttcaaaagtcaaatcccccattcttaggccacactggtgtcacaagctcctgtcagggagctggggtttgggaatgtgctttgtgaactctgctttaaagtgaggggccgaggaaaacttagaaacaggcagagttggaagcagccaaatcacagtgggtgttgtgtgtgtgtgcgtgtgtgcatgcgtgcgtgtatgcgtgtgtgaaagcaggtggaccattccactttttagctcctattgatgcaccaaaccaagtgcctcatttctgtgccaaatgtttgccttggtcgttgtggacctccttctctaacttgcggtggcatgactgtcaggaggtgctggcattttcagcagatcctcatgtgttgaccctgatgtctttagcagaggcctctagcatctcggtttttcatccactgcaggaatgtggccacagggagcagaggtttgtactttccccaagaggtcctcatcctgagacggtctctacccatgtttaacccaaagagtgcaggccaggttccttatccttctgatgaaggatgagagagctcatttagaagtcagagcaaactagggtctcagtattgagaaacgcagcctgccagggaatcacagagacatcggggtgcccgcgatggccctcatgaagccatgcctcgacggcattcaggaagccctgcaaacgtgctttttgaactcattggccaggtgtgatttttacacaaggtaaacgtggtcaagggcatcggggaatttgctccaagcagatagctccctctgaggaaccaaaggaagcaagtttccacgatttctgaagagctggtataggaagtttctttcttccttttgtgttacatgtgcattaaacagaacaagctgtgtgtcatcacagattgtactgtgggctcagaaaccgtgagagagcccccaccgtggacaccggctctagggccacaggaaaaggaacgtttccaggcattttgtctccagggctcccgctggacaggcacgtactgccctggggagtaaatgcggagagttcacgaactgtgcccaacgcatgttatagccagggtcctactaactactcagtaaaagaacgtattgttgtattcctccagtgttaagctatagccatgttaaaagtcactgtgcatttattctcagcatcaaataccttgtaacgtcttctctgccttgttagtgcatatttttacttttctgatactgtaaagaatatatccagtatgtaaatgaatgttctataaatcttttgtatagtcattttctctgctccttaaatatcatctctattcagagtataataaaattatgaacttggtaa

SEQ ID NO: 190127 - DNA, 698 bp, Homo sapiens
  Payload ID: 17541
  Gene Symbol: TNS3
  Gene Name: tensin 3
  ENST ID: ENST00000413551
  CDS Start-End: 375-698
aggctggccctcagccccgggcggacattgtcctgtgagctccatgcctgcgtgctcaccgtggggccgggcacacctgccagctgctcctggctgtggttctggggactcccacactcaccaggctctcccacctggtgggctattccagctgcctcctttatgcccagagctgccgagacattaacacgaagaggggtgtgcttgactaaagcaggggaaggagcgaaacgtaggaggagctgtttctggaagggaaaagcagccctggccggtggtccctgcccaggcccagcacagctccagggagttccacgctgtccagttctctctgccgtgataaacctctgcggcccgtcatcctgagtcccaccatggaggagggccatgggctggacctcacttacatcacggagcgcatcatcgctgtgtccttccctgccggctgctctgaggagtcctacctgcacaacctacaggaggtcacgcgcatgctcaagtccaagcacggggacaactacctggtattaaacctttcagaaaagagatatgaccttacgaagcttaacccaaagatcatggatgtgggctggccagagctccacgcaccgcccctggataagatgtgtaccatatgcaaggcgcaggagtcctggctgaacagcaacctccagcatgtggtcgtcattcactgcagg

SEQ ID NO: 190128 - DNA, 1156 bp, Homo sapiens
  Payload ID: 17541
  Gene Symbol: TNS3
  Gene Name: tensin 3
  Uniprot ID: Q68CZ2
  ENST ID: ENST00000458317
  CDS Start-End: 368-1120
agaatgggaaactgccttgggagaagccccaagtgagcccaagggcgcagagcagaaggaccctggagtgtaagagcctagattgcaagcctggcaggaggagccggaagaattaacctcgagtctgcacgcttttaagaacaaggcctttaaaaaatccaaagtgtgtggagtttgcaaacaaattattgacggtcaaggtatttcatgccgagcctgcaagtattcctgccacaagaaatgtgaagccaaggtggtgattccctgcggtgtgcaagtccgactggaacaggctccagggagttccacgctgtccagttctctctgccgtgataaacctctgcggcccgtcatcctgagtcccaccatggaggagggccatgggctggacctcacttacatcacggagcgcatcatcgctgtgtccttccctgccggctgctctgaggagtcctacctgcacaacctacaggaggtcacgcgcatgctcaagtccaagcacggggacaactacctggtattaaacctttcagaaaagagatatgaccttacgaagcttaacccaaagatcatggatgtgggctggccagagctccacgcaccgcccctggataagatgtgtaccatatgcaaggcgcaggagtcctggctgaacagcaacctccagcatgtggtcgtcattcactgcaggggcgggaaaggacgcataggagtggtcatatcatcctacatgcatttcaccaacgtctcagccagcgccgaccaggcccttgacaggtttgcaatgaagaagttttatgatgacaaagtttcagctttaatgcagccttcccaaaaacggtatgttcagttcctcagtgggctcctgtccggatcggtgaaaatgaatgcctctcccctgttcctgcattttgtcatcctccacggcacccccaacttcgacacaggtggagtgtgccggccctttctgaagctctaccaagccatgcagcctgtgtacacctccgggatctacaacgttggcccagaaaaccccagcaggatctgcatcgtcatcgagccggcccagcttctgaagggagatgtcatggtcatgaattacaatattgcgaacatctgaagtcattttcagctccaagtgaagaaatcatggtta

SEQ ID NO: 190129 - DNA, 1166 bp, Homo sapiens
  Payload ID: 17541
  Gene Symbol: TNS3
  Gene Name: tensin 3
  Uniprot ID: Q68CZ2
  ENST ID: ENST00000442536
  CDS Start-End: 368-1120
agaatgggaaactgccttgggagaagccccaagtgagcccaagggcgcagagcagaaggaccctggagtgtaagagcctagattgcaagcctggcaggaggagccggaagaattaacctcgagtctgcacgcttttaagaacaaggcctttaaaaaatccaaagtgtgtggagtttgcaaacaaattattgacggtcaaggtatttcatgccgagcctgcaagtattcctgccacaagaaatgtgaagccaaggtggtgattccctgcggtgtgcaagtccgactggaacaggctccagggagttccacgctgtccagttctctctgccgtgataaacctctgcggcccgtcatcctgagtcccaccatggaggagggccatgggctggacctcacttacatcacggagcgcatcatcgctgtgtccttccctgccggctgctctgaggagtcctacctgcacaacctacaggaggtcacgcgcatgctcaagtccaagcacggggacaactacctggtattaaacctttcagaaaagagatatgaccttacgaagcttaacccaaagatcatggatgtgggctggccagagctccacgcaccgcccctggataagatgtgtaccatatgcaaggcgcaggagtcctggctgaacagcaacctccagcatgtggtcgtcattcactgcaggggcgggaaaggacgcataggagtggtcatatcatcctacatgcatttcaccaacgtctcagccagcgccgaccaggcccttgacaggtttgcaatgaagaagttttatgatgacaaagtttcagctttaatgcagccttcccaaaaacggtatgttcagttcctcagtgggctcctgtccggatcggtgaaaatgaatgcctctcccctgttcctgcattttgtcatcctccacggcacccccaacttcgacacaggtggagtgtgccggccctttctgaagctctaccaagccatgcagcctgtgtacacctccgggatctacaacgttggcccagaaaaccccagcaggatctgcatcgtcatcgagccggcccagcttctgaagggagatgtcatggtcatgaattacaatattgcgaacatctgaagtcattttcagctccaagtgaagaaatcatggtgaaatgctacca

SEQ ID NO: 190130 - DNA, 1832 bp, Homo sapiens
  Payload ID: 17541
  Gene Symbol: TNS3
  Gene Name: tensin 3
  ENST ID: ENST00000450444
  CDS Start-End: 201-1832
caataaaaagccaccttcaaccatttgccttccactctggcttgcataggcagtgggctggcctgtgctcctggccgttgttcctgggtggaccccagagagtatgaatcctggtactcaggttggaggagttttatcctgctgggggctatctgttcattgctgaattcagatttctttggccggttcctgtgggcaccatgccggaagaattaacctcgagtctgcacgcttttaagaacaaggcctttaaaaaatccaaagtgtgtggagtttgcaaacaaattattgacggtcaaggtatttcatgccgagcctgcaagtattcctgccacaagaaatgtgaagccaaggtggtgattccctgcggtgtgcaagtccgactggaacaggctccagggagttccacgctgtccagttctctctgccgtgataaacctctgcggcccgtcatcctgagtcccaccatggaggagggccatgggctggacctcacttacatcacggagcgcatcatcgctgtgtccttccctgccggctgctctgaggagtcctacctgcacaacctacaggaggtcacgcgcatgctcaagtccaagcacggggacaactacctggtattaaacctttcagaaaagagatatgaccttacgaagcttaacccaaagatcatggatgtgggctggccagagctccacgcaccgcccctggataagatgtgtaccatatgcaaggcgcaggagtcctggctgaacagcaacctccagcatgtggtcgtcattcactgcaggggcgggaaaggacgcataggagtggtcatatcatcctacatgcatttcaccaacgtctcagccagcgccgaccaggcccttgacaggtttgcaatgaagaagttttatgatgacaaagtttcagctttaatgcagccttcccaaaaacggtatgttcagttcctcagtgggctcctgtccggatcggtgaaaatgaatgcctctcccctgttcctgcattttgtcatcctccacggcacccccaacttcgacacaggtggagtgtgccggccctttctgaagctctaccaagccatgcagcctgtgtacacctccgggatctacaacgttggcccagaaaaccccagcaggatctgcatcgtcatcgagccggcccagcttctgaagggagatgtcatggtgaaatgctaccacaagaaataccgctcggccacccgtgacgtcattttccgcctgcagtttcacactggggctgtgcagggctacgggctggtgtttgggaaggaggatctggacaatgccagcaaagatgaccgttttcctgactatgggaaggttgaattagtcttctctgccacgcctgagaagattcaagggtccgaacacttgtacaacgaccacggtgtgattgtggactacaacacaacagacccactgatacgctgggactcgtacgagaacctcagtgcagatggagaagtgctacacacgcagggccctgtcgatggcagcctttacgcgaaggtgaggaagaaaagctcctcggatcctggcatcccaggtggcccccaggcaatcccggccaccaacagcccagaccacagtgaccacaccttgtctgtcagcagtgactccggccactctacagcctctgccaggacggataagacggaagagcgcctggccccaggaaccaggaggggcctgagtgcccaggagaaggcagagttggaccagctgctcagtggctttggcctggaagatcctggaagctccctcaaggaaatgactgatgctcgaagcaagtacagtgggacccgc

SEQ ID NO: 190131 - DNA, 560 bp, Homo sapiens
  Payload ID: 17541
  Gene Symbol: TNS3
  Gene Name: tensin 3
  ENST ID: ENST00000434451
  CDS Start-End: 219-560
ccactcgagtgggacccgtggcgcccgggcgccctggactgagggcagagaccggagcagctatgtcgcagtcgctgtcgggaccgagcggactttgctccctaggactccgtctcgagactccaggtggagagcgcagctaggggcttcaatgggcaggctcaagacccttctcctactttttctaggacttgtccaaggtggatctgagcctcctcatgtgctccaggcagagatcaggattcggatgcatcaccaactggtggaagatggggactaggcaccctgcacaccctgcacagccggaagaattaacctcgagtctgcacgcttttaagaacaaggcctttaaaaaatccaaagtgtgtggagtttgcaaacaaattattgacggtcaaggtatttcatgccgagcctgcaagtattcctgccacaagaaatgtgaagccaaggtggtgattccctgcggtgtgcaagtccgactggaacaggctccagggagttccacgctgtccagttctctctgccgtgataaacctctgcggcccgtcatcctgagt

SEQ ID NO: 190132 - DNA, 570 bp, Homo sapiens
  Payload ID: 17541
  Gene Symbol: TNS3
  Gene Name: tensin 3
  ENST ID: ENST00000415929
  CDS Start-End: 156-570
ttgtcagtcttgatctgctacagctttgtagccagagtgaggtggtgattccctgcggtgtgcaagtccgactggaacaggctccagggagttccacgctgtccagttctctctgccgtgataaacctctgcggcccgtcatcctgagtcccaccatggaggagggccatgggctggacctcacttacatcacggagcgcatcatcgctgtgtccttccctgccggctgctctgaggagtcctacctgcacaacctacaggaggtcacgcgcatgctcaagtccaagcacggggacaactacctggtattaaacctttcagaaaagagatatgaccttacgaagcttaacccaaagatcatggatgtgggctggccagagctccacgcaccgcccctggataagatgtgtaccatatgcaaggcgcaggagtcctggctgaacagcaacctccagcatgtggtcgtcattcactgcaggggcgggaaaggacgcataggagtggtcatatcatcctacatgcatttcaccaacgtctcagccagcgccgaccaggcccttgacaggtttg

SEQ ID NO: 190133 - DNA, 3836 bp, Homo sapiens
  Payload ID: 17541
  Gene Symbol: TNS3
  Gene Name: tensin 3
  ENST ID: ENST00000457718
  CDS Start-End: 88-3836
cgcgactcccactaggctatgagctacaggagggagggtaggtcttgctcccggagagcaccttaatcacaggcgctgaatgaaagaatgaactggttgtgcaggaaccaggatccgaacccgcctccccagccggaagaattaacctcgagtctgcacgcttttaagaacaaggcctttaaaaaatccaaagtgtgtggagtttgcaaacaaattattgacggtcaaggtatttcatgccgagcctgcaagtattcctgccacaagaaatgtgaagccaaggtggtgattccctgcggtgtgcaagtccgactggaacaggctccagggagttccacgctgtccagttctctctgccgtgataaacctctgcggcccgtcatcctgagtcccaccatggaggagggccatgggctggacctcacttacatcacggagcgcatcatcgctgtgtccttccctgccggctgctctgaggagtcctacctgcacaacctacaggaggtcacgcgcatgctcaagtccaagcacggggacaactacctggtattaaacctttcagaaaagagatatgaccttacgaagcttaacccaaagatcatggatgtgggctggccagagctccacgcaccgcccctggataagatgtgtaccatatgcaaggcgcaggagtcctggctgaacagcaacctccagcatgtggtcgtcattcactgcaggggcgggaaaggacgcataggagtggtcatatcatcctacatgcatttcaccaacgtctcagccagcgccgaccaggcccttgacaggtttgcaatgaagaagttttatgatgacaaagtttcagctttaatgcagccttcccaaaaacggtatgttcagttcctcagtgggctcctgtccggatcggtgaaaatgaatgcctctcccctgttcctgcattttgtcatcctccacggcacccccaacttcgacacaggtggagtgtgccggccctttctgaagctctaccaagccatgcagcctgtgtacacctccgggatctacaacgttggcccagaaaaccccagcaggatctgcatcgtcatcgagccggcccagcttctgaagggagatgtcatggtgaaatgctaccacaagaaataccgctcggccacccgtgacgtcattttccgcctgcagtttcacactggggctgtgcagggctacgggctggtgtttgggaaggaggatctggacaatgccagcaaagatgaccgttttcctgactatgggaaggttgaattagtcttctctgccacgcctgagaagattcaagggtccgaacacttgtacaacgaccacggtgtgattgtggactacaacacaacagacccactgatacgctgggactcgtacgagaacctcagtgcagatggagaagtgctacacacgcagggccctgtcgatggcagcctttacgcgaaggtgaggaagaaaagctcctcggatcctggcatcccaggtggcccccaggcaatcccggccaccaacagcccagaccacagtgaccacaccttgtctgtcagcagtgactccggccactctacagcctctgccaggacggataagacggaagagcgcctggccccaggaaccaggaggggcctgagtgcccaggagaaggcagagttggaccagctgctcagtggctttggcctggaagatcctggaagctccctcaaggaaatgactgatgctcgaagcaagtacagtgggacccgccacgtggtgccagcccaggttcacgtgaatggagacgctgctctgaaggatcgggagacagacattctggatgacgagatgccccaccacgacctgcacagtgtggacagccttgggaccctgtcctcctcggaagggcctcagtcggcccacctgggtcccttcacctgccacaagagcagccagaactcactcctatctgacggttttggcagcaacgttggtgaagatccgcagggcaccctcgttccggacctgggccttggcatggacggcccctatgagcgggagcggacttttgggagtcgagagcccaagcagccccagcccctgctgagaaagccctcagtgtccgcccagatgcaggcctatgggcagagcagctactccacacagacctgggtgcgccagcagcagatggttgtagctcaccagtatagcttcgccccagatggggaggcccggctggtgagccgctgccctgcagacaatcctggcctcgtccaggcccagcccagagtgccactcacccccacccgagggaccagcagtagggtggctgtccagaggggtgtaggcagtgggccacatccccctgacacacagcagccctctcccagcaaagcgttcaaacccaggtttccaggagaccaggttgtgaatggagccggcccagagctgagcacaggcccctccccaggctcgcccaccctggacatcgaccagtccatcgagcagctcaacaggctgatcctggagctggatcccaccttcgagcccatccctacccacatgaacgccctcggtagccaggccaatggctctgtgtctccagacagcgtgggaggtgggctccgggcaagcagcaggctgcctgacacaggagagggccccagcagggccaccgggcggcaaggctcctctgctgaacagcccctgggcgggagactcaggaagctgagcctggggcagtacgacaacgatgctggggggcagctgcccttctccaaatgtgcatggggaaaggctggtgtggactatgccccaaacctgccgccattcccctcaccagcggacgtcaaagagacgatgacccctggctatccccaggacctcgatattatcgatggcagaattttaagtagcaaggagtccatgtgttcaactccagcatttcctgtgtctccagagacaccgtatgtgaaaacagcgctgcgccatcctccgttcagcccacctgagcccccgctgagcagcccagccagtcagcacaaaggaggacgtgaaccacgaagctgccctgagacgctcactcacgctgtggggatgtcagagagccccatcggacccaaatccacgatgctccgggctgatgcgtcctcgacgccctcctttcagcaggcttttgcttcttcctgcaccatttccagcaacggccctgggcagaggagagagagctcctcttctgcagaacgccagtgggtggagagcagccccaagcccatggtttccctgctggggagcggccggcccaccggaagtcccctcagcgctgagttctccggtaccaggaaggactccccagtgctgtcctgcttcccgccgtcagagctccaggctcctttccacagccatgagctgtccctagcagagccaccggactccctggcgcctcccagcagccaggccttcctgggcttcggcaccgccccagtgggaagtggccttccgcccgaggaggacctgggggccttgctggccaattctcatggagcgtcaccgacccccagcatcccgctgacagcgacaggggctgccgacaatggcttcctgtcccacaactttctcacggtggcgcctggacacagcagccaccacagtccaggcctgcagggccagggtgtgaccctgcccgggcagccacccctccctgagaagaagcgggcctcggagggggatcgttctttgggctcagtctctccctcctccagtggcttctccagcccgcacagcgggagcaccatcagtatccccttcccaaatgtccttcccgacttttccaaggcttcagaagc

SEQ ID NO: 190134 - DNA, 4067 bp, Homo sapiens
  Payload ID: 17542
  Gene Symbol: TNS4
  Gene Name: tensin 4
  Uniprot ID: Q8IZW8
  ENST ID: ENST00000254051
  CDS Start-End: 160-2307
ctgagtcgtcttggtcccaggagccagtagtgaaggcaacagtctgcccacctgtggacaccagatcctgggagctcctggttagcaagtgagatctctgggatgtcagtgaggctggttgaagaccagaggtaaactgcagaggtcaccacccccaccatgtcccaggtgatgtccagcccactgctggcaggaggccatgctgtcagcttggcgccttgtgatgagcccaggaggaccctgcacccagcacccagccccagcctgccaccccagtgttcttactacaccacggaaggctggggagcccaggccctgatggcccccgtgccctgcatggggccccctggccgactccagcaagccccacaggtggaggccaaagccacctgcttcctgccgtcccctggtgagaaggccttggggaccccagaggaccttgactcctacattgacttctcactggagagcctcaatcagatgatcctggaactggaccccaccttccagctgcttcccccagggactgggggctcccaggctgagctggcccagagcaccatgtcaatgagaaagaaggaggaatctgaagccttggacataaagtacatcgaggtgacctccgccagatcaaggtgccacgatggcccccagcactgctccagcccctctgtcaccccgcccttcggctcccttcgcagtggtggcctcctcctttccagagacgtcccccgagagacacgaagcagcagtgagagcctcatcttctctgggaaccagggcagggggcaccagcgccctctgcccccctcagagggtctctcccctcgacccccaaattcccccagcatctcaatcccttgcatggggagcaaggcctcgagcccccatggtttgggctccccgctggtggcttctccaagactggagaagcggctgggaggcctggccccacagcggggcagcaggatctctgtgctgtcagccagcccagtgtctgatgtcagctatatgtttggaagcagccagtccctcctgcactccagcaactccagccatcagtcatcttccagatccttggaaagtccagccaactcttcctccagcctccacagccttggctcagtgtccctgtgtacaagacccagtgacttccaggctcccagaaaccccaccctaaccatgggccaacccagaacaccccactctccaccactggccaaagaacatgccagcagctgccccccatccatcaccaactccatggtggacatacccattgtgctgatcaacggctgcccagaaccagggtcttctccaccccagcggaccccaggacaccagaactccgttcaacctggagctgcttctcccagcaacccctgtccagccaccaggagcaacagccagaccctgtcagatgccccctttaccacatgcccagagggtcccgccagggacatgcagcccaccatgaagttcgtgatggacacatctaaatactggtttaagccaaacatcacccgagagcaagcaatcgagctgctgaggaaggaggagccaggggcttttgtcataagggacagctcttcataccgaggctccttcggcctggccctgaaggtgcaggaggttcccgcgtctgctcagagtcgaccaggtgaggacagcaatgacctcatccgacacttcctcatcgagtcgtctgccaaaggagtgcatctcaaaggagcagatgaggagccctactttgggagcctctctgccttcgtgtgccagcattccatcatggccctggccctgccctgcaaactcaccatcccacagagagaactgggaggtgcagatggggcctcggactctacagacagcccagcctcctgccagaagaaatctgcgggctgccacaccctgtacctgagctcagtgagcgtggagaccctgactggagccctggccgtgcagaaagccatctccaccacctttgagagggacatcctccccacgcccaccgtggtccacttcaaagtcacagagcagggcatcactctgactgatgtccagaggaaggtgtttttccggcgccattacccactcaccaccctccgcttctgtggtatggaccctgagcaacggaagtggcagaagtactgcaaaccctcctggatctttgggtttgtggccaagagccagacagagcctcaggagaacgtatgccacctctttgcggagtatgacatggtccagccagcctcgcaggtcatcggcctggtgactgctctgctgcaggacgcagaaaggatgtaggggagagactgcctgtgcacctaaccaacacctccaggggctcgctaaggagcccccctccaccccctgaatgggtgtggcttgtggccatattgacagaccaatctatgggactagggggattggcatcaagttgacacccttgaacctgctatggccttcagcagtcaccatcatccagaccccccgggcctcagtttcctcaatcatagaagaagaccaatagacaagatcagctgttcttagatgctggtgggcatttgaacatgctcctccatgattctgaagcatgcacacctctgaagacccctgcatgaaaataacctccaaggaccctctgaccccatcgacctgggccctgcccacacaacagtctgagcaagagacctgcagcccctgtttcgtggcagacagcaggtgcctggcggtgacccacggggctcctggcttgcagctggtgatggtcaagaactgactacaaaacaggaatggatagactctatttccttccatatctgttcctctgttccttttcccactttctgggtggctttttgggtccacccagccaggatgctgcaggccaagctgggtgtggtatttagggcagctcagcagggggaacttgtccccatggtcagaggagacccagctgtcctgcacccccttgcagatgagtatcaccccatcttttctttccacttggtttttatttttatttttttttgagacagagtctcactgtcacccaggctgaactgcagtggtgtgatctaggctcactgcaacctccacctcccaggttcaagcaattatcctgcctcaggctcccaagtagctgggattacaggcatgtgcaactcacccagctaattttgtatttttagtagagacagggtttcaccatgttggccaggctggtcttgaactcctgaccgcaggtaatccacctgcttcggcctcccaaagtgctgggattacaggcgcaagccacccagcccagcttctttccattccttgataggcgagtattccaaagctggtatcgtagctgccctaatgttgcatattaggcggcgggggcagagataagggccatctctctgtgattctgcctcagctcctgtcttgctgagccctcccccaacccacgctccaacacacacacacacacacacacacacacacacacacacacacacacacacacacacacacgcccctctactgctatgtggcttcaaccagcctcacagccacacgggggaagcagagagtcaagaatgcaaagaggccgcttccctaagaggcttggaggagctgggctctatcccacacccacccccaccccacccccacccagcctccagaagctggaaccatttctcccgcaggcctgagttcctaaggaaaccaccctaccggggtggaagggagggtcagggaagaaacccactcttgctctacgaggagcaagtgcctgccccctcccagcagccagccctgccaaagttgcattatctttggccaaggctgggcctgacggttatgatttcagccctgggcctgcaggagaggctgagaccagcccacccagccagtggtcgagcactgccccgccgccaaagtctgcagaatgtgagatgaggttctcaaggtcacaggccccagtcccagcctgggggctggcagaggcccccatatactctgctacagctcctatcatgaaaaataaaatgtttgtctttgcaaaacagtaa

SEQ ID NO: 190135 - DNA, 599 bp, Homo sapiens
  Payload ID: 17542
  Gene Symbol: TNS4
  Gene Name: tensin 4
  ENST ID: ENST00000582747
  CDS Start-End: 1-100
ggtgtttttccggcgccattacccactcaccaccctccgcttctgtggtatggaccctgagcaacggaagtggcagaagtactgcaaaccctcctggtaaggccttcctgtctcagggccccaaacccaacatggggagggaactgcagaaggaaagaggcaccattctgactttaatagtccaaagtgttgatgagggcacaggccctggtcctcagggagctcccatctgatgggaaagactttgactgccctcagagcctctgggctgttgggggtgacatgagcctgggagccctcaatcttctgcaagaggcacaggctctaacttcagggagcctcaagctattggaatgtcccagtctgatgatcaagatgcatccttgccctcagggagcttccactctaatggggaatgcacaggtcctgtcctcaaggagccctcactcaaaacaaaggaaacccagagcttgaactcagaaatctcccagtctgacgggagaggcatctccttccccagggagccccaccataaggaggtgctggagtcaattggctaagggaggggcagggaggaatgagatgcaggctgagggccc

SEQ ID NO: 190136 - DNA, 2513 bp, Homo sapiens
  Payload ID: 17543
  Gene Symbol: TDGF1
  Gene Name: teratocarcinoma-derived growth factor 1
  Uniprot ID: P13385
  ENST ID: ENST00000296145
  CDS Start-End: 734-1300
tctatctcagtttcaagcttcctagtcttccccacacacacacacctagctcctcaggcggagagcacccctttcttggccacccgggtatcccccagggggagtacggggctcaaaacacccttctggaaaaacaaaggtggaagcaaatttcaggaagtaaaacttcctgaaataaaataaaatatcgaatgccttgagacccatacattttcaggttttcctaattaaagcaattactttccaccacccctccaacctggaatcaccaacttgattagagaaactgatttttcttttttctttttttttcccaaaagagtacctctgatcattttagcctgcaactaatgatagagatattagggctagttaaccacagttttacaagactcctcttcccgcgtgtgggccattgtcatgctggtgggcgtcccgcccacctgaaaggtctccccgccccgactggggtttgttgttgaagaaggagaatccccggaaaggctgagtctccagctcaaggtcaaaacgtccaaggccgaaagccctccagtttcccctggacgccttgctcctgcttctgctacgaccttctggggaaaacgaatttctcattttcttcttaaattgccattttcgctttaggagatgaatgttttcctttggctgttttggcaatgactctgaattaaagcgatgctaacgcctcttttccccctaattgttaaaagctatggactgcaggaagatggcccgcttctcttacagtgtgatttggatcatggccatttctaaagtctttgaactgggattagttgccgggctgggccatcaggaatttgctcgtccatctcggggatacctggccttcagagatgacagcatttggccccaggaggagcctgcaattcggcctcggtcttcccagcgtgtgccgcccatggggatacagcacagtaaggagctaaacagaacctgctgcctgaatgggggaacctgcatgctggggtccttttgtgcctgccctccctccttctacggacggaactgtgagcacgatgtgcgcaaagagaactgtgggtctgtgccccatgacacctggctgcccaagaagtgttccctgtgtaaatgctggcacggtcagctccgctgctttcctcaggcatttctacccggctgtgatggccttgtgatggatgagcacctcgtggcttccaggactccagaactaccaccgtctgcacgtactaccacttttatgctagttggcatctgcctttctatacaaagctactattaatcgacattgacctatttccagaaatacaattttagatatcatgcaaatttcatgaccagtaaaggctgctgctacaatgtcctaactgaaagatgatcatttgtagttgccttaaaataatgaatacatttccaaaatggtctctaacatttccttacagaactacttcttacttctttgccctgccctctcccaaaaaactacttcttttttcaaaagaaagtcagccatatctccattgtgcctaagtccagtgtttctttttttttttttttttgagacggagtctcactctgtcacccaggctggactgcaatgacgcgatcttggttcactgcaacctccgcatccggggttcaagccattctcctgcctcagcctcccaagtaactgggattacaggcatgtgtcaccatgcccagctaatttttttgtatttttagtagagatgggggtttcaccatattggccagtctggtctcgaactcctgaccttgtgatccactcgcctcagcctctcgaagtgctgagattacacacgtgagcaactgtgcaaggcctggtgtttcttgatacatgtaattctaccaaggtcttcttaatatgttcttttaaatgattgaattatatgttcagattattggagactaattctaatgtggaccttagaatacagttttgagtagagttgatcaaaatcaattaaaatagtctctttaaaaggaaagaaaacatctttaaggggaggaaccagagtgctgaaggaatggaagtccatctgcgtgtgtgcagggagactgggtaggaaagaggaagcaaatagaagagagaggttgaaaaacaaaatgggttacttgattggtgattaggtggtggtagagaagcaagtaaaaaggctaaatggaagggcaagtttccatcatctatagaaagctatataagacaagaactcccctttttttcccaaaggcattataaaaagaatgaagcctccttagaaaaaaaattatacctcaatgtccccaacaagattgcttaataaattgtgtttcctccaagctattcaattcttttaactgttgtagaagacaaaatgttcacaatatatttagttgtaaaccaagtgatcaaactacatattgtaaagcccatttttaaaatacattgtatatatgtgtatgcacagtaaaaatggaaactatattgacctaaa

SEQ ID NO: 190137 - DNA, 1771 bp, Homo sapiens
  Payload ID: 17543
  Gene Symbol: TDGF1
  Gene Name: teratocarcinoma-derived growth factor 1
  ENST ID: ENST00000542931
  CDS Start-End: 43-561
cctggatgttcaagggaacaatgacagagtgtgatttggatcatggccatttctaaagtctttgaactgggattagttgccgggctgggccatcaggaatttgctcgtccatctcggggatacctggccttcagagatgacagcatttggccccaggaggagcctgcaattcggcctcggtcttcccagcgtgtgccgcccatggggatacagcacagtaaggagctaaacagaacctgctgcctgaatgggggaacctgcatgctggggtccttttgtgcctgccctccctccttctacggacggaactgtgagcacgatgtgcgcaaagagaactgtgggtctgtgccccatgacacctggctgcccaagaagtgttccctgtgtaaatgctggcacggtcagctccgctgctttcctcaggcatttctacccggctgtgatggccttgtgatggatgagcacctcgtggcttccaggactccagaactaccaccgtctgcacgtactaccacttttatgctagttggcatctgcctttctatacaaagctactattaatcgacattgacctatttccagaaatacaattttagatatcatgcaaatttcatgaccagtaaaggctgctgctacaatgtcctaactgaaagatgatcatttgtagttgccttaaaataatgaatacatttccaaaatggtctctaacatttccttacagaactacttcttacttctttgccctgccctctcccaaaaaactacttcttttttcaaaagaaagtcagccatatctccattgtgcctaagtccagtgtttctttttttttttttttttgagacggagtctcactctgtcacccaggctggactgcaatgacgcgatcttggttcactgcaacctccgcatccggggttcaagccattctcctgcctcagcctcccaagtaactgggattacaggcatgtgtcaccatgcccagctaatttttttgtatttttagtagagatgggggtttcaccatattggccagtctggtctcgaactcctgaccttgtgatccactcgcctcagcctctcgaagtgctgagattacacacgtgagcaactgtgcaaggcctggtgtttcttgatacatgtaattctaccaaggtcttcttaatatgttcttttaaatgattgaattatatgttcagattattggagactaattctaatgtggaccttagaatacagttttgagtagagttgatcaaaatcaattaaaatagtctctttaaaaggaaagaaaacatctttaaggggaggaaccagagtgctgaaggaatggaagtccatctgcgtgtgtgcagggagactgggtaggaaagaggaagcaaatagaagagagaggttgaaaaacaaaatgggttacttgattggtgattaggtggtggtagagaagcaagtaaaaaggctaaatggaagggcaagtttccatcatctatagaaagctatataagacaagaactcccctttttttcccaaaggcattataaaaagaatgaagcctccttagaaaaaaaattatacctcaatgtccccaacaagattgcttaataaattgtgtttcctccaagctattcaattcttttaactgttgtagaagacaaaatgttcacaatatatttagttgtaaaccaagtgatcaaactacatattgtaaagcccatttttaaaatacattgtatatatgtgtatgcacagtaaaaatggaaactatattgacct

SEQ ID NO: 190138 - DNA, 1852 bp, Homo sapiens
  Payload ID: 17544
  Gene Symbol: TINF2
  Gene Name: TERF1 (TRF1)-interacting nuclear factor 2
  Uniprot ID: Q9BSI4
  ENST ID: ENST00000267415
  CDS Start-End: 343-1698
ctcttaccgcccttttccggggcaagggaagctagtagcggagccggaagtgaggcaccctcgggctcgagacagcggcgacgtttaaagctgagcgacccagtgccactggagacggtcagcttctccactcaggctcctccagcccgagccagaagaccccctcccccagaattctgggggccgatggaagggagccgagtcagatcgcgaggtacccagagccgacagaccggagcgacagggagttgccagaagccccgcccctaggagtgatcggaaagcctcacccatccgggtgaggaacccggagggaccgcctccgggcggagcccgccgaccatggctacgcccctggtggcgggtcccgcagctctacgcttcgccgccgcggctagctggcaggttgtgcgcggacgctgcgtggaacattttccgcgagtactggagtttctgcgatctctgcgcgctgttgcccctggcttggttcgctaccggcaccacgaacgcctttgtatgggcctaaaggccaaggtggtggtggagctgatcctgcagggccggccttgggcccaagtcctgaaagccctgaatcaccactttccagaatctggacctatagtgcgggatcccaaggctacaaagcaggatctgaggaagattttggaggcacaggaaactttttaccagcaggtgaagcagctgtcagaggctcctgtggatttggcctcgaagctgcaggaacttgaacaagagtatggggaaccctttctggctgccatggaaaagctgctttttgagtacttgtgtcagctggagaaagcactgcctacaccgcaggcacagcagcttcaggatgtgctgagttggatgcagcctggagtctctatcacctcttctcttgcctggagacaatatggtgtggacatggggtggctgcttccagagtgctctgttactgactcagtgaacctggctgagcccatggaacagaatcctcctcagcaacaaagactagcactccacaatcccctgccaaaagccaagcctggcacacatcttcctcagggaccatcttcaaggacgcacccagaacctctagctggccgacacttcaatctggcccctctaggccgacgaagagttcagtcccaatgggcctccactaggggaggccataaggagcgccccacagtcatgctgtttccctttaggaatctcggctcaccaacccaggtcatatctaagcctgagagcaaggaagaacatgcgatatacacagcagacctagccatgggcacaagagcagcctccactgggaagtctaagagtccatgccagaccctggggggaagggctctgaaggagaacccagttgacttgcctgccacagagcaaaaggagaattgcttggattgctacatggaccccctgagactatcattattacctcctagggccaggaagccagtgtgtcctccgtctctgtgcagctccgtcattaccataggggacttggttttagactctgatgaggaagaaaatggccagggggaaggaaaggaatctctggaaaactatcagaagacaaagtttgacaccttgatacccactctctgtgaatacctacccccttctggccacggtgccatacctgtttcttcctgtgactgtagagacagttctagacctttgtgatagaactaaaatgctctctgtactctagtctcctgcctcctcagctctgcaagtagtttagtaggaatgaagtggaagtccaggcttggattgcctaactacactgctaaaaatatttgtaatccttaataattaaactttggatttgttaaaa

SEQ ID NO: 190139 - DNA, 2168 bp, Homo sapiens
  Payload ID: 17544
  Gene Symbol: TINF2
  Gene Name: TERF1 (TRF1)-interacting nuclear factor 2
  Uniprot ID: Q9BSI4
  ENST ID: ENST00000399423
  CDS Start-End: 332-1396
cttttccggggcaagggaagctagtagcggagccggaagtgaggcaccctcgggctcgagacagcggcgacgtttaaagctgagcgacccagtgccactggagacggtcagcttctccactcaggctcctccagcccgagccagaagaccccctcccccagaattctgggggccgatggaagggagccgagtcagatcgcgaggtacccagagccgacagaccggagcgacagggagttgccagaagccccgcccctaggagtgatcggaaagcctcacccatccgggtgaggaacccggagggaccgcctccgggcggagcccgccgaccatggctacgcccctggtggcgggtcccgcagctctacgcttcgccgccgcggctagctggcaggttgtgcgcggacgctgcgtggaacattttccgcgagtactggagtttctgcgatctctgcgcgctgttgcccctggcttggttcgctaccggcaccacgaacgcctttgtatgggcctaaaggccaaggtggtggtggagctgatcctgcagggccggccttgggcccaagtcctgaaagccctgaatcaccactttccagaatctggacctatagtgcgggatcccaaggctacaaagcaggatctgaggaagattttggaggcacaggaaactttttaccagcaggtgaagcagctgtcagaggctcctgtggatttggcctcgaagctgcaggaacttgaacaagagtatggggaaccctttctggctgccatggaaaagctgctttttgagtacttgtgtcagctggagaaagcactgcctacaccgcaggcacagcagcttcaggatgtgctgagttggatgcagcctggagtctctatcacctcttctcttgcctggagacaatatggtgtggacatggggtggctgcttccagagtgctctgttactgactcagtgaacctggctgagcccatggaacagaatcctcctcagcaacaaagactagcactccacaatcccctgccaaaagccaagcctggcacacatcttcctcagggaccatcttcaaggacgcacccagaacctctagctggccgacacttcaatctggcccctctaggccgacgaagagttcagtcccaatgggcctccactaggggaggccataaggagcgccccacagtcatgctgtttccctttaggaatctcggctcaccaacccaggtcatatctaagcctgagagcaaggaagaacatgcgatatacacagcagacctagccatgggcacaagagcagcctccactgggaagtctaagagtccatgccagaccctggggggaagggctctgaaggagaacccagttgacttgcctgccacagagcaaaaggagtgagtggaacagagttgcttcttactaggagcacattctttgcctgccttcccttcatcctatcctctttgcttgctctcacctcaggaattgcttggattgctacatggaccccctgagactatcattattacctcctagggccaggaagccaggtaggtagtctgagtcaggattggatcaacagcctcctctcttggggactctcaagagcctgtgttcatctagaagtagtagtttgattctggtttccctcctacagtgtgtcctccgtctctgtgcagctccgtcattaccataggggacttggttttagactctgatgaggaagaaaatggccagggggaaggaaaggtgagtgggaaggagcagaaagctgggaaaggggatgggtagaacaagactgagaaatccacatgcttcagaattcagagggttcagggaatggtttcggatagtaggctctccctgctcccttctctacaggaatctctggaaaactatcagaagacaaagtttgacaccttgatacccactctctgtgaatacctacccccttctggccacggtgccatacctgtttcttcctgtgactgtagagacagttctagacctttgtgatagaactaaaatgctctctgtactctagtctcctgcctcctcagctctgcaagtagtttagtaggaatgaagtggaagtccaggcttggattgcctaactacactgctaaaaatatttgtaatccttaataattaaactttggatttgttaaaa

SEQ ID NO: 190140 - DNA, 894 bp, Homo sapiens
  Payload ID: 17544
  Gene Symbol: TINF2
  Gene Name: TERF1 (TRF1)-interacting nuclear factor 2
  ENST ID: ENST00000558476
  CDS Start-End: 456-894
gctgagcgacccagtgccactggagacggtcagcttctccactcaggctcctccagcccgagccagaagaccccctcccccagaattctgggggccgatggaagggagccgagtcagatcgcgaggtacccagagccgacagaccggagcgacagggagttgccagaagccccgcccctaggagtgatcggaaagcctcacccatccgggtggtggtggagctgatcctgcagggccggccttgggcccaagtcctgaaagccctgaatcaccactttccagaatctggacctatagtgcgggatcccaaggctacaaagcaggatctgaggaagattttggaggcacaggaaactttttaccagcaggtgaagcagctgtcagaggctcctgtggatttggcctcgaagctgcaggaacttgaacaagagtatggggaaccctttctggctgccatggaaaagctgctttttgagtacttgtgtcagctggagaaagcactgcctacaccgcaggcacagcagcttcaggatgtgctgagttggatgcagcctggagtctctatcacctcttctcttgcctggagacaatatggtgtggacatggggtggctgcttccagagtgctctgttactgactcagtgaacctggctgagcccatggaacagaatcctcctcagcaacaaagactagcactccacaatcccctgccaaaagccaagcctggcacacatcttcctcagggaccatcttcaaggacgcacccagaacctctagctggccgacacttcaatctggcccctctaggccgacgaagagttcagtcccaatgggcctccactaggggaggccataaggagcgccccacagtcatgctgtttccctttaggaatc

SEQ ID NO: 190141 - DNA, 1559 bp, Homo sapiens
  Payload ID: 17544
  Gene Symbol: TINF2
  Gene Name: TERF1 (TRF1)-interacting nuclear factor 2
  ENST ID: ENST00000559969
  CDS Start-End: 1-823
cgccgcggctagctggcaggttgtgcgcggacgctgcgtggaacattttccgcgagtactggagtttctgcgatctctgcgcgctgttgcccctggcttggttcgctaccggcaccacgaacgcctttgtatgggcctaaaggccaaggtggtggtggagctgatcctgcagggccggccttgggcccaagtcctgaaagccctgaatcaccactttccagaatctggacctatagtgcgggatcccaaggctacaaagcaggatctgaggaagattttggaggcacaggaaactttttaccagcaggtgaagcagctgtcagaggctcctgtggatttggcctcgaagctgcaggaacttgaacaagagtatggggaaccctttctggctgccatggaaaagctgctttttgagtacttgtgtcagctggagaaagcactgcctacaccgcaggcacagcagcttcaggatgtgctgagttggatgcagcctggagtctctatcacctcttctcttgcctggagacaatatggtgtggacatggggtggctgcttccagagtgctctgttactgactcagtgaacctggctgagcccatggaacagaatcctcctcagcaacaaagactagcactccacaatcccctgccaaaagccaagcctggcacacatcttcctcagggaccatcttcaaggacgcacccagaacctctagctggccgacacttcaatctggcccctctaggccgacgaagaaccctggggggaagggctctgaaggagaacccagttgacttgcctgccacagagcaaaaggagtgagtggaacagagttgcttcttactaggagcacattctttgcctgccttcccttcatcctatcctctttgcttgctctcacctcaggaattgcttggattgctacatggaccccctgagactatcattattacctcctagggccaggaagccaggtaggtagtctgagtcaggattggatcaacagcctcctctcttggggactctcaagagcctgtgttcatctagaagtagtagtttgattctggtttccctcctacagtgtgtcctccgtctctgtgcagctccgtcattaccataggggacttggttttagactctgatgaggaagaaaatggccagggggaaggaaaggtgagtgggaaggagcagaaagctgggaaaggggatgggtagaacaagactgagaaatccacatgcttcagaattcagagggttcagggaatggtttcggatagtaggctctccctgctcccttctctacaggaatctctggaaaactatcagaagacaaagtttgacaccttgatacccactctctgtgaatacctacccccttctggccacggtgccatacctgtttcttcctgtgactgtagagacagttctagacctttgtgatagaactaaaatgctctctgtactctagtctcctgcctcctcagctctgcaagtagtttagtaggaatgaagtggaagtccaggcttggattgcctaactacactgctaaaaatattt

SEQ ID NO: 190142 - DNA, 1874 bp, Homo sapiens
  Payload ID: 17544
  Gene Symbol: TINF2
  Gene Name: TERF1 (TRF1)-interacting nuclear factor 2
  ENST ID: ENST00000558566
  CDS Start-End: 282-704
cgggctcgagacagcggcgacgtttaaagctgagcgacccagtgccactggagacggtcagcttctccactcaggctcctccagcccgagccagaagaccccctcccccagaattctgggggccgatggaagggagccgagtcagatcgcgaggtacccagagccgacagaccggagcgacagggagttgccagaagccccgcccctaggagtgatcggaaagcctcacccatccgggtgaggaacccggagggaccgcctccgggcggagcccgccgaccatggctacgcccctggtggcgggtcccgcagctctacgcttcgccgccgcggctagctggcaggttgtgcgcggacgctgcgtggaacattttccgcgagtactggagtttctgcgatctctgcgcgctgttgcccctggcttggttcgctaccggcaccacgaacgcctttgtatgggcctaaaggccaaggtggtggtggagctgatcctgcagggccggccttgggcccaagtcctgaaagccctgaatcaccactttccagaatctggacctatagtgcgggatcccaaggctacaaagcaggatctgaggaagattttggaggcacaggaaactttttaccagcaggtgaagcagctgtcagaggctcctgtggatttggcctcgaagctgcagagtgctctgttactgactcagtgaacctggctgagcccatggaacagaatcctcctcagcaacaaagactagcactccacaatcccctgccaaaagccaagcctggcacacatcttcctcagggaccatcttcaaggacgcacccagaacctctagctggccgacacttcaatctggcccctctaggccgacgaagagttcagtcccaatgggcctccactaggggaggccataaggagcgccccacagtcatgctgtttccctttaggaatctcggctcaccaacccaggtcatatctaagcctgagagcaaggaagaacatgcgatatacacagcagacctagccatgggcacaagagcagcctccactgggaagtctaagagtccatgccagaccctggggggaagggctctgaaggagaacccagttgacttgcctgccacagagcaaaaggagtgagtggaacagagttgcttcttactaggagcacattctttgcctgccttcccttcatcctatcctctttgcttgctctcacctcaggaattgcttggattgctacatggaccccctgagactatcattattacctcctagggccaggaagccaggtaggtagtctgagtcaggattggatcaacagcctcctctcttggggactctcaagagcctgtgttcatctagaagtagtagtttgattctggtttccctcctacagtgtgtcctccgtctctgtgcagctccgtcattaccataggggacttggttttagactctgatgaggaagaaaatggccagggggaaggaaaggtgagtgggaaggagcagaaagctgggaaaggggatgggtagaacaagactgagaaatccacatgcttcagaattcagagggttcagggaatggtttcggatagtaggctctccctgctcccttctctacaggaatctctggaaaactatcagaagacaaagtttgacaccttgatacccactctctgtgaatacctacccccttctggccacggtgccatacctgtttcttcctgtgactgtagagacagttctagacctttgtgatagaactaaaatgctctctgtactctagtctcctgcctcctcagctctgcaagtagtttagtaggaatgaagtggaagtccaggcttggattgcctaactacactgctaaaaata

SEQ ID NO: 190143 - DNA, 637 bp, Homo sapiens
  Payload ID: 17544
  Gene Symbol: TINF2
  Gene Name: TERF1 (TRF1)-interacting nuclear factor 2
  ENST ID: ENST00000560019
  CDS Start-End: 1-258
gggggaagggctctgaaggagaacccagttgacttgcctgccacagagcaaaaggagaattgcttggattgctacatggaccccctgagactatcattattacctcctagggccaggaagccagtgtgtcctccgtctctgtgcagctccgtcattaccataggggacttggttttagactctgatgaggaagaaaatggccagggggaaggaaaggtgagtgggaaggagcagaaagctgggaaaggggatgggtagaacaagactgagaaatccacatgcttcagaattcagagggttcagggaatggtttcggatagtaggctctccctgctcccttctctacaggaatctctggaaaactatcagaagacaaagtttgacaccttgatacccactctctgtgaatacctacccccttctggccacggtgccatacctgtttcttcctgtgactgtagagacagttctagacctttgtgatagaactaaaatgctctctgtactctagtctcctgcctcctcagctctgcaagtagtttagtaggaatgaagtggaagtccaggcttggattgcctaactacactgctaaaaatatttgtaatccttaataattaaactttggatttgttaaaa

SEQ ID NO: 190144 - DNA, 499 bp, Homo sapiens
  Payload ID: 17544
  Gene Symbol: TINF2
  Gene Name: TERF1 (TRF1)-interacting nuclear factor 2
  ENST ID: ENST00000557921
  CDS Start-End: 227-499
ggtcagcttctccactcaggctcctccagcccgagccagaagaccccctcccccagaattctgggggccgatggaagggagccgagtcagatcgcgaggtacccagagccgacagaccggagcgacagggagttgccagaagccccgcccctaggagtgatcggaaagcctcacccatccgggtgaggaacccggagggaccgcctccgggcggagcccgccgaccatggctacgcccctggtggcgggtcccgcagctctacgcttcgccgccgcggctagctggcaggttgtgcgcggacgctgcgtggaacattttccgcgagtactggagtttctgcgatctctgcgcgctgttgcccctggcttggttcgctaccggcaccacgaacgcctttgtatgggcctaaaggccaagacaaagcaggatctgaggaagattttggaggcacaggaaactttttaccagcaggtgaagcagctgtcagaggctcctgtg

SEQ ID NO: 190145 - DNA, 885 bp, Homo sapiens
  Payload ID: 17544
  Gene Symbol: TINF2
  Gene Name: TERF1 (TRF1)-interacting nuclear factor 2
  ENST ID: ENST00000559019
  CDS Start-End: 301-516
gccggaagtgaggcaccctcgggctcgagacagcggcgacgtttaaagctgagcgacccagtgccactggagacggtcagcttctccactcaggctcctccagcccgagccagaagaccccctcccccagaattctgggggccgatggaagggagccgagtcagatcgcgaggtacccagagccgacagaccggagcgacagggagttgccagaagccccgcccctaggagtgatcggaaagcctcacccatccgggtgaggaacccggagggaccgcctccgggcggagcccgccgaccatggctacgcccctggtggcgggtcccgcagctctacgcttcgccgccgcggctagctggcaggttgtgcgcggacgctgcgtggaacattttccgcgagtactggagtttctgcgatctctgcgcgctgttgcccctggcttggttcgctaccggcaccacgaacgcctttgtatgggcctaaaggccaagagtgctctgttactgactcagtgaacctggctgagcccatggaacagaatcctcctcagcaacaaagactagcactccacaatcccctgccaaaagccaagcctggcacacatcttcctcagggaccatcttcaaggacgcacccagaacctctagctggccgacacttcaatctggcccctctaggccgacgaagagttcagtcccaatgggcctccactaggggaggccataaggagcgccccacagtcatgctgtttccctttaggaatctcggctcaccaacccaggtcatatctaagcctgagagcaaggaagaacatgcgatatacacagcagacctagccatgggcacaagagcagcctccactgggaagtctaagagtccatgcc

SEQ ID NO: 190146 - DNA, 1643 bp, Homo sapiens
  Payload ID: 17544
  Gene Symbol: TINF2
  Gene Name: TERF1 (TRF1)-interacting nuclear factor 2
  ENST ID: ENST00000626689
  CDS Start-End: 343-765
ctcttaccgcccttttccggggcaagggaagctagtagcggagccggaagtgaggcaccctcgggctcgagacagcggcgacgtttaaagctgagcgacccagtgccactggagacggtcagcttctccactcaggctcctccagcccgagccagaagaccccctcccccagaattctgggggccgatggaagggagccgagtcagatcgcgaggtacccagagccgacagaccggagcgacagggagttgccagaagccccgcccctaggagtgatcggaaagcctcacccatccgggtgaggaacccggagggaccgcctccgggcggagcccgccgaccatggctacgcccctggtggcgggtcccgcagctctacgcttcgccgccgcggctagctggcaggttgtgcgcggacgctgcgtggaacattttccgcgagtactggagtttctgcgatctctgcgcgctgttgcccctggcttggttcgctaccggcaccacgaacgcctttgtatgggcctaaaggccaaggtggtggtggagctgatcctgcagggccggccttgggcccaagtcctgaaagccctgaatcaccactttccagaatctggacctatagtgcgggatcccaaggctacaaagcaggatctgaggaagattttggaggcacaggaaactttttaccagcaggtgaagcagctgtcagaggctcctgtggatttggcctcgaagctgcagagtgctctgttactgactcagtgaacctggctgagcccatggaacagaatcctcctcagcaacaaagactagcactccacaatcccctgccaaaagccaagcctggcacacatcttcctcagggaccatcttcaaggacgcacccagaacctctagctggccgacacttcaatctggcccctctaggccgacgaagagttcagtcccaatgggcctccactaggggaggccataaggagcgccccacagtcatgctgtttccctttaggaatctcggctcaccaacccaggtcatatctaagcctgagagcaaggaagaacatgcgatatacacagcagacctagccatgggcacaagagcagcctccactgggaagtctaagagtccatgccagaccctggggggaagggctctgaaggagaacccagttgacttgcctgccacagagcaaaaggagaattgcttggattgctacatggaccccctgagactatcattattacctcctagggccaggaagccagtgtgtcctccgtctctgtgcagctccgtcattaccataggggacttggttttagactctgatgaggaagaaaatggccagggggaaggaaaggaatctctggaaaactatcagaagacaaagtttgacaccttgatacccactctctgtgaatacctacccccttctggccacggtgccatacctgtttcttcctgtgactgtagagacagttctagacctttgtgatagaactaaaatgctctctgtactctagtctcctgcctcctcagctctgcaagtagtttagtaggaatgaagtggaagtccaggcttggattgcctaactacactgctaaaaatatttgtaatccttaataattaaactttggatttgtt

SEQ ID NO: 190147 - DNA, 533 bp, Homo sapiens
  Payload ID: 17545
  Gene Symbol: TUT1
  Gene Name: terminal uridylyl transferase 1, U6 snRNA-specific
  ENST ID: ENST00000278279
  CDS Start-End: 39-533
agaggtgcttgtgtttttgtcggtacaggagagtcgctatggcggcggtggattcggatgtcgaatcgctgccgcgtggggggttccgctgctgcctctgccacgttactacagccaaccgacccagccttgatgcccacttgggaggcagaaagcaccggcacctggtagaactacgagctgcgagaaaggcccagggacttcgaagtgtgtttgtcagtggctttcccagggatgtggattctgctcagctctctgagtacttcctagcatttggacctgtggccagtgttgtcatggacaaggacaagccagtcccaaaggctccagaatctccatcgctggactcggccctggcttccccactggaccctcaagccctggcctgcaccccagcttcccctccagattcacaacctcctgcttctccccaggattctgaagccctggactttgaaaccccttcctcctccctggcgccccaaactccggactctgccttggcctccgagacccttgcttctccccagtct

SEQ ID NO: 190148 - DNA, 2826 bp, Homo sapiens
  Payload ID: 17545
  Gene Symbol: TUT1
  Gene Name: terminal uridylyl transferase 1, U6 snRNA-specific
  ENST ID: ENST00000308436
  CDS Start-End: 39-2777
gtttccggaggagtgtgtccgcgcaattgaacgactttatgtcacttcctatcggatcggcggaagttgcttccgagcgcgttgagctttggcgaagtgggttccggtggtggcagaggtgcttgtgtttttgtcggtacaggagagtcgctatggcggcggtggattcggatgtcgaatcgctgccgcgtggggggttccgctgctgcctctgccacgttactacagccaaccgacccagccttgatgcccacttgggaggcagaaagcaccggcacctggtagaactacgagctgcgagaaaggcccagggacttcgaagtgtgtttgtcagtggctttcccagggatgtggattctgctcagctctctgagtacttcctagcatttggacctgtggccagtgttgtcatggacaaggacaagggagtgtttgccattgtggagatgggggacgtgggtgctcgagaggctgtcttgtcacagtcccagcacagcctgggaggacatcgcctgcgtgtccgcccacgggagcagaaggagttccagagcccggcctccaaatcccccaaaggagcggcccccgacagtcaccagctggccaaagcgctagctgaggctgcagacgtgggggcacaaatgataaagcttgtggggctgagggagttgtccgaggccgagcggcagcttcgcagcctagtggtggccctgatgcaggaggtcttcacagagttcttccctggctgtgtggtccacccttttggctcttccataaatagcttcgatgtccatggctgtgatcttgacctcttcttggatctgggtgacttggaagagccccagccagtcccaaaggctccagaatctccatcgctggactcggccctggcttccccactggaccctcaagccctggcctgcaccccagcttcccctccagattcacaacctcctgcttctccccaggattctgaagccctggactttgaaaccccttcctcctccctggcgccccaaactccggactctgccttggcctccgagacccttgcttctccccagtctctgcctccagcttcaccactgctagaggacagggaagagggggacctggggaaggcctcggaactagcagagaccccaaaggaggagaaagcagagggggcagcaatgctggagctggtgggatccattctccggggctgtgtccctggggtgtatcgagtccaaactgtgccctctgcccggcgccctgtggtcaagttctgtcatcggccttcaggtctccacggtgatgtctccctcagtaaccggctggccctgcataactcccgtttcctgagtctctgctctgagctggatggtcgagtccggcccctcgtgtacaccctccgctgctgggctcagggtcgggggctgtcagggagtggcccccttctcagtaactacgccctgaccttgctggtgatctattttcttcagaccagggaccctcctgtgttgcccactgtgtcccagctcacccagaaagcaggagagggggaacaggtggaagtcgatggctgggactgcagtttccccagggatgcctcaagactggagcccagcataaatgtggagcccctcagttccctgctagcccagttcttctcctgtgtatcttgttgggatcttcgtggctccctgctgtccctgcgggagggtcaggcactgcctgtggcagggggcctgccttctaatctctgggagggtctgcgccttggccccctgaatctccaggacccttttgacctgagtcacaatgtcgcagccaatgtgaccagccgggtggctgggcgcctacagaactgctgccgagcagcagccaattactgccgaagcctccagtaccagcgccgttcctcccggggtcgggactgggggctgctccctcttctgcagcccagctcccccagctccctgctctctgctacgccgatccctttaccccttgcacccttcacccagctcactgctgccctggtgcaggtattcagggaagcactggggtgccatatagaacaggcaaccaagagaacgcggtcagaaggaggtggaactggggagtcctctcagggagggacaagcaaaagactcaaagtagatggacagaaaaactgctgtgaggaggggaaagaggagcagcagggatgtgcaggggacggtggggaagacagggtagaagagatggttatagaggttggagagatggtgcaggactgggccatgcagagccctgggcagccaggggacctgcccctgaccactggaaagcatggagcccctggagaagaggggcagcccagccacgcagccctggcagagcgggggcccaagggacatgaggcagcccaagaatggtctcagggtgaggcagggaagggggcatccctgccctcctcagcgagctggcgctgtgccttgtggcaccgagtgtggcaagggcggcggcgagcccgtagacgcttgcagcagcaaaccaaggagggagctggaggtggcgctggcacaagagcagggtggctggcgactgaggctcaggtcacccaggagctgaaaggactgagtggtggcgaagagaggccagaaactgagcccctgctgagctttgtggcgtctgtctccccggctgaccgaatgctcactgtgaccccgctccaggatccccaaggcctgttccctgatctccatcatttcttacaggttttcctccctcaagcaattcgacatctcaagtgaagacatggcccctgaagggcaataaagctgctagtttattaatacagtc

SEQ ID NO: 190149 - DNA, 3363 bp, Homo sapiens
  Payload ID: 17545
  Gene Symbol: TUT1
  Gene Name: terminal uridylyl transferase 1, U6 snRNA-specific
  Uniprot ID: Q9H6E5
  ENST ID: ENST00000476907
  CDS Start-End: 693-3317
gaggtgcgccagtagctctggcgcctccggcgtacaccacgcagcccactactgcggaaggaatgggcctggctccaggacctcgtggagtccggaaggtgcccggtggtggcagagctccccaaccagggctagaagccgtcgcagaacacccgttttgcgggaggacagggggcggagggagggagtaacagccctgaaaaggttggaagtccagggacagccctgggctccgtggggcaaagaattggaagccgccgatcctccgcctttattcgtcgggtaaataagggtcgagggtacagacgcacgggtgtctactgcggggtgaaggagctgccgcaagatgccacccggcgccggcctttgtggctgctgtcatgaatattcacgatgctttgggccaatcaacgtctgaacagcttaaagcacaccaatcggcttaccgcatgcagataagcatcgtaacgcgccgcttttcctgaaacgggcggggactggacagcggctagaaacggaacccagagtcgaaggagcttggtttccggaggagtgtgtccgcgcaattgaacgactttatgtcacttcctatcggatcggcggaagttgcttccgagcgcgttgagctttggcgaagtgggttccggtggtggcagaggtgcttgtgtttttgtcggtacaggagagtcgctatggcggcggtggattcggatgtcgaatcgctgccgcgtggggggttccgctgctgcctctgccacgttactacagccaaccgacccagccttgatgcccacttgggaggcagaaagcaccggcacctggtagaactacgagctgcgagaaaggcccagggacttcgaagtgtgtttgtcagtggctttcccagggatgtggattctgctcagctctctgagtacttcctagcatttggacctgtggccagtgttgtcatggacaaggacaagggagtgtttgccattgtggagatgggggacgtgggtgctcgagaggctgtcttgtcacagtcccagcacagcctgggaggacatcgcctgcgtgtccgcccacgggagcagaaggagttccagagcccggcctccaaatcccccaaaggagcggcccccgacagtcaccagctggccaaagcgctagctgaggctgcagacgtgggggcacaaatgataaagcttgtggggctgagggagttgtccgaggccgagcggcagcttcgcagcctagtggtggccctgatgcaggaggtcttcacagagttcttccctggctgtgtggtccacccttttggctcttccataaatagcttcgatgtccatggctgtgatcttgacctcttcttggatctgggtgacttggaagagccccagccagtcccaaaggctccagaatctccatcgctggactcggccctggcttccccactggaccctcaagccctggcctgcaccccagcttcccctccagattcacaacctcctgcttctccccaggattctgaagccctggactttgaaaccccttcctcctccctggcgccccaaactccggactctgccttggcctccgagacccttgcttctccccagtctctgcctccagcttcaccactgctagaggacagggaagagggggacctggggaaggcctcggaactagcagagaccccaaaggaggagaaagcagagggggcagcaatgctggagctggtgggatccattctccggggctgtgtccctggggtgtatcgagtccaaactgtgccctctgcccggcgccctgtggtcaagttctgtcatcggccttcaggtctccacggtgatgtctccctcagtaaccggctggccctgcataactcccgtttcctgagtctctgctctgagctggatggtcgagtccggcccctcgtgtacaccctccgctgctgggctcagggtcgggggctgtcagggagtggcccccttctcagtaactacgccctgaccttgctggtgatctattttcttcagaccagggaccctcctgtgttgcccactgtgtcccagctcacccagaaagcaggagagggggaacaggtggaagtcgatggctgggactgcagtttccccagggatgcctcaagactggagcccagcataaatgtggagcccctcagttccctgctagcccagttcttctcctgtgtatcttgttgggatcttcgtggctccctgctgtccctgcgggagggtcaggcactgcctgtggcagggggcctgccttctaatctctgggagggtctgcgccttggccccctgaatctccaggacccttttgacctgagtcacaatgtcgcagccaatgtgaccagccgggtggctgggcgcctacagaactgctgccgagcagcagccaattactgccgaagcctccagtaccagcgccgttcctcccggggtcgggactgggggctgctccctcttctgcagcccagctcccccagctccctgctctctgctacgccgatccctttaccccttgcacccttcacccagctcactgctgccctggtgcaggtattcagggaagcactggggtgccatatagaacaggcaaccaagagaacgcggtcagaaggaggtggaactggggagtcctctcagggagggacaagcaaaagactcaaagtagatggacagaaaaactgctgtgaggaggggaaagaggagcagcagggatgtgcaggggacggtggggaagacagggtagaagagatggttatagaggttggagagatggtgcaggactgggccatgcagagccctgggcagccaggggacctgcccctgaccactggaaagcatggagcccctggagaagaggggcagcccagccacgcagccctggcagagcgggggcccaagggacatgaggcagcccaagaatggtctcagggtgaggcagggaagggggcatccctgccctcctcagcgagctggcgctgtgccttgtggcaccgagtgtggcaagggcggcggcgagcccgtagacgcttgcagcagcaaaccaaggagggagctggaggtggcgctggcacaagagcagggtggctggcgactgaggctcaggtcacccaggagctgaaaggactgagtggtggcgaagagaggccagaaactgagcccctgctgagctttgtggcgtctgtctccccggctgaccgaatgctcactgtgaccccgctccaggatccccaaggcctgttccctgatctccatcatttcttacaggttttcctccctcaagcaattcgacatctcaagtgaagacatggcccctgaagggcaataaagctgctagtttattaataca

SEQ ID NO: 190150 - DNA, 643 bp, Homo sapiens
  Payload ID: 17545
  Gene Symbol: TUT1
  Gene Name: terminal uridylyl transferase 1, U6 snRNA-specific
  ENST ID: ENST00000478537
  CDS Start-End: 39-341
agaggtgcttgtgtttttgtcggtacaggagagtcgctatggcggcggtggattcggatgtcgaatcgctgccgcgtggggggttccgctgctgcctctgccacgttactacagccaaccgacccagccttgatgcccacttgggaggcagaaagcaccggcacctggtagaactacgagctgcgagaaaggcccagggacttcgaagtgtgtttgtcagtggctttcccagggatgtggattctgctcagctctctgagtacttcctagcatttggacctgtggccagtgttgtcatggacaaggacaagggtctcgctgtctctcaggctggtgtgtagtggtgcaatcacaatcacagctcactgcagcctcaacatcctgggcccaagtgatgctcttatcatagcctcccaagtaattggaactacagggagtgtttgccattgtggagatgggggacgtgggtgctcgagaggctgtcttgtcacagtcccagcacagcctgggaggacatcgcctgcgtgtccgcccacgggagcagaaggagttccagagcccggcctccaaatcccccaaaggagcggcccccgacagtcaccagctggccaaagcgctagctgaggctgcagacgtgggggca

SEQ ID NO: 190151 - DNA, 699 bp, Homo sapiens
  Payload ID: 17545
  Gene Symbol: TUT1
  Gene Name: terminal uridylyl transferase 1, U6 snRNA-specific
  ENST ID: ENST00000494385
  CDS Start-End: 270-699
attgaacgactttatgtcacttcctatcggatcggcggaagttgcttccgagcgcgttgagctttggcgaagtgggttccggtggtggcagaggacccagccttgatgcccacttgggaggcagaaagcaccggcacctggtagaactacgagctgcgagaaaggcccagggacttcgaagtgtgtttgtcagtggctttcccagggatgtggattctgctcagctctctgagtacttcctagcatttggacctgtggccagtgttgtcatggacaaggacaagggagtgtttgccattgtggagatgggggacgtgggtgctcgagaggctgtcttgtcacagtcccagcacagcctgggaggacatcgcctgcgtgtccgcccacgggagcagaaggagttccagagcccggcctccaaatcccccaaaggagcggcccccgacagtcaccagctggccaaagcgctagctgaggctgcagacgtgggggcacaaatgataaagcttgtggggctgagggagttgtccgaggccgagcggcagcttcgcagcctagtggtggccctgatgcaggaggtcttcacagagttcttccctggctgtgtggtccacccttttggctcttccataaatagcttcgatgtccatggctgtgatcttgacctcttcttggatctgggtgacttggaagagcccc

SEQ ID NO: 190152 - DNA, 1041 bp, Homo sapiens
  Payload ID: 17546
  Gene Symbol: TESC
  Gene Name: tescalcin
  Uniprot ID: Q96BS2
  ENST ID: ENST00000335209
  CDS Start-End: 188-832
accgcggcgcgccgccctccgccgttatatgaggccccgctccggccccacgcggaacccgcggctccgagccttcgccggcgtcccgacccgaggccggacccgaggccagtcccgccgctgcgcagccgaagccagtgcggggcctgagagggacgcgcgccccggggcccccgccgcgggcaccatgggcgctgcccactccgcgtctgaggaggtgcgggagctcgagggcaagaccggcttctcatcggatcagatcgagcagctccatcggagatttaagcagctgagtggagatcagcctaccattcgcaaggagaacttcaacaatgtcccggacctggagctcaaccccatccgatccaaaattgttcgtgccttcttcgacaacaggaacctgcgcaagggacccagtggcctggctgatgagatcaatttcgaggacttcctgaccatcatgtcctacttccggcccatcgacaccaccatggacgaggaacaggtggagctgtcccggaaggagaagctgagatttctgttccacatgtacgactcggacagcgacggccgcatcactctggaagaatatcgaaatgtggtcgaggagctgctgtcgggaaaccctcacatcgagaaggagtccgctcgctccatcgccgacggggccatgatggaggcggccagcgtgtgcatggggcagatggagcctgatcaggtgtacgaggggatcaccttcgaggacttcctgaagatctggcaggggatcgacattgagaccaagatgcacgtccgcttccttaacatggaaaccatggccctctgccactgacccaccgccacctccgcggagaaactgcactttgcaatggggccgcctccccgcgtagctggagcagcccaggcccggcggacagcctcttcctgcagcgccggtacatagccaaggctcgtctgcgcaccttgtgtcttgtagggtatggtatgtgggacttcgctgtttttatctccaataaaaaaaaaaaaaaggtttgttaatta

SEQ ID NO: 190153 - DNA, 854 bp, Homo sapiens
  Payload ID: 17546
  Gene Symbol: TESC
  Gene Name: tescalcin
  ENST ID: ENST00000462502
  CDS Start-End: 127-534
cggctccgagccttcgccggcgtcccgacccgaggccggacccgaggccagtcccgccgctgcgcagccgaagccagtgcggggcctgagagggacgcgcgccccggggcccccgccgcgggcaccatgggcgctgcccactccgcgtctgaggaggtgcgggagctcgagggcaagaccggcttctcatcggatcagatcgagcagctccatcggagatttaagcagctgagtggagatcagcctaccattcgcaaggagaacttcaacaatgtcccggacctggagctcaaccccatccgatccaaaattgttcgtgccttcttcgacaacaggaacctgcgcaagggacccagtggcctggctgatgagatcaatttcgaggacttcctgaccatcatgtcctacttccggcccatcgacaccaccatggacgaggaacaggtggagctgtcccggaaggagaagctgagatcttgtggcttcctgggactagaagggggttgtgcggtggatgtgaaacaaggcccttgatgcaaagacctgggttccagtgtggcccgtctcaccagccatgtgaccttgaaccttgacccagaacgtggttctgttccacatgtacgactcggacagcgacggccgcatcactctggaagaatatcgaaatgtggtcgaggagctgctgtcgggaaaccctcacatcgagaaggagtccgctcgctccatcgccgacggggccatgatggaggcggccagcgtgtgcatggggcagatggtgagcgcccctgcagccctcccgagacgcgcagtgcctttcccgcttatggtctgcgtttctggaaggcctcatgggg

SEQ ID NO: 190154 - DNA, 1057 bp, Homo sapiens
  Payload ID: 17546
  Gene Symbol: TESC
  Gene Name: tescalcin
  Uniprot ID: Q96BS2
  ENST ID: ENST00000470612
  CDS Start-End: 198-689
gtgcgctaggaccgcggcgcgccgccctccgccgttatatgaggccccgctccggccccacgcggaacccgcggctccgagccttcgccggcgtcccgacccgaggccggacccgaggccagtcccgccgctgcgcagccgaagccagtgcggggcctgagagggacgcgcgccccggggcccccgccgcgggcaccatgggcgctgcccactccgcgtctgaggaggtgcgggagctcgagggcaagaccggcttctcatcggatcagatcgagcagctccatcggagatttaagcagctgagtggagatcagcctaccattcgcaaggagaacttcaacaatgtcccggacctggagctcaaccccatccgatccaaaattgttcgtgccttcttcgacaacaggaacctgcgcaagggacccagtggcctggctgatgagatcaatttcgaggacttcctgaccatcatgtcctacttccggcccatcgacaccaccatggacgaggaacaggtggagctgtcccggaaggagaagctgagatttctgttccacatgtacgactcggacagcgacggccgcatcactctggaagaatatcgaaatgtaaagtggtcgaggagctgctgtcgggaaaccctcacatcgagaaggagtccgctcgctccatcgccgacggggccatgatggaggcggccagcgtgtgcatggggcagatggagcctgatcaggtgtacgaggggatcaccttcgaggacttcctgaagatctggcaggggatcgacattgagaccaagatgcacgtccgcttccttaacatggaaaccatggccctctgccactgacccaccgccacctccgcggagaaactgcactttgcaatggggccgcctccccgcgtagctggagcagcccaggcccggcggacagcctcttcctgcagcgccggtacatagccaaggctcgtctgcgcaccttgtgtcttgtagggtatggtatgtgggacttcgctgtttttatctccaataaaaaaaaaaaaaaggtttgttaattaa

SEQ ID NO: 190155 - DNA, 936 bp, Homo sapiens
  Payload ID: 17546
  Gene Symbol: TESC
  Gene Name: tescalcin
  Uniprot ID: Q96BS2
  ENST ID: ENST00000541210
  CDS Start-End: 165-728
gttatatgaggccccgctccggccccacgcggaacccgcggctccgagccttcgccggcgtcccgacccgaggccggacccgaggccagtcccgccgctgcgcagccgaagccagtgcggggcctgagagggacgcgcgccccggggcccccgccgcgggcaccatgggcgctgcccactccgcgtctgaggaggtgcgggagctcgagggcaagaccggcttctcatcggatcagatcgagcagctccatcggagatttaagcagctgagtggagatcagcctaccattcggaacctgcgcaagggacccagtggcctggctgatgagatcaatttcgaggacttcctgaccatcatgtcctacttccggcccatcgacaccaccatggacgaggaacaggtggagctgtcccggaaggagaagctgagatttctgttccacatgtacgactcggacagcgacggccgcatcactctggaagaatatcgaaatgtggtcgaggagctgctgtcgggaaaccctcacatcgagaaggagtccgctcgctccatcgccgacggggccatgatggaggcggccagcgtgtgcatggggcagatggagcctgatcaggtgtacgaggggatcaccttcgaggacttcctgaagatctggcaggggatcgacattgagaccaagatgcacgtccgcttccttaacatggaaaccatggccctctgccactgacccaccgccacctccgcggagaaactgcactttgcaatggggccgcctccccgcgtagctggagcagcccaggcccggcggacagcctcttcctgcagcgccggtacatagccaaggctcgtctgcgcaccttgtgtcttgtagggtatggtatgtgggacttcgctgtttttatctccaataaaaaaaaaaaaaaggtttgttaatt

SEQ ID NO: 190156 - DNA, 422 bp, Homo sapiens
  Payload ID: 17546
  Gene Symbol: TESC
  Gene Name: tescalcin
  ENST ID: ENST00000549210
  CDS Start-End: 1-246
ccacatgtacgactcggacagcgacggccgcatcactctggaagaatatcgaaatgtaaagtggtcgaggagctgctgtcgggaaaccctcacatcgagaaggagtccgctcgctccatcgccgacggggccatgatggaggcggccagcgtgtgcatggggcagatgatctggcaggggatcgacattgagaccaagatgcacgtccgcttccttaacatggaaaccatggccctctgccactgacccaccgccacctccgcggagaaactgcactttgcaatggggccgcctccccgcgtagctggagcagcccaggcccggcggacagcctcttcctgcagcgccggtacatagccaaggctcgtctgcgcaccttgtgtcttgtagggtatggtatgtgggacttcgctgtttttatc

SEQ ID NO: 190157 - DNA, 2782 bp, Homo sapiens
  Payload ID: 17547
  Gene Symbol: TES
  Gene Name: testin LIM domain protein
  Uniprot ID: Q9UGI8
  ENST ID: ENST00000358204
  CDS Start-End: 216-1481
attggctgcccggccccctttgttcccgggtccgggccgcaggcccgctgcggcggactgggcggcggaagttcgacggcgccgggcgagtggctgttgagcggcgccgcgggagttccgcaggtttcccgtgttcgcagcggagccggaggccagctgaacccggccgtgggatcccggataggaggaggaggggacccataggacgcgttaacatggacctggaaaacaaagtgaagaagatgggcttaggtcacgagcaaggatttggagccccttgtttaaaatgcaaagaaaaatgtgaaggattcgaactgcacttctggagaaaaatatgtcgtaactgcaagtgtggccaagaagagcatgatgtcctcttgagcaatgaagaggatcgaaaagtgggaaaactttttgaagacaccaagtataccactctgattgcaaaactaaagtcagatggaattcccatgtataaacgcaatgttatgatattgacgaatccagttgctgccaagaagaatgtctccatcaatacagttacctatgagtgggctcctcctgtccagaatcaagcattggccaggcagtacatgcagatgctacccaaggaaaagcagccagtagcaggctcagagggggcacagtaccggaagaagcagctggcaaagcagctccctgcacatgaccaggacccttcaaagtgccatgagttgtctcccagagaggtgaaggagatggagcagtttgtgaagaaatataagagcgaagctctgggagtaggagatgtcaaacttccctgtgagatggatgcccaaggccccaaacaaatgaacattcctggaggggatagaagcaccccagcagcagtgggggccatggaggacaaatctgctgagcacaaaagaactcaatattcctgctattgctgcaaactgagtatgaaagaaggtgacccagccatctatgccgaaagggctggctatgataaactgtggcacccagcttgttttgtctgcagcacctgccatgaactcctggttgacatgatttatttttggaagaatgagaagctatactgtggcagacattactgtgacagcgagaaaccccgatgtgctggctgtgacgagctgatattcagcaatgagtatacccaggcagaaaaccagaattggcacctgaaacacttctgctgctttgactgtgatagcattctagctggggagatatacgtgatggtcaatgacaagcccgtgtgcaagccctgctatgtgaagaatcacgctgtggtgtgtcaaggatgccacaatgccatcgacccagaagtgcagcgggtgacctataacaatttcagctggcatgcatccacagagtgctttctgtgctcttgctgcagcaaatgcctcattgggcagaagttcatgccagtagaagggatggttttctgttcagtggaatgtaagaagaggatgtcttaggaggagggcacccagaagtatcgagccatagctatccaaagtggtctgcatttctactgtaaaatgcaatttgaaaaaaataaaacgcaaaaaaagaaactgtaaaggaaaccaagagattttgtttaatttttttggccattttttcttcatcaattttttttcggtctcaacttttaaacttggtttaagcatttgatttgtaaaacagtaaataattgtatctttccatagcttttcaaatgtgaaatcatttttggaagcttggatctcattaaacttcatgtctctattccatttgtgccacacacttaaaagttagtgtactgaatggaaagatgagcattcctagttctacacttcttttttccccctcatgtgtaaaatgaaaagaaaactaaatttgccctaataccaaggcgctacgtttattgcctcgtcttattcactgacctttgtaatgatacacagtgaattctttttgacaaagagaaatgcagtgtagtatgcagagctgctgttttaatgcctatgcatttactctttcctgatttaggcagaggtggcattttctttattgcatttctctatttttttaatgtaccctaccttcagtattctctttgtaagttggtgacttgcatctgtggccttgaatattttattatcacatgtggcataacagtatccacactttttagttctttatttttttttttttattttgagcaattctcctgcctcagcctcccaaatagctgggattacaggtgcatgccaccacacccagctaatttttgtatttttagtagagacaggttttcaccatgttagccaggctggtctcaaactcctgacctcagatgatccgcctgccttggcctcccaaagtgctgggattacaggtgtgggagccaccatgcctgacccacacactttttacttgtatagatgatttttggcttggacataaaagccaagccacccatttgcttttaatccaaagaacatgtatagtttttgtacccagagactatgatttatattgattgcacttgcctgccatgatttagataagattttttttgcatggtttttattctttcctaatggatcctgttttataatacttccaagcctgtccatggatatatcaaatgtcttcacttgtatattttcatggctaggtatttctaatgtttattcttccctgtgtacttctacacatagctatgcactatgaaaattaaatggaatgaatgatatgtatattactcaaaataaagtttctttcactttaa

SEQ ID NO: 190158 - DNA, 2763 bp, Homo sapiens
  Payload ID: 17547
  Gene Symbol: TES
  Gene Name: testin LIM domain protein
  Uniprot ID: Q9UGI8
  ENST ID: ENST00000393481
  CDS Start-End: 224-1462
aataaataggaggttttgagggctgtttatgagcgcattccattacagtgtctttcagcggagccagagctcagccaatcctaattaagaagcaatttcagctgcagtcattgcttattataataattgtgacatttttatagccctacattgtctttctcaaagtaacggattcaggaggagtccttttctgagtagagtccacagaagaggtattctattgatgggcttaggtcacgagcaaggatttggagccccttgtttaaaatgcaaagaaaaatgtgaaggattcgaactgcacttctggagaaaaatatgtcgtaactgcaagtgtggccaagaagagcatgatgtcctcttgagcaatgaagaggatcgaaaagtgggaaaactttttgaagacaccaagtataccactctgattgcaaaactaaagtcagatggaattcccatgtataaacgcaatgttatgatattgacgaatccagttgctgccaagaagaatgtctccatcaatacagttacctatgagtgggctcctcctgtccagaatcaagcattggccaggcagtacatgcagatgctacccaaggaaaagcagccagtagcaggctcagagggggcacagtaccggaagaagcagctggcaaagcagctccctgcacatgaccaggacccttcaaagtgccatgagttgtctcccagagaggtgaaggagatggagcagtttgtgaagaaatataagagcgaagctctgggagtaggagatgtcaaacttccctgtgagatggatgcccaaggccccaaacaaatgaacattcctggaggggatagaagcaccccagcagcagtgggggccatggaggacaaatctgctgagcacaaaagaactcaatattcctgctattgctgcaaactgagtatgaaagaaggtgacccagccatctatgccgaaagggctggctatgataaactgtggcacccagcttgttttgtctgcagcacctgccatgaactcctggttgacatgatttatttttggaagaatgagaagctatactgtggcagacattactgtgacagcgagaaaccccgatgtgctggctgtgacgagctgatattcagcaatgagtatacccaggcagaaaaccagaattggcacctgaaacacttctgctgctttgactgtgatagcattctagctggggagatatacgtgatggtcaatgacaagcccgtgtgcaagccctgctatgtgaagaatcacgctgtggtgtgtcaaggatgccacaatgccatcgacccagaagtgcagcgggtgacctataacaatttcagctggcatgcatccacagagtgctttctgtgctcttgctgcagcaaatgcctcattgggcagaagttcatgccagtagaagggatggttttctgttcagtggaatgtaagaagaggatgtcttaggaggagggcacccagaagtatcgagccatagctatccaaagtggtctgcatttctactgtaaaatgcaatttgaaaaaaataaaacgcaaaaaaagaaactgtaaaggaaaccaagagattttgtttaatttttttggccattttttcttcatcaattttttttcggtctcaacttttaaacttggtttaagcatttgatttgtaaaacagtaaataattgtatctttccatagcttttcaaatgtgaaatcatttttggaagcttggatctcattaaacttcatgtctctattccatttgtgccacacacttaaaagttagtgtactgaatggaaagatgagcattcctagttctacacttcttttttccccctcatgtgtaaaatgaaaagaaaactaaatttgccctaataccaaggcgctacgtttattgcctcgtcttattcactgacctttgtaatgatacacagtgaattctttttgacaaagagaaatgcagtgtagtatgcagagctgctgttttaatgcctatgcatttactctttcctgatttaggcagaggtggcattttctttattgcatttctctatttttttaatgtaccctaccttcagtattctctttgtaagttggtgacttgcatctgtggccttgaatattttattatcacatgtggcataacagtatccacactttttagttctttatttttttttttttattttgagcaattctcctgcctcagcctcccaaatagctgggattacaggtgcatgccaccacacccagctaatttttgtatttttagtagagacaggttttcaccatgttagccaggctggtctcaaactcctgacctcagatgatccgcctgccttggcctcccaaagtgctgggattacaggtgtgggagccaccatgcctgacccacacactttttacttgtatagatgatttttggcttggacataaaagccaagccacccatttgcttttaatccaaagaacatgtatagtttttgtacccagagactatgatttatattgattgcacttgcctgccatgatttagataagattttttttgcatggtttttattctttcctaatggatcctgttttataatacttccaagcctgtccatggatatatcaaatgtcttcacttgtatattttcatggctaggtatttctaatgtttattcttccctgtgtacttctacacatagctatgcactatgaaaattaaatggaatgaatgatatgtatattactcaaaataaagtttctttcactttaa

SEQ ID NO: 190159 - DNA, 699 bp, Homo sapiens
  Payload ID: 17547
  Gene Symbol: TES
  Gene Name: testin LIM domain protein
  ENST ID: ENST00000393484
  CDS Start-End: 1-578
gcaccccagcagcagtgggggccatggaggacaaatctgctgagcacaaaagaactcaatattcctgctattgctgcaaactgagtatgaaagaaggtgacccagccatctatgccgaaagggctggctatgataaactgtggcacccagcttgttttgtctgcagcacctgccatgaactcctggttgacatgatttatttttggaagaatgagaagctatactgtggcagacattactgtgacagcgagaaaccccgatgtgctggctgtgacgagctgatattcagcaatgagtatacccaggcagaaaaccagaattggcacctgaaacacttctgctgctttgactgtgatagcattctagctggggagatatacgtgatggtcaatgacaagcccgtgtgcaagccctgctatgtgaagaatcacgctgtggtgagaagtgttctaaggatatggttgcctcagcctgctttaggacttgagtttatgcttttcttaaagcctcttacaaatgggaaacagaaagcagtcctcctaagtagaaagcaaattattcctaccacagggtgttaaaatcaaggcaattcaaaaacaatacatgcattgactatgagccacctcaagatttctacttgtgaaatttacaatatcaattataggtactgcttaataataaaatcctcacttaaaaaaa

SEQ ID NO: 190160 - DNA, 577 bp, Homo sapiens
  Payload ID: 17547
  Gene Symbol: TES
  Gene Name: testin LIM domain protein
  ENST ID: ENST00000455989
  CDS Start-End: 339-577
gctgcggcggactgggcggcggaagttcgacggcgccgggcgagtggctgttgagcggcgccgcgggagttccgcaggtttcccgtgttcgcagcggagccggaggccagctgaacccggccgtgggatcccggataggaggaggaggggacccataggacgcgttaacatggacctggaaaacaaagtgaagaagaaaaatatgtcgtaactgcaagtgtggccaagaagagcatgatgtcctcttgagcaatgaagaggatcgaaaagtgggaaaactttttgaagacaccaagtataccactctgattgcaaaactaaagtcagatggaattcccatgtataaacgcaatgttatgatattgacgaatccagttgctgccaagaagaatgtctccatcaatacagttacctatgagtgggctcctcctgtccagaatcaagcattggccaggcagtacatgcagatgctacccaaggaaaagcagccagtagcaggctcagagggggcacagtaccggaagaagcagctggcaaagcagctccctgcacatgaccaggacccttcaaagtgcca

SEQ ID NO: 190161 - DNA, 1022 bp, Homo sapiens
  Payload ID: 17547
  Gene Symbol: TES
  Gene Name: testin LIM domain protein
  ENST ID: ENST00000492891
  CDS Start-End: 160-294
actgggcggcggaagttcgacggcgccgggcgagtggctgttgagcggcgccgcgggagttccgcaggtttcccgtgttcgcagcggagccggaggccagctgaacccggccgtgggatcccggataggaggaggaggggacccataggacgcgttaacatggacctggaaaacaaagtgaagaagatgggcttaggtcacgagcaaggatttggagccccttgtttaaaatgcaaagaaaaatgtgaaggattcgaactgcacttctggagtcctgctattgctgcaaactgagtatgaaagaaggtgacccagccatctatgccgaaagggctggctatgataaactgtggcacccagcttgttttgtctgcagcacctgccatgaactcctggttgacatgatttatttttggaagaatgagaagctatactgtggcagacattactgtgacagcgagaaaccccgatgtgctggctgtgacgagctgatattcagcaatgagtatacccaggcagaaaaccagaattggcacctgaaacacttctgctgctttgactgtgatagcattctagctggggagatatacgtgatggtcaatgacaagcccgtgtgcaagccctgctatgtgaagaatcacgctgtggtgtgtcaaggatgccacaatgccatcgacccagaagtgcagcgggtgacctataacaatttcagctggcatgcatccacagagtgctttctgtgctcttgctgcagcaaatgcctcattgggcagaagttcatgccagtagaagggatggttttctgttcagtggaatgtaagaagaggatgtcttaggaggagggcacccagaagtatcgagccatagctatccaaagtggtctgcatttctactgtaaaatgcaatttgaaaaaaataaaacgcaaaaaaagaaactgtaaaggaaaccaagagattttgtttaatttttttggccattttttcttcatcaattttttttcggtctcaacttttaaacttgg

SEQ ID NO: 190162 - DNA, 5334 bp, Homo sapiens
  Payload ID: 17548
  Gene Symbol: TOPAZ1
  Gene Name: testis and ovary specific PAZ domain containing 1
  Uniprot ID: Q8N9V7
  ENST ID: ENST00000309765
  CDS Start-End: 169-5247
acttccgcttacgcgccccacttccgcttccggccccgggctgtggtgactggcggtgtggggtgggtcagagggcagtaggtacctccaggcgggagcagcgtttgcaccgcggtgggttcctgcgagctggtgcagaggggccccagcgggccggccccggggcacatgcgacgacctccacccctgggccccacgacggcctcagggcctgaaggcaatgtgcgaaacctgcagaagcggcaggcgccagggccaggcgcggcgggaggctgtggccctgaggccggggggtgccgggaaaataagcaaaagaggagaatggtggcccgggccacccctgggagaggcgaggtggaaagtgataagtcggttgcagcatcaggggctggaaaggccgcaaggcgtcaggtggaggggcgcaggggcccggtgagcccgtcagactcgtcagacccgcgaggcctagaagcagcaaaggaggctgaactccccttgcaaacggaaagacacaccaaggaaaaaagaaaagttactgaagcctcaagtgatgatccacagccagggcttgacttggtaagaaaggaatcattaaccagttcggaatctttccaaacagtggaatgcttgcagtctttgggtaaggaaagtataatagaaggtattaaaagaagaattcgaaataaaaaacttaaaagcttagaaaacccacctctcaaaataaccgaaaatgaggctacacaaaatattaaggttgaattccaagatgaactgtacaagaatactccaaaatattcttgtaatatcttgtcacctgaagtagaaaataattccgttttaaaattacgtgattgcaattgtttcccccattccaagggttgtaatgatgaaaacaacctgccatataaacctgatggtggatgtatgcatgtagcagaaaatttctcaaagaaagaaaaccttaggagtcttgcagagaagagtgacacaaatagtattcctcagctcttacaaacagaagaaaatgtaatgggagtaaataagttactaccagaagagagtgatttataccaaagtaaaaccaatggcttgctttcctgccttcaacatgaaaaaaataaatattcaatagaggagagcagtgttgggcgaaaacccaggaaaaggatgaagttgtctgaaaaagcagatgaaacagttactgagatgaacttctctaatgagtataacaagtctgagttgatgttgcaagaaaatcaaatgattgctgatggtaaagaagcagagactaaaagtcctttaaatgttttgagaaaagtaagccataatacagtctctttgatggatcatttattaagtgtcccagaaacagtagaaaaagaaacaagttctgaacatcatgtaaatgctgtgtttcagaaaaccattgaaccacttttgaaagaagaaacagagaatgcttcagagccgttaggttatgaaagcatggcatcgaaagaggattttaaatcgatgaaaagcttcatagggaaatcacctaatgagtaccatattgaaaggagatcttcacgggaagacttaagaagtgcatctgaagaattgaagttaagctgtcagagaacaatacctatgactggtaaaagaacttggccctattattcatgtgctagaatatctgcctggtgttggaaaaaggcttccttgccagaatcaagttactttcttcgtgggtctcaggaaagttgtaggcaagttgatgtccctaaacaccaaacaaaccagacccatttaactgactccaaattattattacaaagttccttaacagaaacaaacactgaatcttcaagtaaagaaaaattagattctaattctaattgtttgtcttcagtttctgcagtagaacctactttaatggttataaaggaacctataatcaaggatgataaaaagataaaatcagaggaactgagcagaagagggtcagaggtaatttctaacactactgaagatactcaattaaccagtgagactcaaagcttaacgggaaataaaaaaaaagctagaggaaatttaacgaaacttaatttgacagcgacttccaaagatggtcaggaagcaaataactctgcaggcaaaactattcatcgaaaagcatgcattgctcaacaaacatttatagttccagacttggttaaaatattgaacacaggacggctgactaattttaaaattcctttacttaagaataaatcagaaaaaagaaaagaagtaaatgccaagtcatcagagagagaagcttacagtcctctagaacttctggacaatttatctggagcagacgtaagacagaacaggagtaaagaaaatgtctccatgatgatgttaggacctcaaactttgagcatacgaaatagtgtaactccagtgcaagctagttctgactcattctacaataagaaatcctatagtatttctccaagctttacaaagcaaggtaacaatagcaaaccatctaatcacgtctctgaaccaggcaatattgtttctaataaagaagttgcttctctcacagttgaaaataatgctttttcttgtgatcctgggtatgtagagaaaagtccttccttctgctgtaatgaacaagaaacattccgaccagtgtccagtgaagttaggggtagaaaaataactaagaatttttcagaggtagggtttccagatattcttaaagcatatgaagatgacgtcctcttaattgatgtaattcaagatgacccagacctctttggagtctccaatgaaggggagctctcatttacttctgaggtcccaaagataagccaggagcccaatgttgctggagagcaccaatcaacagactccaagtacatggaaactccagtaaaaaaagaaccaagtgatgacttaagagaacttcctgtactggactgtggatggataaagccagacatctgtgcttccaactcagcagaaagtgaaataaaacgtgatcccaaagatgtaaacacttccttaggagaagttgctaatgagacctctgaaaatgaaacactgggagacttcagtgaacaaataaaaggttcagacttggatgaaaagcatagatttacagacaaagtgattaccaaagaagaaaaagaaaatatttatgaagtttgcaaaagcaaagattctagaaatgcagactttatggtcggcgaatgtcaatttgcagtaccagtcccgaaacctctgtgtttattagtacctcctttgaatctaagtggtcgtcaagaagacacaatactgaatacctggatgaatgatttcagatttctgggaaaacattctgtcctaaagctgcagaatcctgaaacttgtgaaatattcaagagggaaaaaaatgtgggggtgttccagaagtccctagggttgatgataccctataaatattgcaaatttcattttaatacattacgtggctgtgagcgaccactgtgcaagtttgctcatgtgcctgaacaaggggatgaaaaggtttgcatggatgtgtttaagaaatatataaatatcaatgaactgtgtttgctacagcgtgcagtaaacatatttatggagtactacagaaagtttcccccaggtgtatactttgatttacaagtgctaaatgaccttctaaattctttactcaaacattgtttgttgaaagaagtatttcagatagtgaacctcagcataatggttaaaatgctgccttctctgaaaatattactaaacatatttgagtatgtggcaactatgaaattaaggaatgctgtacctgctttaattgatatcttttgcaagcttgttgaagccgggatggtgcttgacccagagcactttaactatattgttaagcttttataccaagtacaagcttccaaacaagaaataactgcagttctggaaatgaaatcgaggttacagatgagacgatttaaaaagaactggaagtgtgatttagattcagccttgaataaattagagcattgtaaagaaaaaggtgactggaccaaattgggaaaattatacattaacgtaaaaatgggctgtgaaaaatttgcagatttccagacattttgtgcttgcattgctgaaacactcacaaaaaactatgaagatgaaagaccagatattcccttttgtgaatttgctgaaacagttagcaaagatccacaaaacagtaaagtagataaaggtgtactgggaagaattggaatcagtgctatgtacttctatcacaagctgttgcagtggtccaagggaaggaaggtcttagagaaactatatgaattaaaaatacactttacaagtttaaaaggacttatagggcctgagaagttagcatcaagatgtcaaattgtgaatgttgcagcagaaatttttctaaaaagtggaagcctagatggtgccatttgggtaatgagggagtcagagtggataatcaatacgcctctgtggccttgtgatagactggatgtgcttaatcgacataatttactctgtacaattgcacatgaaatcttagccaagagcctttatagacagacatttgaagttttgcagaatctaccaggttttcaaaattcccaagaaactgtggaagtctcacaatatagccttctttttaataagcttctaggttcctgtatagaaagcagtagtcttggtatgtcatcctctgtggcagaattcatgatttcaaagagcatccctattgatttttcctttctcagaagattaattacttctttaggaaggagtcgtttatggctcaaagccagagcccactacaaaagtgctctttccttgggttgctacccaccattggaaggaaatttataccgaaaacttcttctaattccatcttatttatctgagattgaaatgctcttagctattgaaatcttcatggtatctaatgctagtagtattcagagtcctggaacttctacacagatactgcagatagttttgaaaaggtgtgaagacaaccagtctcggagcaatgatgattatcaagctgcagtagaaaggttaattatggctgctcgtatatcagatccaaagcttttcgttaaacacatgactgtcaatgttaataaggaacaggtttatagtttggaacattgttctgccctgaaatggttaaaagagaatatgaagtgggctggaaaggtttggcttttcagtaaccattagctaataaagtctgctttttttttttttttagttcaagtaatcattgttgaaaataaaaggcaataaaaatagacagttttcactata

SEQ ID NO: 190163 - DNA, 3395 bp, Homo sapiens
  Payload ID: 17549
  Gene Symbol: TDRP
  Gene Name: testis development related protein
  Uniprot ID: Q86YL5
  ENST ID: ENST00000324079
  CDS Start-End: 242-799
cttggagcgggcctggttctggggatggtttgggggcgggccgggtcctggggagggtttggggcgggcctggtggggagggggcgggcctagttctgggggtgccccgcccccgcctagccccgcccggcccactgggcccgcgtcccgcaggagccgcaggcagagcgtccggcggccgggagggacgcggagccacagcccgacgcacggacggagggacgccggagcccgcctgaccatgtggaagctgggccggggccgagtgctgctggacgagccccccgaggaggaggacggcctgcgtggggggccgccaccggccgccgccgccgccgcccaggcgcaggttcagggagcaagtttccgaggttggaaagaagtgacttcactgtttaacaaagatgatgagcagcatctcctggaaagatgtaaatctcccaagtccaaaggaactaacttacgattaaaagaagagttgaaggcagagaagaaatctggattttgggacaatttggttttaaaacagaatatacagtctaaaaaaccagatgaaattgaaggttgggagcctccaaaacttgctcttgaagacatatcggctgaccctgaggacaccgtgggtggccacccatcctggtcaggctgggaggatgacgccaagggctcgaccaagtacaccagcctggccagctctgccaacagctccaggtggagcctgcgcgcggcagggaggctggtgagcatccgacggcagagtaaaggccacctgacagatagcccggaggaggcggagtgaggggggctgcgtggcaagtgtgccccgacatggtggccttttatgagtataccatgtagttgttgagtcttttccgcgttagaaagaatagagagtctactttttgcctatatttgatatttggacctctgtttctttatttaatgaactctcacacacactgtgactccttggtgaacacgtgcagggattgtacatttgattgccttattgcagaaatattcacctatcagtccatgttttgcagaaactggagatgtgaatttatgatgctctcccataatacagcagtaatgatttgcagtttctcacaaaatgattttcatgctgctctgtgttgtagttctgtttcagaacttccgtacctttttcttgtatgtagcacgtataaatgcagctgtcatgcagttcttttcttttgctagaaaattagtcaggaggtaagatgaatcttccaaagttatgttaaattttgtttaacttgacaaattaaactttgttcttattaaacaaatacgtaaacaaatactggaaaagcaaagcttatatttgggagtaaaatgtatcttaaaatgcatgttcatcttttgctgagggaggaatagcttcttgtatgtccactggatagtaacagtggttcttttttggaattttatttttacctcttttgaacttctaaatcggtccctttattttcttaaaacatttgctctcttttttgtttacagattaaagaagtatggatcaattttagtcagttgataatttcatttaggaaacattgtcttgctcattatagagagttaagactgtgcataaaatactgaagtgcctcttttttattaggctcatatgtttgttcttgcaaagcgagatgcctattgtgattggtgttagatctgtaagaagctgtgttttttccacaagaataatcgacgaccggtttgagagcatctctcgcgttctttttctgtctgcttactgtccttgacaatgtgatcctgcacagtatcaggtgccagttatgcgtccctggaaggttggctcttatcagcaagtcctgcagatatctcttagataaaagtggtttgaaagaaaaggtatatttttcttttttgtttaaaagtaaaataaaacctccagttacactgtgcattcccctcacgtaaaaacaagacaaaaaccctttcctgagttgctcggcatgcactcctgtgctgtttcatgcatgtggatgttccttccgtttgttcctgtggaataactgagtgtgcctgatggcagaacacactgcagtgttatcagtgtctgcatgttttttaatagaacaggtttacttgatctgtcatctgttatgcaaaaaacagcaattacttttgcatccatctagctaaatctataatctgtgtcaatcacttatacctatcaatcatccgtatctattcacctgtcctctatgtctgtcttctctcagtctacatccatctagccttctgtcaatcatctacttttttttttaatagaacaagaagtttacttatcaagtcttgaaagggggacatgtttcaattggtgttcaaacaaaaattccagcttgtattagaaccttgaaatggtgaagttgtggaggttttctttgttccataatacagagacaagttcataatttttagtataacagctaagttgacaaattctaagtttcctcaggtaaatagtcataactgtccttttccctagagaagtgcttgctgggatagtaaaaacatacaccatttcatgacttctgcaaatactttccagcggaagtcagtgtaggtttgtttttggctaacatggtcttgctgcgcaggaatgtaaacactgtgtttgaaactctggaaatcacgtgtgtggggagatggggacgcttcccatgttgtggggagctctgtggctgtgatggctgcagttgccgtgcctctgttggaacgctaagtgcctgcaactcacgtcaatcatagaattgtgacgcacagttggcaaaatagttctttatgctatttctcaaaatttgaggacaaacccagattgggattggaatatgcactgtaaatcaaatttttcttatctacaaagactaatgtaaaaatgattttttcttctgtgcctgattaaattaactgtggtttttaatataaatatttattggtgtgctttgggagaaaaattatcttttcttgaaagaagttatcaaagcaaatttattatcttcacaagttaatgggagaatgtggttttgattctgggtgtttgaattgtgtaaacacacagcttccttgtgtgaagagagttgtcctgtgctccttctactgtactttttttattttttaataggaaagtgatgtgcttcagagaagggttcctccttaatgttgaggttttttaaaaataaaaatactgtttttaagctctttccttattggtttgcatgattattggcatctgcttacgatggctttaatcactcagagctaatggcacctttcctatttagcctcattttagaatgcagtcaacacatgtagacttttcacaaataaatgaacaacttcaa

SEQ ID NO: 190164 - DNA, 2465 bp, Homo sapiens
  Payload ID: 17549
  Gene Symbol: TDRP
  Gene Name: testis development related protein
  Uniprot ID: Q86YL5
  ENST ID: ENST00000427263
  CDS Start-End: 89-685
gagccgcaggcagagcgtccggcggccgggagggacgcggagccacagcccgacgcacggacggagggacgccggagcccgcctgaccatgtggaagctgggccggggccgagtgctgctggacgagccccccgaggaggaggacggcctgcgtggggggccgccaccggccgccgccgccgccgcccaggcgcaggttcagggagcaagtttccgaggttggaaagaagtgacttcactgtttaacaaagatgatgagcagcatctcctggaaagatgtaaatctcccaagtccaaaggaactaacttacgattaaaagaagagttgaaggcagagaagaaatctggattttgggacaatttggttttaaaacagaatatacagtctaaaaaaccagatgaaattgaaggttgggagcctccaaaacttgctcttgaagacatatcggctgaccctgaggacaccgtgggtggccacccatcctggtcaggctgggaggatgacgccaagggctcgaccaagtacaccagcctggccagctctgccaacagctccaggtggagcctgcgcgcggcagggaggctgattaaagaagtatggatcaattttagtcagttgataatttcatttaggaaacattgtcttgctcattatagagagttaagactgtgcataaaatactgaagtgcctcttttttattaggctcatatgtttgttcttgcaaagcgagatgcctattgtgattggtgttagatctgtaagaagctgtgttttttccacaagaataatcgacgaccggtttgagagcatctctcgcgttctttttctgtctgcttactgtccttgacaatgtgatcctgcacagtatcaggtgccagttatgcgtccctggaaggttggctcttatcagcaagtcctgcagatatctcttagataaaagtggtttgaaagaaaaggtatatttttcttttttgtttaaaagtaaaataaaacctccagttacactgtgcattcccctcacgtaaaaacaagacaaaaaccctttcctgagttgctcggcatgcactcctgtgctgtttcatgcatgtggatgttccttccgtttgttcctgtggaataactgagtgtgcctgatggcagaacacactgcagtgttatcagtgtctgcatgttttttaatagaacaggtttacttgatctgtcatctgttatgcaaaaaacagcaattacttttgcatccatctagctaaatctataatctgtgtcaatcacttatacctatcaatcatccgtatctattcacctgtcctctatgtctgtcttctctcagtctacatccatctagccttctgtcaatcatctacttttttttttaatagaacaagaagtttacttatcaagtcttgaaagggggacatgtttcaattggtgttcaaacaaaaattccagcttgtattagaaccttgaaatggtgaagttgtggaggttttctttgttccataatacagagacaagttcataatttttagtataacagctaagttgacaaattctaagtttcctcaggtaaatagtcataactgtccttttccctagagaagtgcttgctgggatagtaaaaacatacaccatttcatgacttctgcaaatactttccagcggaagtcagtgtaggtttgtttttggctaacatggtcttgctgcgcaggaatgtaaacactgtgtttgaaactctggaaatcacgtgtgtggggagatggggacgcttcccatgttgtggggagctctgtggctgtgatggctgcagttgccgtgcctctgttggaacgctaagtgcctgcaactcacgtcaatcatagaattgtgacgcacagttggcaaaatagttctttatgctatttctcaaaatttgaggacaaacccagattgggattggaatatgcactgtaaatcaaatttttcttatctacaaagactaatgtaaaaatgattttttcttctgtgcctgattaaattaactgtggtttttaatataaatatttattggtgtgctttgggagaaaaattatcttttcttgaaagaagttatcaaagcaaatttattatcttcacaagttaatgggagaatgtggttttgattctgggtgtttgaattgtgtaaacacacagcttccttgtgtgaagagagttgtcctgtgctccttctactgtactttttttattttttaataggaaagtgatgtgcttcagagaagggttcctccttaatgttgaggttttttaaaaataaaaatactgtttttaagctctttccttattggtttgcatgattattggcatctgcttacgatggctttaatcactcagagctaatggcacctttcctatttagcctcattttagaatgcagtcaacacatgtagacttttcacaaataaatgaacaacttcaaccttggttttc

SEQ ID NO: 190165 - DNA, 2622 bp, Homo sapiens
  Payload ID: 17549
  Gene Symbol: TDRP
  Gene Name: testis development related protein
  Uniprot ID: Q86YL5
  ENST ID: ENST00000523656
  CDS Start-End: 257-853
agtccgggccgagcccgcggcgccccaggccccagcggccccaccgcccaccagggctgggcgaggcttcctcccggcgcccccactatcccgcgacctcgggcgccggaggggatgagtcccggatgcccggcgcccaggccccgagggatgccctgaagcgctggggagccgcaggcagagcgtccggcggccgggagggacgcggagccacagcccgacgcacggacggagggacgccggagcccgcctgaccatgtggaagctgggccggggccgagtgctgctggacgagccccccgaggaggaggacggcctgcgtggggggccgccaccggccgccgccgccgccgcccaggcgcaggttcagggagcaagtttccgaggttggaaagaagtgacttcactgtttaacaaagatgatgagcagcatctcctggaaagatgtaaatctcccaagtccaaaggaactaacttacgattaaaagaagagttgaaggcagagaagaaatctggattttgggacaatttggttttaaaacagaatatacagtctaaaaaaccagatgaaattgaaggttgggagcctccaaaacttgctcttgaagacatatcggctgaccctgaggacaccgtgggtggccacccatcctggtcaggctgggaggatgacgccaagggctcgaccaagtacaccagcctggccagctctgccaacagctccaggtggagcctgcgcgcggcagggaggctgattaaagaagtatggatcaattttagtcagttgataatttcatttaggaaacattgtcttgctcattatagagagttaagactgtgcataaaatactgaagtgcctcttttttattaggctcatatgtttgttcttgcaaagcgagatgcctattgtgattggtgttagatctgtaagaagctgtgttttttccacaagaataatcgacgaccggtttgagagcatctctcgcgttctttttctgtctgcttactgtccttgacaatgtgatcctgcacagtatcaggtgccagttatgcgtccctggaaggttggctcttatcagcaagtcctgcagatatctcttagataaaagtggtttgaaagaaaaggtatatttttcttttttgtttaaaagtaaaataaaacctccagttacactgtgcattcccctcacgtaaaaacaagacaaaaaccctttcctgagttgctcggcatgcactcctgtgctgtttcatgcatgtggatgttccttccgtttgttcctgtggaataactgagtgtgcctgatggcagaacacactgcagtgttatcagtgtctgcatgttttttaatagaacaggtttacttgatctgtcatctgttatgcaaaaaacagcaattacttttgcatccatctagctaaatctataatctgtgtcaatcacttatacctatcaatcatccgtatctattcacctgtcctctatgtctgtcttctctcagtctacatccatctagccttctgtcaatcatctacttttttttttaatagaacaagaagtttacttatcaagtcttgaaagggggacatgtttcaattggtgttcaaacaaaaattccagcttgtattagaaccttgaaatggtgaagttgtggaggttttctttgttccataatacagagacaagttcataatttttagtataacagctaagttgacaaattctaagtttcctcaggtaaatagtcataactgtccttttccctagagaagtgcttgctgggatagtaaaaacatacaccatttcatgacttctgcaaatactttccagcggaagtcagtgtaggtttgtttttggctaacatggtcttgctgcgcaggaatgtaaacactgtgtttgaaactctggaaatcacgtgtgtggggagatggggacgcttcccatgttgtggggagctctgtggctgtgatggctgcagttgccgtgcctctgttggaacgctaagtgcctgcaactcacgtcaatcatagaattgtgacgcacagttggcaaaatagttctttatgctatttctcaaaatttgaggacaaacccagattgggattggaatatgcactgtaaatcaaatttttcttatctacaaagactaatgtaaaaatgattttttcttctgtgcctgattaaattaactgtggtttttaatataaatatttattggtgtgctttgggagaaaaattatcttttcttgaaagaagttatcaaagcaaatttattatcttcacaagttaatgggagaatgtggttttgattctgggtgtttgaattgtgtaaacacacagcttccttgtgtgaagagagttgtcctgtgctccttctactgtactttttttattttttaataggaaagtgatgtgcttcagagaagggttcctccttaatgttgaggttttttaaaaataaaaatactgtttttaagctctttccttattggtttgcatgattattggcatctgcttacgatggctttaatcactcagagctaatggcacctttcctatttagcctcattttagaatgcagtcaacacatgtagacttttcacaaataaatgaacaacttcaa

SEQ ID NO: 190166 - DNA, 3421 bp, Homo sapiens
  Payload ID: 17549
  Gene Symbol: TDRP
  Gene Name: testis development related protein
  Uniprot ID: Q86YL5
  ENST ID: ENST00000613071
  CDS Start-End: 257-814
agtccgggccgagcccgcggcgccccaggccccagcggccccaccgcccaccagggctgggcgaggcttcctcccggcgcccccactatcccgcgacctcgggcgccggaggggatgagtcccggatgcccggcgcccaggccccgagggatgccctgaagcgctggggagccgcaggcagagcgtccggcggccgggagggacgcggagccacagcccgacgcacggacggagggacgccggagcccgcctgaccatgtggaagctgggccggggccgagtgctgctggacgagccccccgaggaggaggacggcctgcgtggggggccgccaccggccgccgccgccgccgcccaggcgcaggttcagggagcaagtttccgaggttggaaagaagtgacttcactgtttaacaaagatgatgagcagcatctcctggaaagatgtaaatctcccaagtccaaaggaactaacttacgattaaaagaagagttgaaggcagagaagaaatctggattttgggacaatttggttttaaaacagaatatacagtctaaaaaaccagatgaaattgaaggttgggagcctccaaaacttgctcttgaagacatatcggctgaccctgaggacaccgtgggtggccacccatcctggtcaggctgggaggatgacgccaagggctcgaccaagtacaccagcctggccagctctgccaacagctccaggtggagcctgcgcgcggcagggaggctggtgagcatccgacggcagagtaaaggccacctgacagatagcccggaggaggcggagtgaggggggctgcgtggcaagtgtgccccgacatggtggccttttatgagtataccatgtagttgttgagtcttttccgcgttagaaagaatagagagtctactttttgcctatatttgatatttggacctctgtttctttatttaatgaactctcacacacactgtgactccttggtgaacacgtgcagggattgtacatttgattgccttattgcagaaatattcacctatcagtccatgttttgcagaaactggagatgtgaatttatgatgctctcccataatacagcagtaatgatttgcagtttctcacaaaatgattttcatgctgctctgtgttgtagttctgtttcagaacttccgtacctttttcttgtatgtagcacgtataaatgcagctgtcatgcagttcttttcttttgctagaaaattagtcaggaggtaagatgaatcttccaaagttatgttaaattttgtttaacttgacaaattaaactttgttcttattaaacaaatacgtaaacaaatactggaaaagcaaagcttatatttgggagtaaaatgtatcttaaaatgcatgttcatcttttgctgagggaggaatagcttcttgtatgtccactggatagtaacagtggttcttttttggaattttatttttacctcttttgaacttctaaatcggtccctttattttcttaaaacatttgctctcttttttgtttacagattaaagaagtatggatcaattttagtcagttgataatttcatttaggaaacattgtcttgctcattatagagagttaagactgtgcataaaatactgaagtgcctcttttttattaggctcatatgtttgttcttgcaaagcgagatgcctattgtgattggtgttagatctgtaagaagctgtgttttttccacaagaataatcgacgaccggtttgagagcatctctcgcgttctttttctgtctgcttactgtccttgacaatgtgatcctgcacagtatcaggtgccagttatgcgtccctggaaggttggctcttatcagcaagtcctgcagatatctcttagataaaagtggtttgaaagaaaaggtatatttttcttttttgtttaaaagtaaaataaaacctccagttacactgtgcattcccctcacgtaaaaacaagacaaaaaccctttcctgagttgctcggcatgcactcctgtgctgtttcatgcatgtggatgttccttccgtttgttcctgtggaataactgagtgtgcctgatggcagaacacactgcagtgttatcagtgtctgcatgttttttaatagaacaggtttacttgatctgtcatctgttatgcaaaaaacagcaattacttttgcatccatctagctaaatctataatctgtgtcaatcacttatacctatcaatcatccgtatctattcacctgtcctctatgtctgtcttctctcagtctacatccatctagccttctgtcaatcatctacttttttttttaatagaacaagaagtttacttatcaagtcttgaaagggggacatgtttcaattggtgttcaaacaaaaattccagcttgtattagaaccttgaaatggtgaagttgtggaggttttctttgttccataatacagagacaagttcataatttttagtataacagctaagttgacaaattctaagtttcctcaggtaaatagtcataactgtccttttccctagagaagtgcttgctgggatagtaaaaacatacaccatttcatgacttctgcaaatactttccagcggaagtcagtgtaggtttgtttttggctaacatggtcttgctgcgcaggaatgtaaacactgtgtttgaaactctggaaatcacgtgtgtggggagatggggacgcttcccatgttgtggggagctctgtggctgtgatggctgcagttgccgtgcctctgttggaacgctaagtgcctgcaactcacgtcaatcatagaattgtgacgcacagttggcaaaatagttctttatgctatttctcaaaatttgaggacaaacccagattgggattggaatatgcactgtaaatcaaatttttcttatctacaaagactaatgtaaaaatgattttttcttctgtgcctgattaaattaactgtggtttttaatataaatatttattggtgtgctttgggagaaaaattatcttttcttgaaagaagttatcaaagcaaatttattatcttcacaagttaatgggagaatgtggttttgattctgggtgtttgaattgtgtaaacacacagcttccttgtgtgaagagagttgtcctgtgctccttctactgtactttttttattttttaataggaaagtgatgtgcttcagagaagggttcctccttaatgttgaggttttttaaaaataaaaatactgtttttaagctctttccttattggtttgcatgattattggcatctgcttacgatggctttaatcactcagagctaatggcacctttcctatttagcctcattttagaatgcagtcaacacatgtagacttttcacaaataaatgaacaacttcaaccttggttttc

SEQ ID NO: 190167 - DNA, 3074 bp, Homo sapiens
  Payload ID: 17550
  Gene Symbol: TEX10
  Gene Name: testis expressed 10
  Uniprot ID: Q9NXF1
  ENST ID: ENST00000374902
  CDS Start-End: 178-2967
gatttccgggcggcggaaggagacgcggccgcgtgaggacgaggctatttgaaaacacgctccgggagctagagcctgaggtcggcggcgcacgctgttgccccgtgggcttctgctccctcgcttgtcttctcgggcttctcgccccggccgcggccgggtcctcagtagtcgagaatgactaaaaaaagaaaacgccaacatgattttcaaaaagtaaaattgaaagttggtaaaaagaagcccaagttacaaaatgctactcctacaaactttaaaacaaagactatacatctgcctgagcaactcaaagaggatggaacacttccaacaaacaatagaaaacttaacataaaggatttgctgtcacagatgcatcactacaatgctggggttaaacaaagtgctcttcttggacttaaagaccttttgtctcaatacccatttataattgatgcacacctttcaaacatattaagtgaagtgactgctgtgtttacagataaagatgctaatgtacgattagcagcagttcaacttcttcaattcctggcccccaaaatacgagctgaacaaatttctccattttttcctttggtaagtgcccatctctctagtgccatgactcacattactgaaggaattcaggaggactctttaaaagttttggacattctgctggaacagtacccagctctaattactggccgtagcagcatattgcttaagaattttgtagaacttatttctcatcagcagctgtccaaaggactgataaatagagacagatcccagtcctggatactttctgtaaatcctaatcggagactcacttctcagcaatggaggctgaaagtcttagtgagactcagtaaattccttcaggccttggcagatggatccagtaggttgagagaaagtgaaggacttcaggaacagaaagaaaatccccatgccactagcaactccatttttatcaactggaaggaacatgccaacgaccagcaacacatccaggtttatgaaaatgggggttcacagccaaatgtcagttcacagttcaggctacggtatctggttggaggactgagtggtgtggatgaaggcctgtcatctactgaaaacctgaaaggatttattgagataataattccattgctaattgaatgctgggttgaagctgtacctccacaactagctactcctgttgggaatggtatagaacgagaacctctacaggttatgcagcaagttcttaatattatttcccttctgtggaaactctctaaacaacaggatgaaacccataaattggagtcatggcttcgaaagaactaccttattgattttaaacaccattttatgagtcgttttccatatgtcttaaaagaaataaccaagcacaaaaggaaagagccaaataaaagcatcaagcattgcacagttctctccaataacatagatcatctcttactgaatttaacactgtctgatatcatggtctccctggcaaatgcgtcaactttgcagaaggattgcagttggatagaaatgataaggaaatttgtaacagagacccttgaagatggctctaggctaaatagtaagcaactgaacagattgctgggagtatcctggaggttaatgcaaatacagccaaacagagaggacacagagactcttattaaggcagtttatacattatatcagcagaggggccttatccttccagttcggactttgttattgaagtttttcagtaaaatctatcagacagaagaactgagatcttgtagattcagatatcgtagtaaagtgttatcccgttggctggctggcttaccattgcaacttgctcatcttggctcccgaaatcctgagctctctacacagcttatcgatatcattcataccgctgcagcacgagcaaataaagaattactaaaaagtttacaagctactgccctccgaatttatgatccacaagaaggtgctgtggtggttctccctgcagactctcagcagcgtttggttcagcttgtatatttcctacccagtctgccggctgatttgctttctcggttaagtcgttgctgtattatgggaagactcagttcaagtttggctgccatgcttatcgggatactgcacatgagatcatcattttctgggtggaagtattcagctaaagactggttgatgagtgatgtagactatttcagcttcttattttccacacttacagggttttcgaaagaggagttgacttggcttcagagccttcgaggagttcctcatgtcatccagacacagctttcccctgtgcttctctaccttacagatttggatcaatttttacaccactgggatgtaacagaggcagtttttcacagtttattggttattcctgcccgaagtcagaactttgacatcttgcaaagtgccatcagtaagcatttggttgggttgactgtaattcctgacagcacggctggctgtgtttttggtgttatctgtaagctcctggatcatacttgtgtagttagtgagactctactgccatttctggcttcttgttgctacagtcttctttattttctgctcactatagagaaaggggaagcagaacatctaagaaagagggacaagctgtggggggtctgtgtctccatcctggctctcttgcctcgagtcctcaggttgatgctgcagagcctgcgggtgaacagagttgggcctgaggagctgcctgttgtgggccagctgcttcgactgctgcttcagcatgcacccctcaggactcatatgttgaccaatgcgatcttggtgcagcagatcatcaagaatatcacgacattgaagagtggaagtgttcaggaacagtggctcacagacttacattactgcttcaacgtgtatatcactgggcatccccaagggcccagtgcactggctacagtgtattgaagaggccatagtacctcctgtttgaagttgtttattcacatctatcttatttgaagaaaaagactgatgtaatagatctttgtcattaaagctgaacttttaaagaa

SEQ ID NO: 190168 - DNA, 824 bp, Homo sapiens
  Payload ID: 17550
  Gene Symbol: TEX10
  Gene Name: testis expressed 10
  ENST ID: ENST00000429235
  CDS Start-End: 311-824
cacctttcaaacatattaagtgaagtgactgctgtgtttacagataaagatgctaatgtacgattagcagcagttcaacttcttcaattcctggcccccaaaatacgagctgaacaaatttctccattttttcctttggtatctggttggaggactgagtggtgtggatgaaggcctgtcatctactgaaaacctgaaaggatttattgagataataattccattgctaattgaatgctgggttgaagctgtacctccacaactagctactcctgttgggaatggtatagaacgagaacctctacaggttatgcagcaagttcttaatattatttcccttctgtggaaactctctaaacaacaggatgaaacccataaattggagtcatggcttcgaaagaactaccttattgattttaaacaccattttatgagtcgttttccatatgtcttaaaagaaataaccaagcacaaaaggaaagagccaaataaaagcatcaagcattgcacagttctctccaataacatagatcatctcttactgaatttaacactgtctgatatcatggtctccctggcaaatgcgtcaactttgcagaaggattgcagttggatagaaatgataaggaaatttgtaacagagacccttgaagatggctctaggctaaatagtaagcaactgaacagattgctgggagtatcctggaggttaatgcaaatacagccaaacagagaggacacagagactcttattaaggcagtttatacattatatcagcagaggggccttatccttccagttcggactttgttattgaagtttt

SEQ ID NO: 190169 - DNA, 3006 bp, Homo sapiens
  Payload ID: 17550
  Gene Symbol: TEX10
  Gene Name: testis expressed 10
  Uniprot ID: Q9NXF1
  ENST ID: ENST00000535814
  CDS Start-End: 151-2892
tttgcggagcttcaggtgactgggcgggttcgcctggtttcgggtccgagagagttttagcccggagtgtgtgaatcgggccccacttccccgactctggtcctggccggcgtcccttggagtaggaggaacgatggtttcctaaaacccatgtcgagaatgactaaaaaaagaaaacgccaacatgattttcaaaaagtaaaattgaaagttggtaaaaagaagcccaagttacaaaatgctactcctacaaactttaaaacaaagactatacatctgcctgagcaactcaaagaggatggaacacttccaacaaacaatagaaaacttaacataaaggatttgctgtcacagatgcatcactacaatgctggggttaaacaaagtgctcttcttggacttaaagaccttttgtctcaatacccatttataattgatgcacacctttcaaacatattaagtgaagtgactgctgtgtttacagataaagatgctaatgtacgattagcagcagttcaacttcttcaattcctggcccccaaaatacgagctgaacaaatttctccattttttcctttggtaagtgcccatctctctagtgccatgactcacattactgaaggaattcaggaggactctttaaaagttttggacattctgctggaacagtacccagctctaattactggccgtagcagcatattgcttaagaattttgtagaacttatttctcatcagcagctgtccaaaggactgataaatagagacagatcccagtcctggatactttctgtaaatcctaatcggagactcacttctcagcaatggaggctgaaagtcttagtgagactcagtaaattccttcaggccttggcagatggatccagtaggttgagagaaagtgaaggacttcaggaacagaaagaaaatccccatgccactagcaactccatttttatcaactggaaggaacatgccaacgaccagcaacacatccaggtttatgaaaatgggggttcacagccaaatgtcagttcacagttcaggctacggtatctggttggaggactgagtggtgtggatgaaggcctgtcatctactgaaaacctgaaaggatttattgagataataattccattgctaattgaatgctgggttgaagctgtacctccacaactagctactcctgttgggaatggtatagaacgagaacctctacaggttatgcagcaagttcttaatattatttcccttctgtggaaactctctaaacaacaggatgaaacccataaattggagtcatggcttcgaaagaactaccttattgattttaaacaccattttatgagtcgttttccatatgtcttaaaagaaataaccaagcacaaaaggaaagagccaaataaaagcatcaagcattgcacagttctctccaataacatagatcatctcttactgaatttaacactgtctgatatcatggtctccctggcaaatgcgtcaactttgcagaaggattgcagttggatagaaatgataaggaaatttgtaacagagacccttgaagatggctctaggctaaatagtaagcaactgaacagattgctgggagtatcctggaggttaatgcaaatacagccaaacagagaggacacagagactcttattaaggcagtttatacattatatcagcagaggggccttatccttccagttcggactttgttattgaagtttttcagtaaaatctatcagacagaagaactgagatcttgtagattcagatatcgtagtaaagtgttatcccgttggctggctggcttaccattgcaacttgctcatcttggctcccgaaatcctgagctctctacacagcttatcgatatcattcataccgctgcagcacgagcaaataaagaattactaaaaagtttacaagctactgccctccgaatttatgatccacaagaaggtgctgtggtggttctccctgcagactctcagcagcgtttggttcagcttgtatatttcctacccagtctgccggctgatttgctttctcggttaagtcgttgctgtattatgggaagactcagttcaagtttggctgccatgcttatcgggatactgcacatgagatcatcattttctgggtggaagtattcagctaaagactggttgatgagtgatgtagactatttcagcttcttattttccacacttacagggttttcgaaagaggagttgacttggcttcagagccttcgaggagttcctcatgtcatccagacacagctttcccctgtgcttctctaccttacagatttggatcaatttttacaccactgggatgtaacagaggcagtttttcacagtttattggttattcctgcccgaagtcagaactttgacatcttgcaaagtgccatcagtaagcatttggttgggttgactgtaattcctgacagcacggctggctgtgtttttggtgttatctgtaagctcctggatcatacttgtgtagttagtgagactctactgccatttctggcttcttgttgctacagtcttctttattttctgctcactatagagaaaggggaagcagaacatctaagaaagaggttgatgctgcagagcctgcgggtgaacagagttgggcctgaggagctgcctgttgtgggccagctgcttcgactgctgcttcagcatgcacccctcaggactcatatgttgaccaatgcgatcttggtgcagcagatcatcaagaatatcacgacattgaagagtggaagtgttcaggaacagtggctcacagacttacattactgcttcaacgtgtatatcactgggcatccccaagggcccagtgcactggctacagtgtattgaagaggccatagtacctcctgtttgaagttgtttattcacatctatcttatttgaagaaaaagactgatgtaatagatctttgtcattaaagctgaacttttaaagaagtttacg

SEQ ID NO: 190170 - DNA, 1446 bp, Homo sapiens
  Payload ID: 17551
  Gene Symbol: TEX101
  Gene Name: testis expressed 101
  Uniprot ID: Q9BY14
  ENST ID: ENST00000602198
  CDS Start-End: 443-1246
aaccatccatcccatcagggaaatatgcaacatgcttcaaagaataagaagagaactttgggccagtagagacggggtttcaccgtgttagccaggatggtctcgatctcctgacctcgtgatccgcctgccttggcctcccaaagtgctgggattacagggcactgaatgtcaaagtgaaggaattcaatgaagcccggatcaagggcaggagcaaccgtgaccctcttaaaagagccaatgccccatgtaattagtgacgcgcgcgaatggatagacgctattcccaccgtccctacatagcatccagcgacaccacagccaagggacaggcttggcggaacctgcgggagagaagaaccctctgagcctgattgaaaggcggtgaagagacaggagagggggatcggtgggcggtcccgcctccatcttcagttcccgcatgggggcgaggcagatccagaccagctcctcccagacctctccagaagaagccatgggaacccctcgtatccagcatttgctgatcctcctggtcctaggagcctccctcctgacctcgggcctagagctgtattgtcaaaagggtctgtccatgactgtggaagcagatccagccaatatgtttaactggaccacagaggaagtggagacttgtgacaaaggggcactttgccaggaaaccatactaataattaaagcagggactgagacagccattttggccacgaagggctgcatcccggaaggggaggaggccataacaattgtccagcactcttcacctcccggcctgatcgtgacctcctacagtaactactgtgaggattccttctgtaatgacaaagacagcctgtctcagttttgggagttcagtgagaccacagcttccactgtgtcaacaaccctccattgtccaacctgtgtggctttggggacctgtttcagtgctccttctcttccctgtcccaatggtacaactcgatgctatcaaggaaaacttgagatcactggaggtggcattgagtcgtctgtggaggtcaaaggctgtacagccatgattggctgcaggctgatgtctggaatcttagcagtaggacccatgtttgtgagggaagcgtgcccacatcagctgctcactcaacctcgaaagactgaaaatggggccacctgtcttcccattcctgtttgggggttacagctactgctgccattgctgctgccatcatttattcacttttcctaagaaggcacttctgggcctgggtctgaggacatcttttttgactgggagccttcttactgttgaggttcaacaagctgaggagtagatgggaatttgagggagaatacagagatactatgaacgtatttgacatttttaatacaatttctgctataatttttgtatgcagtaggcgttactaataaacatttctgctgtga

SEQ ID NO: 190171 - DNA, 1112 bp, Homo sapiens
  Payload ID: 17551
  Gene Symbol: TEX101
  Gene Name: testis expressed 101
  Uniprot ID: Q9BY14
  ENST ID: ENST00000598265
  CDS Start-End: 167-916
gaaggcgttccgggcctcaactttggcgtcgtgagattcttgtgaggcgtctgcctggaagccggcagcaattttgcttctttaaagagaaaaagaaggctagggactcagattcctggattctgagatccagaccagctcctcccagacctctccagaagaagccatgggaacccctcgtatccagcatttgctgatcctcctggtcctaggagcctccctcctgacctcgggcctagagctgtattgtcaaaagggtctgtccatgactgtggaagcagatccagccaatatgtttaactggaccacagaggaagtggagacttgtgacaaaggggcactttgccaggaaaccatactaataattaaagcagggactgagacagccattttggccacgaagggctgcatcccggaaggggaggaggccataacaattgtccagcactcttcacctcccggcctgatcgtgacctcctacagtaactactgtgaggattccttctgtaatgacaaagacagcctgtctcagttttgggagttcagtgagaccacagcttccactgtgtcaacaaccctccattgtccaacctgtgtggctttggggacctgtttcagtgctccttctcttccctgtcccaatggtacaactcgatgctatcaaggaaaacttgagatcactggaggtggcattgagtcgtctgtggaggtcaaaggctgtacagccatgattggctgcaggctgatgtctggaatcttagcagtaggacccatgtttgtgagggaagcgtgcccacatcagctgctcactcaacctcgaaagactgaaaatggggccacctgtcttcccattcctgtttgggggttacagctactgctgccattgctgctgccatcatttattcacttttcctaagaaggcacttctgggcctgggtctgaggacatcttttttgactgggagccttcttactgttgaggttcaacaagctgaggagtagatgggaatttgagggagaatacagagatactatgaacgtatttgacatttttaatacaatttctgctataatttttgtatgcagtaggcgttactaataaacatttctgct

SEQ ID NO: 190172 - DNA, 2977 bp, Homo sapiens
  Payload ID: 17552
  Gene Symbol: TEX11
  Gene Name: testis expressed 11
  Uniprot ID: Q8IYF3
  ENST ID: ENST00000344304
  CDS Start-End: 1-2823
atgatctcggctcactgcaacctccgcctcctgtgttcaagcgattcttctgcctcagcctcccaagtagctgggactacagaagttgttgaaaacctggttacaaatgataattcacctaacataccagaggcaattgatagactcttcagcgacatagcaaatatcaacagggagtctatggctgaaataacagacattcagattgaagaaatggcagtaaacctatggaactgggcacttaccataggaggaggttggcttgtaaatgaagagcagaaaattagattacattatgttgcttgcaagttgctgagtatgtgtgaagcctcatttgcctcagaacaaagtattcaacgactgattatgatgaatatgagaataggaaaagaatggttggatgctggaaattttctaatcgctgatgaatgttttcaagctgctgtggccagtctggagcaattatacgtcaaattaattcaaaggagctcccctgaggctgacttgaccatggagaagattactgttgagagtgaccacttcagagtgctttcttaccaagcagagtcagcagttgctcaaggggattttcaaagagcatctatgtgtgtactgcaatgtaaagatatgttgatgaggctcccccagatgacttcaagtcttcatcatctctgttacaactttggagtagaaacccagaagaataataaatatgaagaaagttctttctggcttagccaaagctatgatattgggaagatggataagaaatctactgggccagaaatgctggctaaagttctacggctattagccacgaattatttggattgggatgacaccaaatattatgataaggctctcaatgctgtaaacctagcaaacaaggaacatttaagttctcctgggcttttcttaaaaatgaaaatcctcttgaaaggcgaaacatctaatgaagaactccttgaagctgtcatggaaatactacatcttgacatgcccttagacttctgtctgaacattgctaaactgctgatggatcatgaaagagaatctgttgggtttcatttcctgacgattattcatgaacgttttaagtcatcggaaaatattggaaaagttctgatactccatactgacatgcttttacaaaggaaggaagaacttcttgccaaggagaagattgaagaaatctttttagctcaccaaacaggaagacaactgacagcagaatcaatgaactggttacacaacattctgtggagacaagctgccagtagttttgaggtacaaaattacactgatgccctacaatggtactattattctctgaggttttattcaactgatgaaatggatctggacttcaccaagctgcagaggaacatggcttgctgttacctgaatttgcaacaacttgataaggccaaagaggcagtggcagaagctgaacgacatgaccctaggaacgttttcactcaattttatatattcaagattgcagtcatagagggcaactctgaaagagctttgcaggcaataattactttagagaatatattaacagatgaagagtcagaagataatgatctagttgcagagagaggttcacctaccatgcttctaagtttagctgcccagtttgctctagagaatggacaacaaattgtggcagaaaaagctttggaatatttagctcaacattcagaagaccaggaacaagttcttacagctgtaaagtgtttgcttcgttttcttcttccaaaaattgctgaaatgccggaatctgaagataagaagaaagaaatggatcgacttttgacttgcctgaatagagcctttgtgaaactttctcagccttttggtgaagaagccttaagtttggagtcaagagctaatgaagctcagtggtttcgaaaaacagcttggaacttggctgtgcaatgtgacaaagatccagtgatgatgagagagttttttatactttcttataagatgtcccagttttgtccttctgatcaagtaattctgattgcacggaaaacatgtttacttatggcagttgcagttgatctagagcaagggagaaaagcttcaacagcttttgaacagaccatgttcctgagtcgtgcacttgaggagatccagacatgcaatgacatccataatttcctgaaacaaacagggaccttctcaaatgattcatgtgagaaattgcttctgctgtacgagtttgaagttagagccaaattgaatgatccattactggaaagcttcctggaatcagtgtgggagttgcctcatttagaaactaaaacttttgaaacaattgcaataatagcaatggaaaagcctgcacactatcctttgattgctctcaaggccttgaaaaaggctttattgctctacaaaaaggaagaaccaattgatatatcacaatacagcaaatgtatgcacaacttggttaacctctcagtgccagatggggcgtcgaatgtagagctctgtcccctggaagaagtttggggctattttgaagatgctctgagccacattagccgcactaaagactacccagaaatggagattctctggctgatggtcaagtcctggaataccggagtacttatgtttagcaggagcaagtatgcatctgctgaaaagtggtgtggcctggccttgcgtttccttaaccaccttacctccttcaaggaaagctatgaaactcagatgaatatgctgtatagtcagcttgtggaagcattgagtaacaacaagggcccagtttttcatgaacatggctactggagcaagtcagattaggcaagctcatggccacatgaagaagatacattgtcccgagatgctgactgtttaaatttttgccagagtttctcttgagcttttgtttctgtttgctcagaccctgttttcatgttgttgaataaactttctaaaataaaagcatgctgaattt

SEQ ID NO: 190173 - DNA, 2224 bp, Homo sapiens
  Payload ID: 17552
  Gene Symbol: TEX11
  Gene Name: testis expressed 11
  Uniprot ID: Q8IYF3
  ENST ID: ENST00000374320
  CDS Start-End: 223-2070
agtatcacctcagcatacacagattgaaaaatgttagaaaccaggaagacaactctacttttttgcattgggggaataaacaaaccaactaaccaactaaaataatacacttactccaactaagacaacataggaagaccagagagatgattggagtcaccaagttgaagtacattagtttgggatgataattccttatgacagtgtttatccaaatctgtcatggaaatactacatcttgacatgcccttagacttctgtctgaacattgctaaactgctgatggatcatgaaagagaatctgttgggtttcatttcctgacgattattcatgaacgttttaagtcatcggaaaatattggaaaagttctgatactccatactgacatgcttttacaaaggaaggaagaacttcttgccaaggagaagattgaagaaatctttttagctcaccaaacaggaagacaactgacagcagaatcaatgaactggttacacaacattctgtggagacaagctgccagtagttttgaggtacaaaattacactgatgccctacaatggtactattattctctgaggttttattcaactgatgaaatggatctggacttcaccaagctgcagaggaacatggcttgctgttacctgaatttgcaacaacttgataaggccaaagaggcagtggcagaagctgaacgacatgaccctaggaacgttttcactcaattttatatattcaagattgcagtcatagagggcaactctgaaagagctttgcaggcaataattactttagagaatatattaacagatgaagagtcagaagataatgatctagttgcagagagaggttcacctaccatgcttctaagtttagctgcccagtttgctctagagaatggacaacaaattgtggcagaaaaagctttggaatatttagctcaacattcagaagaccaggaacaagttcttacagctgtaaagtgtttgcttcgttttcttcttccaaaaattgctgaaatgccggaatctgaagataagaagaaagaaatggatcgacttttgacttgcctgaatagagcctttgtgaaactttctcagccttttggtgaagaagccttaagtttggagtcaagagctaatgaagctcagtggtttcgaaaaacagcttggaacttggctgtgcaatgtgacaaagatccagtgatgatgagagagttttttatactttcttataagatgtcccagttttgtccttctgatcaagtaattctgattgcacggaaaacatgtttacttatggcagttgcagttgatctagagcaagggagaaaagcttcaacagcttttgaacagaccatgttcctgagtcgtgcacttgaggagatccagacatgcaatgacatccataatttcctgaaacaaacagggaccttctcaaatgattcatgtgagaaattgcttctgctgtacgagtttgaagttagagccaaattgaatgatccattactggaaagcttcctggaatcagtgtgggagttgcctcatttagaaactaaaacttttgaaacaattgcaataatagcaatggaaaagcctgcacactatcctttgattgctctcaaggccttgaaaaaggctttattgctctacaaaaaggaagaaccaattgatatatcacaatacagcaaatgtatgcacaacttggttaacctctcagtgccagatggggcgtcgaatgtagagctctgtcccctggaagaagtttggggctattttgaagatgctctgagccacattagccgcactaaagactacccagaaatggagattctctggctgatggtcaagtcctggaataccggagtacttatgtttagcaggagcaagtatgcatctgctgaaaagtggtgtggcctggccttgcgtttccttaaccaccttacctccttcaaggaaagctatgaaactcagatgaatatgctgtatagtcagcttgtggaagcattgagtaacaacaagggcccagtttttcatgaacatggctactggagcaagtcagattaggcaagctcatggccacatgaagaagatacattgtcccgagatgctgactgtttaaatttttgccagagtttctcttgagcttttgtttctgtttgctcagaccctgttttcatgttgttgaataaactttctaaaataaaagcatgctgaattt

SEQ ID NO: 190174 - DNA, 3032 bp, Homo sapiens
  Payload ID: 17552
  Gene Symbol: TEX11
  Gene Name: testis expressed 11
  Uniprot ID: Q8IYF3
  ENST ID: ENST00000374333
  CDS Start-End: 100-2877
ggagttttctgaacgtcctcgtgcgctgtggacggaggttgtggagagagcagggcggcattggtggctgcggctgaggcttgagccagagatttaaaaatggacaatgatgattttttttccatggactttaaagaagttgttgaaaacctggttacaaatgataattcacctaacataccagaggcaattgatagactcttcagcgacatagcaaatatcaacagggagtctatggctgaaataacagacattcagattgaagaaatggcagtaaacctatggaactgggcacttaccataggaggaggttggcttgtaaatgaagagcagaaaattagattacattatgttgcttgcaagttgctgagtatgtgtgaagcctcatttgcctcagaacaaagtattcaacgactgattatgatgaatatgagaataggaaaagaatggttggatgctggaaattttctaatcgctgatgaatgttttcaagctgctgtggccagtctggagcaattatacgtcaaattaattcaaaggagctcccctgaggctgacttgaccatggagaagattactgttgagagtgaccacttcagagtgctttcttaccaagcagagtcagcagttgctcaaggggattttcaaagagcatctatgtgtgtactgcaatgtaaagatatgttgatgaggctcccccagatgacttcaagtcttcatcatctctgttacaactttggagtagaaacccagaagaataataaatatgaagaaagttctttctggcttagccaaagctatgatattgggaagatggataagaaatctactgggccagaaatgctggctaaagttctacggctattagccacgaattatttggattgggatgacaccaaatattatgataaggctctcaatgctgtaaacctagcaaacaaggaacatttaagttctcctgggcttttcttaaaaatgaaaatcctcttgaaaggcgaaacatctaatgaagaactccttgaagctgtcatggaaatactacatcttgacatgcccttagacttctgtctgaacattgctaaactgctgatggatcatgaaagagaatctgttgggtttcatttcctgacgattattcatgaacgttttaagtcatcggaaaatattggaaaagttctgatactccatactgacatgcttttacaaaggaaggaagaacttcttgccaaggagaagattgaagaaatctttttagctcaccaaacaggaagacaactgacagcagaatcaatgaactggttacacaacattctgtggagacaagctgccagtagttttgaggtacaaaattacactgatgccctacaatggtactattattctctgaggttttattcaactgatgaaatggatctggacttcaccaagctgcagaggaacatggcttgctgttacctgaatttgcaacaacttgataaggccaaagaggcagtggcagaagctgaacgacatgaccctaggaacgttttcactcaattttatatattcaagattgcagtcatagagggcaactctgaaagagctttgcaggcaataattactttagagaatatattaacagatgaagagtcagaagataatgatctagttgcagagagaggttcacctaccatgcttctaagtttagctgcccagtttgctctagagaatggacaacaaattgtggcagaaaaagctttggaatatttagctcaacattcagaagaccaggaacaagttcttacagctgtaaagtgtttgcttcgttttcttcttccaaaaattgctgaaatgccggaatctgaagataagaagaaagaaatggatcgacttttgacttgcctgaatagagcctttgtgaaactttctcagccttttggtgaagaagccttaagtttggagtcaagagctaatgaagctcagtggtttcgaaaaacagcttggaacttggctgtgcaatgtgacaaagatccagtgatgatgagagagttttttatactttcttataagatgtcccagttttgtccttctgatcaagtaattctgattgcacggaaaacatgtttacttatggcagttgcagttgatctagagcaagggagaaaagcttcaacagcttttgaacagaccatgttcctgagtcgtgcacttgaggagatccagacatgcaatgacatccataatttcctgaaacaaacagggaccttctcaaatgattcatgtgagaaattgcttctgctgtacgagtttgaagttagagccaaattgaatgatccattactggaaagcttcctggaatcagtgtgggagttgcctcatttagaaactaaaacttttgaaacaattgcaataatagcaatggaaaagcctgcacactatcctttgattgctctcaaggccttgaaaaaggctttattgctctacaaaaaggaagaaccaattgatatatcacaatacagcaaatgtatgcacaacttggttaacctctcagtgccagatggggcgtcgaatgtagagctctgtcccctggaagaagtttggggctattttgaagatgctctgagccacattagccgcactaaagactacccagaaatggagattctctggctgatggtcaagtcctggaataccggagtacttatgtttagcaggagcaagtatgcatctgctgaaaagtggtgtggcctggccttgcgtttccttaaccaccttacctccttcaaggaaagctatgaaactcagatgaatatgctgtatagtcagcttgtggaagcattgagtaacaacaagggcccagtttttcatgaacatggctactggagcaagtcagattaggcaagctcatggccacatgaagaagatacattgtcccgagatgctgactgtttaaatttttgccagagtttctcttgagcttttgtttctgtttgctcagaccctgttttcatgttgttgaataaactttctaaaataaaagcatgctgaattta

SEQ ID NO: 190175 - DNA, 3133 bp, Homo sapiens
  Payload ID: 17552
  Gene Symbol: TEX11
  Gene Name: testis expressed 11
  Uniprot ID: Q8IYF3
  ENST ID: ENST00000395889
  CDS Start-End: 157-2979
gtgcgctgtggacggaggttgtggagagagcagggcggcattggtggctgcggctgaggcttgagccagagatttaaaaatggacaatgatgattttttttccatggactttaaagatggagtctgtctctgttgtccaggctggagtgcagtggcatgatctcggctcactgcaacctccgcctcctgtgttcaagcgattcttctgcctcagcctcccaagtagctgggactacagaagttgttgaaaacctggttacaaatgataattcacctaacataccagaggcaattgatagactcttcagcgacatagcaaatatcaacagggagtctatggctgaaataacagacattcagattgaagaaatggcagtaaacctatggaactgggcacttaccataggaggaggttggcttgtaaatgaagagcagaaaattagattacattatgttgcttgcaagttgctgagtatgtgtgaagcctcatttgcctcagaacaaagtattcaacgactgattatgatgaatatgagaataggaaaagaatggttggatgctggaaattttctaatcgctgatgaatgttttcaagctgctgtggccagtctggagcaattatacgtcaaattaattcaaaggagctcccctgaggctgacttgaccatggagaagattactgttgagagtgaccacttcagagtgctttcttaccaagcagagtcagcagttgctcaaggggattttcaaagagcatctatgtgtgtactgcaatgtaaagatatgttgatgaggctcccccagatgacttcaagtcttcatcatctctgttacaactttggagtagaaacccagaagaataataaatatgaagaaagttctttctggcttagccaaagctatgatattgggaagatggataagaaatctactgggccagaaatgctggctaaagttctacggctattagccacgaattatttggattgggatgacaccaaatattatgataaggctctcaatgctgtaaacctagcaaacaaggaacatttaagttctcctgggcttttcttaaaaatgaaaatcctcttgaaaggcgaaacatctaatgaagaactccttgaagctgtcatggaaatactacatcttgacatgcccttagacttctgtctgaacattgctaaactgctgatggatcatgaaagagaatctgttgggtttcatttcctgacgattattcatgaacgttttaagtcatcggaaaatattggaaaagttctgatactccatactgacatgcttttacaaaggaaggaagaacttcttgccaaggagaagattgaagaaatctttttagctcaccaaacaggaagacaactgacagcagaatcaatgaactggttacacaacattctgtggagacaagctgccagtagttttgaggtacaaaattacactgatgccctacaatggtactattattctctgaggttttattcaactgatgaaatggatctggacttcaccaagctgcagaggaacatggcttgctgttacctgaatttgcaacaacttgataaggccaaagaggcagtggcagaagctgaacgacatgaccctaggaacgttttcactcaattttatatattcaagattgcagtcatagagggcaactctgaaagagctttgcaggcaataattactttagagaatatattaacagatgaagagtcagaagataatgatctagttgcagagagaggttcacctaccatgcttctaagtttagctgcccagtttgctctagagaatggacaacaaattgtggcagaaaaagctttggaatatttagctcaacattcagaagaccaggaacaagttcttacagctgtaaagtgtttgcttcgttttcttcttccaaaaattgctgaaatgccggaatctgaagataagaagaaagaaatggatcgacttttgacttgcctgaatagagcctttgtgaaactttctcagccttttggtgaagaagccttaagtttggagtcaagagctaatgaagctcagtggtttcgaaaaacagcttggaacttggctgtgcaatgtgacaaagatccagtgatgatgagagagttttttatactttcttataagatgtcccagttttgtccttctgatcaagtaattctgattgcacggaaaacatgtttacttatggcagttgcagttgatctagagcaagggagaaaagcttcaacagcttttgaacagaccatgttcctgagtcgtgcacttgaggagatccagacatgcaatgacatccataatttcctgaaacaaacagggaccttctcaaatgattcatgtgagaaattgcttctgctgtacgagtttgaagttagagccaaattgaatgatccattactggaaagcttcctggaatcagtgtgggagttgcctcatttagaaactaaaacttttgaaacaattgcaataatagcaatggaaaagcctgcacactatcctttgattgctctcaaggccttgaaaaaggctttattgctctacaaaaaggaagaaccaattgatatatcacaatacagcaaatgtatgcacaacttggttaacctctcagtgccagatggggcgtcgaatgtagagctctgtcccctggaagaagtttggggctattttgaagatgctctgagccacattagccgcactaaagactacccagaaatggagattctctggctgatggtcaagtcctggaataccggagtacttatgtttagcaggagcaagtatgcatctgctgaaaagtggtgtggcctggccttgcgtttccttaaccaccttacctccttcaaggaaagctatgaaactcagatgaatatgctgtatagtcagcttgtggaagcattgagtaacaacaagggcccagtttttcatgaacatggctactggagcaagtcagattaggcaagctcatggccacatgaagaagatacattgtcccgagatgctgactgtttaaatttttgccagagtttctcttgagcttttgtttctgtttgctcagaccctgttttcatgttgttgaataaactttctaaaataaaagcatgctgaattt

SEQ ID NO: 190176 - DNA, 1147 bp, Homo sapiens
  Payload ID: 17553
  Gene Symbol: TEX12
  Gene Name: testis expressed 12
  Uniprot ID: Q9BXU0
  ENST ID: ENST00000280358
  CDS Start-End: 133-504
actccctcgcgttcgctgacgaggaaggtccccataccgcgaagtacattggccttggggtggggctggagggatgggcgcctgtgagaatgtgacggactgtgacacaaggaaggctggtgccttcggaatatgatggcaaatcaccttgtaaagcctgataatagaaattgcaagaggccaagagaattggagtctccagtgccagatagtccacagctgtcctctcttggaaaatcagattcatctttctctgaaatttccggactattttataaagatgaagccttggagaaagatttaaatgatgtgagcaaggaaattaatctaatgttgtctacctatgcaaagcttttaagtgagagagcagcagtagatgcatcttacattgatgagatagatgaactcttcaaagaagccaatgctattgaaaactttctaatacaaaaaagagagttcctgcgacagaggtttacagtgattgcaaacacattacacagataaaatatatacttgaaataagctgagaatttaaacctattattgttataatgaaagaatgacatttatgctttgaaagctctcgagttgttaaagaaaatgtatatctcgaatagagaaggggaaactccttgaatttctaggtttaaaaaggaacttttaaattccttaatgttaatattaatgttcatgttaatgtcctaagctggccattaacatgaactacgtcacttttcttttgagggtcaaatatttagtgcattttatagaagtgtaaattatttaaatcttatgtggattcttttattttttccttaaacttcttagtgtttctgaaacttctaaaaaaggattcagttaatttataatgtttaataatattatacttttagaatattttgtttaaatatcagatagttttggagataattttgaaattttttttatggtcaggattataaaagaagattaaaaccttagaggtgatttttccagtttcttagaatataatgacataactgtgtgctatttccatttgattattttcactattagttattatgtatgactaataaaagctctcggcttaaaattattttcttgtggtaaaagtagtaaaataaaaaccagaaattactcaccagaa

SEQ ID NO: 190177 - DNA, 787 bp, Homo sapiens
  Payload ID: 17553
  Gene Symbol: TEX12
  Gene Name: testis expressed 12
  Uniprot ID: Q9BXU0
  ENST ID: ENST00000530752
  CDS Start-End: 68-439
actccctcgcgttcgctgacgaggaaggtccccataccgcgaactttgtagctggtgccttcggaatatgatggcaaatcaccttgtaaagcctgataatagaaattgcaagaggccaagagaattggagtctccagtgccagatagtccacagctgtcctctcttggaaaatcagattcatctttctctgaaatttccggactattttataaagatgaagccttggagaaagatttaaatgatgtgagcaaggaaattaatctaatgttgtctacctatgcaaagcttttaagtgagagagcagcagtagatgcatcttacattgatgagatagatgaactcttcaaagaagccaatgctattgaaaactttctaatacaaaaaagagagttcctgcgacagaggtttacagtgattgcaaacacattacacagataaaatatatacttgaaataagctgagaatttaaacctattattgttataatgaaagaatgacatttatgctttgaaagctctcgagttgttaaagaaaatgtatatctcgaatagagaaggggaaactccttgaatttctaggtttaaaaaggaacttttaaattccttaatgttaatattaatgttcatgttaatgtcctaagctggccattaacatgaactacgtcacttttcttttgagggtcaaatatttagtgcattttatagaagtgtaaattatttaaatcttatgtggattcttttattttttccttaaacttcttagtgtttctgaaacttctaaaaaagg

SEQ ID NO: 190178 - DNA, 1377 bp, Homo sapiens
  Payload ID: 17554
  Gene Symbol: TEX13A
  Gene Name: testis expressed 13A
  Uniprot ID: Q9BXU3
  ENST ID: ENST00000600991
  CDS Start-End: 113-1342
gggagagagatcttcctctctcttcgggcgtgttaagacagcggggttggcctgtacttcctctggccctggctgaagagggctagtgaaaccgttaaacccctaggcgatcatggccttgagacctgaggaccccagtagcgggttccggcatagcaacgtggtggccttcatcaacgagaaaatggccaggcacacgaaaggccccgagttctatcttgagaatatatccttatcctgggagaaggtggaagacaagctgagggccatactggaggacagcgaggtgcccagtgaggtcaaagaggcctgcacctggggcagcctggccttgggagtgcgctttgcccacaggcaggcacagctacaaaggcacagggtgcggtggctgcacggcttcgccaaactgcacaaatcagccgcacaggccttggcatcagacctgaagaagctcagggagcagcaggagacggaacgcaaggaggcggcctcccggctaagaatggcccagaccagcctcgtggaggtgcagaaagagagagacaaggagctggtgtctccccatgagtgggagcagggggcagggtggccaggcctggccactgccggaggggtttgcacagaaggagcagctgaggaggaagaagaggcggcggtggctgctgctggtgctgctggaggaaaaggagcagaagaagagcagagggatgtggaggttgtggctgcccctgtggaggccatggctccccctgtggaggctggggctgcccccatggagacccagttcccccacgtggaggccagggctgcctccatggagaccacagagaagctggagagaatcctcctgcagctccttggagatgctgatcaggaaaagtacacctattgggggcagaaggagggagatctccggtcggtcgaaacagccacatcttatttctctggaaccacgaacccctggtccagagcctcatcagaacctcttcctgtccagctccctgcctcatactcatactcatactcaagccctttttcctccttctcagacatacccactatatcccctccacaagcaacagtcacagcaccagttccgcctcagctgccttccgactgggaggcctttgatactagcctgtggtctgatggggggccccacagaatagaccatcaggagcacccaagagacaggagatactccgaacctcatcagcaaagacctccagtatatcgcaggccaggggactgggactgcccttggtgtaacgctgtgaatttttcacggagggatacttgcttcgactgtgggaagggaatctggctgcaaaaacctcattgagtgcagaaatgcaaaatagaaccgaagcatgtata

SEQ ID NO: 190179 - DNA, 1349 bp, Homo sapiens
  Payload ID: 17554
  Gene Symbol: TEX13A
  Gene Name: testis expressed 13A
  Uniprot ID: Q9BXU3
  ENST ID: ENST00000609007
  CDS Start-End: 87-1316
gggagagagatcttcctctctcttcgggcgtgttaagacagcggggttggcctgtacttcctctggccctggctgaagaggcgatcatggccttgagacctgaggaccccagtagcgggttccggcatagcaacgtggtggccttcatcaacgagaaaatggccaggcacacgaaaggccccgagttctatcttgagaatatatccttatcctgggagaaggtggaagacaagctgagggccatactggaggacagcgaggtgcccagtgaggtcaaagaggcctgcacctggggcagcctggccttgggagtgcgctttgcccacaggcaggcacagctacaaaggcacagggtgcggtggctgcacggcttcgccaaactgcacaaatcagccgcacaggccttggcatcagacctgaagaagctcagggagcagcaggagacggaacgcaaggaggcggcctcccggctaagaatggcccagaccagcctcgtggaggtgcagaaagagagagacaaggagctggtgtctccccatgagtgggagcagggggcagggtggccaggcctggccactgccggaggggtttgcacagaaggagcagctgaggaggaagaagaggcggcggtggctgctgctggtgctgctggaggaaaaggagcagaagaagagcagagggatgtggaggttgtggctgcccctgtggaggccatggctccccctgtggaggctggggctgcccccatggagacccagttcccccacgtggaggccagggctgcctccatggagaccacagagaagctggagagaatcctcctgcagctccttggagatgctgatcaggaaaagtacacctattgggggcagaaggagggagatctccggtcggtcgaaacagccacatcttatttctctggaaccacgaacccctggtccagagcctcatcagaacctcttcctgtccagctccctgcctcatactcatactcatactcaagccctttttcctccttctcagacatacccactatatcccctccacaagcaacagtcacagcaccagttccgcctcagctgccttccgactgggaggcctttgatactagcctgtggtctgatggggggccccacagaatagaccatcaggagcacccaagagacaggagatactccgaacctcatcagcaaagacctccagtatatcgcaggccaggggactgggactgcccttggtgtaacgctgtgaatttttcacggagggatacttgcttcgactgtgggaagggaatctggctgcaaaaacctcattgagtgcagaaatgcaaaatagaaccgaagcatgta

SEQ ID NO: 190180 - DNA, 1248 bp, Homo sapiens
  Payload ID: 17555
  Gene Symbol: TEX13B
  Gene Name: testis expressed 13B
  Uniprot ID: Q9BXU2
  ENST ID: ENST00000302917
  CDS Start-End: 94-1032
tctcttcaggcgtgttaagcagcggggttggcctgtacttcctctggccctggctgaagagggctagtgaaaccgttaagcccctaggcgatcatggccttgagacctgaggaccccagtagtgggttccggcacggaaacgtggtggccttcatcatcgagaaaatggccaggcacacgaaaggccccgagttctacttcgagaatatatccttatcctgggaggaggtggaagacaagctcagggccatcctggaggacagcgaggtgcccagcgaggtcaaagaggcctgcacctggggcagcctggccttgggtgtgcgctttgcccacaggcaggggcagttacaaaaccgcagggtgcagtggctgcaaggctttgccaaactgcacagatcagctgcgctggtcttggcctcaaacctgacggaactcaaggaacagcaggagatggaatgcaatgaggcgaccttccagttgcagctaaccgagaccagccttgcggaggtgcagagagagcgggacatgctgagatggaagctcttccatgccgagctggcacctccccagggacagggccaggctacagtgtttccaggcctggccactgccggaggggattggacagaaggagcaggtgagcaggaaaaggaggcggtggctgctgctggtgctgctggaggaaaaggagaggagaggtatgcagaggcagggcctgcccccgcagaggtcttgcaggggctgggaggaggcttcaggcagcccctcggagctattgtagcaggcaaattacacctttgcggggcagagggagaaagatctcaggtcagtacaaacagccatgtctgtcttctctgggcttgggtccacagtctcactggagcctcttcctgtccagctccctacctcattcacatactcatacccatgccctttgtccgccttctcagccatacccaatatacccccttcaccagcaaaggtcacagaacgggttccaactcagatgcctttcaactggggggcctctgatgctagcctgtggtcagatgtggaggcccagggaatagaccctcaagagcccccaagagacaggagagactccgaactccatcagcagagaagacctccagtatatcgcaggccagggaactgggactgcccgtggtgtaaagctgtgaatttttcatggagggaaaattgcttcctctgtgggaggcgaatctggctgcaaaagcctcagtaaat

SEQ ID NO: 190181 - DNA, 4911 bp, Homo sapiens
  Payload ID: 17556
  Gene Symbol: TEX14
  Gene Name: testis expressed 14
  Uniprot ID: Q8IWB6
  ENST ID: ENST00000240361
  CDS Start-End: 87-4580
ttcccgggagtcgtatcccgagcatggaggttactgagaccgttatttcttcatggcctgcctagcttaagcagtagctggaaaagatgtctcgggctgttcgtcttccagtcccctgtcctgttcaacttggtaccttaagaaatgactccctggaagctcagcttcatgagtatgtcaaacaagggaactatgtgaaagtgaagaaaattcttaagaaaggaatttatgttgatgcagttaactccttgggccaaacagcactttttgttgcggcgttattgggccttaggaaattcgttgatgttctggtggattatggatcagatccaaatcaccgctgctttgatgggagcacccctgtccatgcagcagcattttcgggcaatcagtggatccttagcaaactgctggatgcaggaggtgacctgcgactccacgatgagaggggtcaaaacccgaagacttgggctttgacagcaggaaaggagcgtagcacccagatagtggagttcatgcagcgctgtgcctcacacatgcaggccatcatccagggcttctcttacgacctcctgaagaagatagactccccgcagcggcttgtctacagcccgtcctggtgtgggggcctcgtgcagggaaaccctaatggctctcctaaccgactgcttaaagctggagtcatttctgctcaaaatatctacagctttggttttgggaaggctatgccttggtttcagttttatcttactggggcgacacagatggcctatctaggatctcttccggtcattggagaaaaggaagtgattcaagctgatgatgagcccaccttctctttcttcagcggcccctacatggtcatgaccaacctagtgtggaatgggagcagggtcacagtgaaagagctgaatctccccacccacccacactgcagcaggctgcggctggccgacttgttaattgccgagcaggaacacagcagcaagctgcggcacccctacttgctacagttgatggctgtgtgtctctcccaggacctagagaaaacccgccttgtgtacgagcgcatcactatcggcacattgttcagtgtccttcatgaacgacggtcccagttcccagtgctgcacatggaggtgattgtgcacctgctgctccagatatctgatgccctgagatacctgcatttccaggggtttatccaccgctccctcagctcctatgctgtccatatcatctccccaggtgaagcgaggctgaccaacctggagtacatgttggaaagcgaggacagaggtgtacagagggacctgactcgagtgccccttcctacgcagctatacaactgggccgcaccagaagtgatcttacagaaggcagccacagtgaaatcagacatctacagcttttctatgatcatgcaggagattttaacagatgacataccctggaagggcttagatggctcagttgttaaaaaagccgtagtctcggggaattatttagaagctgatgtcaggcttccgaaaccttactatgatattgttaagtcaggcatccacgtcaagcagaaagaccgaactatgaaccttcaagatatccggtatattctgaagaatgacttaaaggattttactggagcccagagaactcaaccaaccgagagccccagagtgcagagatacggactccatcccgatgtcaatgtctatctaggactgacttcagaacaccccagagagacacctgacatggaaatcatagaactaaaggaaatgggcagtcaacctcattcaccaagggttcactctttattcactgaggggacactagatcctcaggccccagatccatgtctgatggccagggagactcagaatcaagatgctccttgccctgctccatttatggcagaagaggccagcagccccagcacaggtcagccaagcctctgcagtttcgaaatcaacgagatctactcaggctgcttgattttggaagatgacatagaagagcctccaggagctgcttcatctttggaggcagacggacctaaccaggtagatgaactgaaatccatggaagaagagctggataagatggagagagaggcgtgttgttttggcagtgaggatgagagctcttcaaaagctgagacagagtactcttttgatgactgggactggcaaaacggttcactcagttcactcagccttcctgagtcaaccagagaagccaagagcaatttgaacaacatgtccacgactgaggagtatctcatcagtaagtgtgtgctggatctaaagattatgcagacaataatgcacgagaatgatgataggctgaggaatatcgagcagatattagatgaagtcgagatgaaacagaaggaacaggaagagcgcatgtctttatgggccacttcaagagagtttacaaatgcctacaagttacctctggccgtgggccctccatctttaaactatattcctcctgtcctacagctttcagggggtcagaagccagacaccagtggcaactacccaaccctaccaagatttccaagaatgctgccgactctttgtgaccctggaaaacagaacacagatgaacaatttcagtgcactcaaggagccaaggacagtttggaaacaagcaggatccaaaataccagtagccagggaagacctagagagtccactgcccaagccaaagccacacagtttaatagtgcactcttcactctgtcaagccaccggcagggaccttctgcatcacccagctgtcactgggactctaccaggatgagtgtggaacctgtttcttctgaaatctataatgcagagtccagaaataaagatgatggaaaggtacacttaaaatggaaaatggaggtgaaagaaatggcaaagaaagcagctactggacagctcacagtacctccttggcatcctcagagtagtctgactttagagagcgaggctgaaaatgagcccgacgccctgctgcagccccccattaggagcccagaaaacacggattggcagcgagttattgagtatcatagggaaaatgatgagcccagaggaaatggcaagtttgacaagacgggcaacaatgactgtgacagtgaccagcatggcagacagcccaggcttggaagcttcaccagtatcaggcacccatctcccagacaaaaggagcaaccagagcatagtgaagccttccaagcaagttctgacacattggtggctgtagagaaatcttacagtcatcagtccatgcaatcaacttgttcaccagagtcttctgaggatataacagatgaatttttaactccagacggtgaatatttttactcctcgactgctcaagaaaacttagctctagagacctcgagtcccatagaagaggactttgaaggaatacaaggtgcatttgcccaacctcaagtctctggtgaggaaaagttccaaatgagaaaaattcttggaaagaatgctgagattttgcccaggtctcaatttcaacctgtacgaagtactgaagatgaacaagaagagacatcaaaggagtcaccaaaggaactgaaagagaaagacatatcattgacggatattcaagacctgtctagtatctcctatgaaccagacagctcttttaaggaagcttcatgcaaaacacccaaaataaaccatgcacctaccagtgtcagcactccactcagcccagggtccgtttcttcagctgccagtcagtataaagactgccttgaaagtatcacatttcaggttaagacagagtttgcctcttgctggaacagtcaagaatttattcaaactttgtctgatgactttataagtgtccgagagagagcaaagaaactggattctctccttacttcctctgaaactcccccttcaagactgactggtcttaaaagattgtcttcatttattggggctggatcccccagccttgttaaggcatgtgactcatcaccaccccatgccacccagagaaggagcctgcctaaagtagaagccttctcacagcatcacattgatgagctgccaccaccatctcaggagctacttgatgacattgagctcttgaaacagcagcagggctcatccacggtgttgcatgagaacacagcaagtgatggaggaggcactgcaaatgatcaaaggcacttagaagaacaagaaactgacagtaaaaaagaagatagtagtatgcttttgtccaaagaaactgaagatcttggagaggacacagagagagctcactctactctggatgaggacctggaaagatggctgcagccacctgaggagagcgtggagctacaagaccttcccaagggctctgaaagggagacaaatatcaaagatcaaaaagttggtgaagagaaaagaaaaagggaagatagcattacaccagaaagaaggaaatcagagggtgttctagggacttctgaagaagatgaactaaaatcctgtttttggaagcgactaggttggtccgaatcatccaggataatcgtgctggatcagagtgacttgtcagactgattggaattggatcatagacggactcctggcctgagtttgagtgtcctggttgtaagctcctttcttctctttctgcttcagttgctgtcagggcagcagttccagttctgtaagtctcactttgttcagctgccacaatagacatcatcgtttggccctctctgttagcagcacattcaaccatttgttttcagtcagatttctgaaaagtgagaggtagttttgatagtaaaaatttttggttgtgcctagaatggctttggttttgttgatgttaattttcaaaaactttaactcttgttatataataaaatgtttaattttaataaca

SEQ ID NO: 190182 - DNA, 4773 bp, Homo sapiens
  Payload ID: 17556
  Gene Symbol: TEX14
  Gene Name: testis expressed 14
  Uniprot ID: Q8IWB6
  ENST ID: ENST00000349033
  CDS Start-End: 87-4442
ttcccgggagtcgtatcccgagcatggaggttactgagaccgttatttcttcatggcctgcctagcttaagcagtagctggaaaagatgtctcgggctgttcgtcttccagtcccctgtcctgttcaacttggtaccttaagaaatgactccctggaagctcagcttcatgagtatgtcaaacaagggaactatgtgaaagtgaagaaaattcttaagaaaggaatttatgttgatgcagttaactccttgggccaaacagcactttttgttgcggcgttattgggccttaggaaattcgttgatgttctggtggattatggatcagatccaaatcaccgctgctttgatgggagcacccctgtccatgcagcagcattttcgggcaatcagtggatccttagcaaactgctggatgcaggaggtgacctgcgactccacgatgagaggggtcaaaacccgaagacttgggctttgacagcaggaaaggagcgtagcacccagatagtggagttcatgcagcgctgtgcctcacacatgcaggccatcatccagggcttctcttacgacctcctgaagaagatagactccccgcagcggcttgtctacagcccgtcctggtgtgggggcctcgtgcagggaaaccctaatggctctcctaaccgactgcttaaagctggagtcatttctgctcaaaatatctacagctttggttttgggaagttttatcttactggggcgacacagatggcctatctaggatctcttccggtcattggagaaaaggaagtgattcaagctgatgatgagcccaccttctctttcttcagcggcccctacatggtcatgaccaacctagtgtggaatgggagcagggtcacagtgaaagagctgaatctccccacccacccacactgcagcaggctgcggctggccgacttgttaattgccgagcaggaacacagcagcaagctgcggcacccctacttgctacagttgatggctgtgtgtctctcccaggacctagagaaaacccgccttgtgtacgagcgcatcactatcggcacattgttcagtgtccttcatgaacgacggtcccagttcccagtgctgcacatggaggtgattgtgcacctgctgctccagatatctgatgccctgagatacctgcatttccaggggtttatccaccgctccctcagctcctatgctgtccatatcatctccccaggtgaagcgaggctgaccaacctggagtacatgttggaaagcgaggacagaggtgtacagagggacctgactcgagtgccccttcctacgcagctatacaactgggccgcaccagaagtgatcttacagaaggcagccacagtgaaatcagacatctacagcttttctatgatcatgcaggagattttaacagatgacataccctggaagggcttagatggctcagttgttaaaaaagccgtagtctcggggaattatttagaagctgatgtcaggcttccgaaaccttactatgatattgttaagtcaggcatccacgtcaagcagaaagaccgaactatgaaccttcaagatatccggtatattctgaagaatgacttaaaggattttactggagcccagagaactcaaccaaccgagagccccagagtgcagagatacggactccatcccgatgtcaatgtctatctaggactgacttcagaacaccccagagagacacctgacatggaaatcatagaactaaaggaaatgggcagtcaacctcattcaccaagggttcactctttattcactgaggggacactagatcctcaggccccagatccatgtctgatggccagggagactcagaatcaagatgctccttgccctgctccatttatggcagaagaggccagcagccccagcacaggtcagccaagcctctgcagtttcgaaatcaacgagatctactcaggctgcttgattttggaagatgacatagaagagcctccaggagctgcttcatctttggaggcagacggacctaaccaggtagatgaactgaaatccatggaagaagagctggataagatggagagagaggcgtgttgttttggcagtgaggatgagagctcttcaaaagctgagacagagtactcttttgatgactgggactggcaaaacggttcactcagttcactcagccttcctgagtcaaccagagaagccaagagcaatttgaacaacatgtccacgactgaggagtatctcatcagtaagtgtgtgctggatctaaagattatgcagacaataatgcacgagaatgatgataggctgaggaatatcgagcagatattagatgaagtcgagatgaaacagaaggaacaggaagagcgcatgtctttatgggccacttcaagagagtttacaaatgcctacaagttacctctggccgtgggccctccatctttaaactatattcctcctgtcctacagctttcagggggtcagaagccagacaccagtggcaactacccaaccctaccaagatttccaagaatgctgccgactctttgtgaccctggaaaacagaacacagatgaacaatttcagtgcactcaaggagccaaggacagtttggaaacaagcaggatccaaaataccagtagccagggaagacctagagagtccactgcccaagccaaagccacacagtttaatagtgcactcttcactctgtcaagccaccggcagggaccttctgcatcacccagctgtcactgggactctaccaggatgagtgtggaacctgtttcttctgaaatctataatgcagagtccagaaataaagatgatggaaaggtacacttaaaatggaaaatggaggtgaaagaaatggcaaagaaagcagctactggacagctcacagtacctccttggcatcctcagagtagtctgactttagagagcgaggctgaaaatgagcccgacgccctgctgcagccccccattaggagcccagaaaacacggattggcagcgagttattgagtatcatagggaaaatgatgagcccagaggaaatggcaagtttgacaagacgggcaacaatgactgtgacagtgaccagcatggcagacagcccaggcttggaagcttcaccagtatcaggcacccatctcccagacaaaaggagcaaccagagcatagtgaagccttccaagcaagttctgacacattggtggctgtagagaaatcttacagtacctcgagtcccatagaagaggactttgaaggaatacaaggtgcatttgcccaacctcaagtctctggtgaggaaaagttccaaatgagaaaaattcttggaaagaatgctgagattttgcccaggtctcaatttcaacctgtacgaagtactgaagatgaacaagaagagacatcaaaggagtcaccaaaggaactgaaagagaaagacatatcattgacggatattcaagacctgtctagtatctcctatgaaccagacagctcttttaaggaagcttcatgcaaaacacccaaaataaaccatgcacctaccagtgtcagcactccactcagcccagggtccgtttcttcagctgccagtcagtataaagactgccttgaaagtatcacatttcaggttaagacagagtttgcctcttgctggaacagtcaagaatttattcaaactttgtctgatgactttataagtgtccgagagagagcaaagaaactggattctctccttacttcctctgaaactcccccttcaagactgactggtcttaaaagattgtcttcatttattggggctggatcccccagccttgttaaggcatgtgactcatcaccaccccatgccacccagagaaggagcctgcctaaagtagaagccttctcacagcatcacattgatgagctgccaccaccatctcaggagctacttgatgacattgagctcttgaaacagcagcagggctcatccacggtgttgcatgagaacacagcaagtgatggaggaggcactgcaaatgatcaaaggcacttagaagaacaagaaactgacagtaaaaaagaagatagtagtatgcttttgtccaaagaaactgaagatcttggagaggacacagagagagctcactctactctggatgaggacctggaaagatggctgcagccacctgaggagagcgtggagctacaagaccttcccaagggctctgaaagggagacaaatatcaaagatcaaaaagttggtgaagagaaaagaaaaagggaagatagcattacaccagaaagaaggaaatcagagggtgttctagggacttctgaagaagatgaactaaaatcctgtttttggaagcgactaggttggtccgaatcatccaggataatcgtgctggatcagagtgacttgtcagactgattggaattggatcatagacggactcctggcctgagtttgagtgtcctggttgtaagctcctttcttctctttctgcttcagttgctgtcagggcagcagttccagttctgtaagtctcactttgttcagctgccacaatagacatcatcgtttggccctctctgttagcagcacattcaaccatttgttttcagtcagatttctgaaaagtgagaggtagttttgatagtaaaaatttttggttgtgcctagaatggctttggttttgttgatgttaattttcaaaaactttaactcttgttatataataaaatgtttaattttaataaca

SEQ ID NO: 190183 - DNA, 4927 bp, Homo sapiens
  Payload ID: 17556
  Gene Symbol: TEX14
  Gene Name: testis expressed 14
  Uniprot ID: Q8IWB6
  ENST ID: ENST00000389934
  CDS Start-End: 119-4594
atcagtccgcattccccgcacccacccacgtcttcccgggagtcgtatcccgagcatggaggttactgagaccgttatttcttcatggcctgcctagcttaagcagtagctggaaaagatgtctcgggctgttcgtcttccagtcccctgtcctgttcaacttggtaccttaagaaatgactccctggaagctcagcttcatgagtatgtcaaacaagggaactatgtgaaagtgaagaaaattcttaagaaaggaatttatgttgatgcagttaactccttgggccaaacagcactttttgttgcggcgttattgggccttaggaaattcgttgatgttctggtggattatggatcagatccaaatcaccgctgctttgatgggagcacccctgtccatgcagcagcattttcgggcaatcagtggatccttagcaaactgctggatgcaggaggtgacctgcgactccacgatgagaggggtcaaaacccgaagacttgggctttgacagcaggaaaggagcgtagcacccagatagtggagttcatgcagcgctgtgcctcacacatgcaggccatcatccagggcttctcttacgacctcctgaagaagatagactccccgcagcggcttgtctacagcccgtcctggtgtgggggcctcgtgcagggaaaccctaatggctctcctaaccgactgcttaaagctggagtcatttctgctcaaaatatctacagctttggttttgggaagttttatcttactggggcgacacagatggcctatctaggatctcttccggtcattggagaaaaggaagtgattcaagctgatgatgagcccaccttctctttcttcagcggcccctacatggtcatgaccaacctagtgtggaatgggagcagggtcacagtgaaagagctgaatctccccacccacccacactgcagcaggctgcggctggccgacttgttaattgccgagcaggaacacagcagcaagctgcggcacccctacttgctacagttgatggctgtgtgtctctcccaggacctagagaaaacccgccttgtgtacgagcgcatcactatcggcacattgttcagtgtccttcatgaacgacggtcccagttcccagtgctgcacatggaggtgattgtgcacctgctgctccagatatctgatgccctgagatacctgcatttccaggggtttatccaccgctccctcagctcctatgctgtccatatcatctccccaggtgaagcgaggctgaccaacctggagtacatgttggaaagcgaggacagaggtgtacagagggacctgactcgagtgccccttcctacgcagctatacaactgggccgcaccagaagtgatcttacagaaggcagccacagtgaaatcagacatctacagcttttctatgatcatgcaggagattttaacagatgacataccctggaagggcttagatggctcagttgttaaaaaagccgtagtctcggggaattatttagaagctgatgtcaggcttccgaaaccttactatgatattgttaagtcaggcatccacgtcaagcagaaagaccgaactatgaaccttcaagatatccggtatattctgaagaatgacttaaaggattttactggagcccagagaactcaaccaaccgagagccccagagtgcagagatacggactccatcccgatgtcaatgtctatctaggactgacttcagaacaccccagagagacacctgacatggaaatcatagaactaaaggaaatgggcagtcaacctcattcaccaagggttcactctttattcactgaggggacactagatcctcaggccccagatccatgtctgatggccagggagactcagaatcaagatgctccttgccctgctccatttatggcagaagaggccagcagccccagcacaggtcagccaagcctctgcagtttcgaaatcaacgagatctactcaggctgcttgattttggaagatgacatagaagagcctccaggagctgcttcatctttggaggcagacggacctaaccaggtagatgaactgaaatccatggaagaagagctggataagatggagagagaggcgtgttgttttggcagtgaggatgagagctcttcaaaagctgagacagagtactcttttgatgactgggactggcaaaacggttcactcagttcactcagccttcctgagtcaaccagagaagccaagagcaatttgaacaacatgtccacgactgaggagtatctcatcagtaagtgtgtgctggatctaaagattatgcagacaataatgcacgagaatgatgataggctgaggaatatcgagcagatattagatgaagtcgagatgaaacagaaggaacaggaagagcgcatgtctttatgggccacttcaagagagtttacaaatgcctacaagttacctctggccgtgggccctccatctttaaactatattcctcctgtcctacagctttcagggggtcagaagccagacaccagtggcaactacccaaccctaccaagatttccaagaatgctgccgactctttgtgaccctggaaaacagaacacagatgaacaatttcagtgcactcaaggagccaaggacagtttggaaacaagcaggatccaaaataccagtagccagggaagacctagagagtccactgcccaagccaaagccacacagtttaatagtgcactcttcactctgtcaagccaccggcagggaccttctgcatcacccagctgtcactgggactctaccaggatgagtgtggaacctgtttcttctgaaatctataatgcagagtccagaaataaagatgatggaaaggtacacttaaaatggaaaatggaggtgaaagaaatggcaaagaaagcagctactggacagctcacagtacctccttggcatcctcagagtagtctgactttagagagcgaggctgaaaatgagcccgacgccctgctgcagccccccattaggagcccagaaaacacggattggcagcgagttattgagtatcatagggaaaatgatgagcccagaggaaatggcaagtttgacaagacgggcaacaatgactgtgacagtgaccagcatggcagacagcccaggcttggaagcttcaccagtatcaggcacccatctcccagacaaaaggagcaaccagagcatagtgaagccttccaagcaagttctgacacattggtggctgtagagaaatcttacagtcatcagtccatgcaatcaacttgttcaccagagtcttctgaggatataacagatgaatttttaactccagacggtgaatatttttactcctcgactgctcaagaaaacttagctctagagacctcgagtcccatagaagaggactttgaaggaatacaaggtgcatttgcccaacctcaagtctctggtgaggaaaagttccaaatgagaaaaattcttggaaagaatgctgagattttgcccaggtctcaatttcaacctgtacgaagtactgaagatgaacaagaagagacatcaaaggagtcaccaaaggaactgaaagagaaagacatatcattgacggatattcaagacctgtctagtatctcctatgaaccagacagctcttttaaggaagcttcatgcaaaacacccaaaataaaccatgcacctaccagtgtcagcactccactcagcccagggtccgtttcttcagctgccagtcagtataaagactgccttgaaagtatcacatttcaggttaagacagagtttgcctcttgctggaacagtcaagaatttattcaaactttgtctgatgactttataagtgtccgagagagagcaaagaaactggattctctccttacttcctctgaaactcccccttcaagactgactggtcttaaaagattgtcttcatttattggggctggatcccccagccttgttaaggcatgtgactcatcaccaccccatgccacccagagaaggagcctgcctaaagtagaagccttctcacagcatcacattgatgagctgccaccaccatctcaggagctacttgatgacattgagctcttgaaacagcagcagggctcatccacggtgttgcatgagaacacagcaagtgatggaggaggcactgcaaatgatcaaaggcacttagaagaacaagaaactgacagtaaaaaagaagatagtagtatgcttttgtccaaagaaactgaagatcttggagaggacacagagagagctcactctactctggatgaggacctggaaagatggctgcagccacctgaggagagcgtggagctacaagaccttcccaagggctctgaaagggagacaaatatcaaagatcaaaaagttggtgaagagaaaagaaaaagggaagatagcattacaccagaaagaaggaaatcagagggtgttctagggacttctgaagaagatgaactaaaatcctgtttttggaagcgactaggttggtccgaatcatccaggataatcgtgctggatcagagtgacttgtcagactgattggaattggatcatagacggactcctggcctgagtttgagtgtcctggttgtaagctcctttcttctctttctgcttcagttgctgtcagggcagcagttccagttctgtaagtctcactttgttcagctgccacaatagacatcatcgtttggccctctctgttagcagcacattcaaccatttgttttcagtcagatttctgaaaagtgagaggtagttttgatagtaaaaatttttggttgtgcctagaatggctttggttttgttgatgttaattttcaaaaactttaactcttgttatataataaaatgtttaattttaataacaga

SEQ ID NO: 190184 - DNA, 676 bp, Homo sapiens
  Payload ID: 17556
  Gene Symbol: TEX14
  Gene Name: testis expressed 14
  ENST ID: ENST00000581147
  CDS Start-End: 1-457
taaggaagcttcatgcaaaacacccaaaataaaccatgcacctaccagtgtcagcactccactcagcccagggtccgtttcttcagctgccagtcagtataaagactgccttgaaagtatcacatttcaggttaagacagagtttgcctcttgctggaacagtcaagaatttattcaaactttgtctgatgactttataagtgtccgagagagagcaaagaaactggattctctccttacttcctctgaaactcccccttcaagactgactggtcttaaaagattgtcttcatttattggggctggatcccccagccttgttaaggcatgtgactcatcaccaccccatgccacccagagaaggagcctgcctaaagtagaagccttctcacagcatcacattgatgagctgccaccaccatctcaggagctacttgatgacattgttgctgtgtaaaccttccattcacctcctccatttcagcagctgtgttaccagactttgtcctgggctctggccttatggtgctgctgcaccccagcacagtctgcagaagccttccctcatttcacttatgggaattatctggaccaggtttctagagctcttgaaacagcagcagggctcatccacggtgttgcatgagaacacagcaagtgatggaggaggcactgc

SEQ ID NO: 190185 - DNA, 4834 bp, Homo sapiens
  Payload ID: 17556
  Gene Symbol: TEX14
  Gene Name: testis expressed 14
  ENST ID: ENST00000582740
  CDS Start-End: 109-309
attccccgcacccacccacgtcttcccgggagtcgtatcccgagcatggaggttactgagaccgttatttcttcatggcctgcctagcttaagcagtagctggaaaagatgtctcgggctgttcgtcttccagtcccctgtcctgttcaacttggtaccttaagaaatgactccctggaagctcagcttcatgagtatgtcaaacaagggaactatgtgaaagtgaagaaaattcttaagaaagctctggagttgccacaaacagcgttgagatcagaggaagagtggagaagcaaggaggagaattaacagagcattgctgcatcctgcagtgcggaggagggaagaaattggaatcggcctgggaatttatgttgatgcagttaactccttgggccaaacagcactttttgttgcggcgttattgggccttaggaaattcgttgatgttctggtggattatggatcagatccaaatcaccgctgctttgatgggagcacccctgtccatgcagcagcattttcgggcaatcagtggatccttagcaaactgctggatgcaggaggtgacctgcgactccacgatgagaggggtcaaaacccgaagacttgggctttgacagcaggaaaggagcgtagcacccagatagtggagttcatgcagcgctgtgcctcacacatgcaggccatcatccagggcttctcttacgacctcctgaagaagatagactccccgcagcggcttgtctacagcccgtcctggtgtgggggcctcgtgcagggttttatcttactggggcgacacagatggcctatctaggatctcttccggtcattggagaaaaggaagtgattcaagctgatgatgagcccaccttctctttcttcagcggcccctacatggtcatgaccaacctagtgtggaatgggagcagggtcacagtgaaagagctgaatctccccacccacccacactgcagcaggctgcggctggccgacttgttaattgccgagcaggaacacagcagcaagctgcggcacccctacttgctacagttgatggctgtgtgtctctcccaggacctagagaaaacccgccttgtgtacgagcgcatcactatcggcacattgttcagtgtccttcatgaacgacggtcccagttcccagtgctgcacatggaggtgattgtgcacctgctgctccagatatctgatgccctgagatacctgcatttccaggggtttatccaccgctccctcagctcctatgctgtccatatcatctccccaggtgaagcgaggctgaccaacctggagtacatgttggaaagcgaggacagaggtgtacagagggacctgactcgagtgccccttcctacgcagctatacaactgggccgcaccagaagtgatcttacagaaggcagccacagtgaaatcagacatctacagcttttctatgatcatgcaggagattttaacagatgacataccctggaagggcttagatggctcagttgttaaaaaagccgtagtctcggggaattatttagaagctgatgtcaggcttccgaaaccttactatgatattgttaagtcaggcatccacgtcaagcagaaagaccgaactatgaaccttcaagatatccggtatattctgaagaatgacttaaaggattttactggagcccagagaactcaaccaaccgagagccccagagtgcagagatacggactccatcccgatgtcaatgtctatctaggactgacttcagaacaccccagagagacacctgacatggaaatcatagaactaaaggaaatgggcagtcaacctcattcaccaagggttcactctttattcactgaggggacactagatcctcaggccccagatccatgtctgatggccagggagactcagaatcaagatgctccttgccctgctccatttatggcagaagaggccagcagccccagcacaggtcagccaagcctctgcagtttcgaaatcaacgagatctactcaggctgcttgattttggaagatgacatagaagagcctccaggagctgcttcatctttggaggcagacggacctaaccaggtagatgaactgaaatccatggaagaagagctggataagatggagagagaggcgtgttgttttggcagtgaggatgagagctcttcaaaagctgagacagagtactcttttgatgactgggactggcaaaacggttcactcagttcactcagccttcctgagtcaaccagagaagccaagagcaatttgaacaacatgtccacgactgaggagtatctcatcagtaagtgtgtgctggatctaaagattatgcagacaataatgcacgagaatgatgataggctgaggaatatcgagcagatattagatgaagtcgagatgaaacagaaggaacaggaagagcgcatgtctttatgggccacttcaagagagtttacaaatgcctacaagttacctctggccgtgggccctccatctttaaactatattcctcctgtcctacagctttcagggggtcagaagccagacaccagtggcaactacccaaccctaccaagatttccaagaatgctgccgactctttgtgaccctggaaaacagaacacagatgaacaatttcagtgcactcaaggagccaaggacagtttggaaacaagcaggatccaaaataccagtagccagggaagacctagagagtccactgcccaagccaaagccacacagtttaatagtgcactcttcactctgtcaagccaccggcagggaccttctgcatcacccagctgtcactgggactctaccaggatgagtgtggaacctgtttcttctgaaatctataatgcagagtccagaaataaagatgatggaaaggtacacttaaaatggaaaatggaggtgaaagaaatggcaaagaaagcagctactggacagctcacagtacctccttggcatcctcagagtagtctgactttagagagcgaggctgaaaatgagcccgacgccctgctgcagccccccattaggagcccagaaaacacggattggcagcgagttattgagtatcatagggaaaatgatgagcccagaggaaatggcaagtttgacaagacgggcaacaatgactgtgacagtgaccagcatggcagacagcccaggcttggaagcttcaccagtatcaggcacccatctcccagacaaaaggagcaaccagagcatagtgaagccttccaagcaagttctgacacattggtggctgtagagaaatcttacagtacctcgagtcccatagaagaggactttgaaggaatacaaggtgcatttgcccaacctcaagtctctggtgaggaaaagttccaaatgagaaaaattcttggaaagaatgctgagattttgcccaggtctcaatttcaacctgtacgaagtactgaagatgaacaagaagagacatcaaaggagtcaccaaaggaactgaaagagaaagacatatcattgacggatattcaagacctgtctagtatctcctatgaaccagacagctcttttaaggaagcttcatgcaaaacacccaaaataaaccatgcacctaccagtgtcagcactccactcagcccagggtccgtttcttcagctgccagtcagtataaagactgccttgaaagtatcacatttcaggttaagacagagtttgcctcttgctggaacagtcaagaatttattcaaactttgtctgatgactttataagtgtccgagagagagcaaagaaactggattctctccttacttcctctgaaactcccccttcaagactgactggtcttaaaagattgtcttcatttattggggctggatcccccagccttgttaaggcatgtgactcatcaccaccccatgccacccagagaaggagcctgcctaaagtagaagccttctcacagcatcacattgatgagctgccaccaccatctcaggagctacttgatgacattgagctcttgaaacagcagcagggctcatccacggtgttgcatgagaacacagcaagtgatggaggaggcactgcaaatgatcaaaggcacttagaagaacaagaaactgacagtaaaaaagaagatagtagtatgcttttgtccaaagaaactgaagatcttggagaggacacagagagagctcactctactctggatgaggacctggaaagatggctgcagccacctgaggagagcgtggagctacaagaccttcccaagggctctgaaagggagacaaatatcaaagatcaaaaagttggtgaagagaaaagaaaaagggaagatagcattacaccagaaagaaggaaatcagagggtgttctagggacttctgaagaagatgaactaaaatcctgtttttggaagcgactaggttggtccgaatcatccaggataatcgtgctggatcagagtgacttgtcagactgattggaattggatcatagacggactcctggcctgagtttgagtgtcctggttgtaagctcctttcttctctttctgcttcagttgctgtcagggcagcagttccagttctgtaagtctcactttgttcagctgccacaatagacatcatcgtttggccctctctgttagcagcacattcaaccatttgttttcagtcagatttctgaaaagtgagaggtagttttgatagtaaaaatttttggttgtgcctagaatggctttggttttgttgatgttaattttcaaaaactttaactcttgttatataataaaatgtttaattttaataaca

SEQ ID NO: 190186 - DNA, 10187 bp, Homo sapiens
  Payload ID: 17557
  Gene Symbol: TEX15
  Gene Name: testis expressed 15
  Uniprot ID: Q9BXT5
  ENST ID: ENST00000256246
  CDS Start-End: 76-8445
ggacagacagagcacagtttagcagaaattagagacacttctcaagtacttgcacatgattcagacatttcacttatgcccagtgatgccaaagacagtgttaatggtgaccttttgttaaattggacaagtcttaaaaatattttaagtggtcttaatgcttcttttcctcttcacaacaatactggctcaagcacagtcactacttcaaaatccatcaaagacccaagactgatgaggagagaagaaagtatgggagaacagagtagtactgcaggcttaaatgaggttttgcaatttgagaagagttcagataatgttaattcagaaataaaatcgacaccatctaattctgcctcctcctcagaagttgtccctggtgattgtgctgttcttactaatggtttggataccccttgctttaaaacttctgttaatgattcacaatcttgggctcacaacatgggctctgaggactatgactgtatacctcccaataaagttaccatggcagggcaatgtaaggaccaaggtaatttttccttcccaatttctgtgtcaaatgtagtgtcagaggttgagaaccaaaaccacagtgaggagaaggctcagagagcccaacaggagtccggtaatgcttatacaaaagagtacagtagtcacatttttcaggactcgcagtcttctgatttaaaaacaatttatcagactggttgccaaacgtctacagtttttccactcaaaaagaaagtaagcattgatgaataccttcaaaatactggaaagatgaaaaacttcgctgacctggaagacagttccaaacatgaagaaaagcaaacttcatggaaagaaattgataatgatttcactaatgaaacaaaaatcagtccaatagataattacattgttttgcaccaagaatacaaagagagtgagagtcataattcttttgggaaaagctgtgataaaatattaattactcaagagttagaaataacaaaatcttctacatctaccataaaggataaggatgaactagatcatctagcattggaatggcaaattactccaagttttgagagcctgtcacaaaagcatcctcagcactctgtggagtatgagggtaacattcatacaagtttagccattgctcaaaagctaatggaactgaaattggggaaaataaatcaaaattatgctagcattataactgaagctttcccgaaaccaaaagacataccccaggccaaagaaatgttcattgatacagttatttcatcttataacatagaaacagctcatgacagttcaaattgcagcataactagagaacatatatgtgtccataggaaaaatgaaaatgaaccagtgtcattagagaacattcagagagactataaagaaactgcttatgttgaagataggggtcaggatcacaatctgttctgtaattcacagttaagcaatgatatatggctgaatgttaatttcaaaaaacaaacagatagagaaaaccaaaatgaggctaaagagaatagtgcttcatgtgtagaaaacaacatagagaacatatatggagacaaaaagcaggattctcatacaaacgaaaatttcagcaatatagatgaaaaggaggacaaaaattaccacaatatagaaattttgagttctgaagaattttctactaaatttaacttgatttgcagagaagataatgcagtgtcagcagcaactgcattattagagagtgaagaagataccattagtgccgtgaaacaaaaagatactgaaaatactggaagaagtgtagagcatttggcttccacgacatttcccaaaactgcaagttcttcagtgtgtgtagcctcaaatgctgcaatacagatagctagtgctactatgcctgcattaagcctaaataatgacgatcaccagatataccagtttaaagaaacttgttcttctgaaagtccagattttggtttgttagtaaaacatagggtttctgattgtgaaattgatacggataaaaataaatcacaagaatcatttcatcaatcaataaatgagaacttagttcttcagagcattgaattggaaagtgaaattgaaatagaattagaagattgtgatgatgcttttatatttcaacaagatacacatagccatgaaaacatgctttgtgaagaatttgtgacctcatataaggctctgaagtctcgtatcagttgggaaggtctgttagcacttgataacggggagatggaagttttggaaagcaccacaggaagggagaatagtgatcagcattattctaaggaaagtaactatttttattcctctacacaaaacaatgaaacagaacttaccagcccaattttacttccagatctacaaattaaaattactaatatatttaggccaggattcagcccgacagctgactcccttgcattgaaagatagtttttgcacacatgtaactgaagccacaaaaccggaaataaataaggaagatggagaaattctaggatttgacatttattcccagccttttggtgaaaatgcagattatccatgtgaagataaagttgataatataaggcaagaatcagggccagtgagtaactctgaaatctccctttcttttgacttgagtcgtaatacagatgtgaatcatacgtctgaaaatcagaacagtgaatctttgtttactgaaccttctaatgtcacaacaatagatgatggaagcagatgtttctttacaaaatcaaaaactgactataatgataccaaaaataaaaaggaggtagaatcaagaattagcaaaaggaagctacatatatcttccagggatcagaacataccacataaagatttaagacgacataaaatttatgggagaaagaggaggctaaccagtcaagactcatctgagtgtttctcttcattatcccaaggacgaattaaaacattttcacagtcagaaaagcacattaagagtgtcctaaatatcctaagtgatgaagcatctttatgtaaaagcaaatgtctttccagaaaactagacaaagcagttgttcacttaaaaaaagctcatagaagagttcacacatctttgcagcttataactaaagtaggagaagaaagaaagggcccattaccaaaatcatatgcaataatatgcaataatttctgggaaagttgtgaccttcaaggttatagttctgtgtctcaaagaaaatattattctactaagcatttttcgtcaaaaagaaaatatgacaaacggagaaagaaaagagctccaaaagctgatatttctaaatcattaacccatgtgtcaaagcacaagtcttataaaacaagtggagagaaaaaatgcctttctaggaaaagtatggctagcagtgtctcaaaaagtcaccccaccaccagtcacatgggagaattttgtaatcaagaacatcctgaatcacagttgcctgtatcctccacatcccaaagtacaagtcagtcagtttattataatagcagtgtaagcaatccaagtttatcagaagaacatcagcccttttctggaaaaactgcatatctgttttccccagaccactcagatgagaaactaatagaaaaagaaaatcaaattgatacagcatttttatctagcactagtaaatatgaaaagcttgaaaaacattcagcaaatcataatgttaaagatgcaactaaagaaaacagttgtgacgctaatgaagtaataaatgaaagtaattctgtatctttaagttgcataaaagaaaacataaattctagtacaggcaacgattgtgatgcaacttgcataggtcacacaaaggcgaaaactgacgtacttatatcagtcttagattcaaatgtgaagcactttttaaatgatctctaccaacaaggtaaccttattttatctgattgtaaaagaaacctggaagtaaagtggacagatcctattgagagacccaaacaaaacattattacaggaaacttccttatgggcccattaaacctaactttgatagcaagtaaaaagtacagtattcctcagttatcagccgctgcagtgacagatagtgagggagaatcttcaaaatcttacttggataagcagagaattcttactgtagattcttttgcagcatccagtactgtaccacactgtgagcagagctgtagagaaaaagagcttctaaagacagaacagtgctcttcaggtaattgcctccatacagatgggaatgaaacaaatgtcactgagaattatgagttggatgtagcatcaggaactgaagaagataaaagttatggggaaaatatagtggaattatcttccagtgatagttctctgcttttaaaagataatgtaaaaggctcctcttcagaaacatgtattgtgaagaaagacactgaggacagaataacgtggaaagttaaacaagcggaaaaagcaaaagattctgtttacaaaagaagcatgactgaaggatcaactgttaatactgagtacaaaaatcaaaagaatcagatctcagaagaatcctgcttaaatgagaaaattattacaactaacttgattgattcccatctgagcactaaaaatactaccactgagtcagtccctttgaagaacacagtttctaatccgcttaacaaaagagagaagaagggggaaattaaagttagtaaagactcgcagtctgacttgacattacattcagaaatagcctatatttccaaaccaggaattctaggagttaatcatacgcctattttacctgcccactctgaaacctgtaaagtccctactcttctgaagaaacctgcgtcatacgtgagtgattttaaagaaaaacattgctcagctaatcatacggcccttatagctaatctatctcaaattttgcagagggcagatgaagcatcatctttgcagattctacaggaagaaactaaggtttgtctaaatattctccctttatttgtggaagcttttgaaagaaagcaagaatgttcagttgaacaaatcctgatttcaagagaactgttggtagaccaaaacctgtggaataattgcaaacacacattaaaaccatgtgctgttgacactttggtagaacttcaaatgatgatggaaacaattcaattcattgaaaacaaaaaaaggcacttagaaggtgaaccaacattgcgaagcttgctttggtatgatgaaacactgtatgctgagcttcttggaaaaccacgtggatttcaacagcagtctaatttctatcctggtttccaaggaagattaaaatataatgcattctgtgagttacagacttaccatgatcaattagttgaattgcttgaagaaacaaaaagggaaaagaattcatactatgtattcttaaagtacaaacgacaggttaatgaatgtgaagccataatggagcattgttccgattgctttgatttttctctttctgttccatttacctgtggagttaactttggagatagtttagaagacctggaaatcttaagaaaaagtactttaaagttgatcaatgtatgtggggactctcctaaagttcattcgtatccaggaaaacaggaccatctgtggattatcatagaaatgatctcctcaaaggttaattttattaagaacaacgaggcagtacgtgttaaaatatctctttatggtctggaacatatcttttttgatgctgcaaaaaatcttgtttggaaagagagaacacaatccttcagcaaaaaatactcacaaaagaaggacgaagaaaggctactcagagtgaataaatgtgccttttctaagttgcagaagatatatgatactttgtctaaagatttaaacaatgaaccaatttcccctattgggcttgaggaggatactataattgcttccagaaagtcagatcatccaataaacgaagcaacaattagcatagaaaattctaaatttaacagtaatttgcttgcacacccagatatttgttgtattagtgagatattggatcaggctgaatttgcagaccttaaaaaattacaggatctcaccttgagatgtacagatcacttagaaattttaaaaaaatactttcagatgctacaagataataacatggataatatttttatcacagaagaaaatgttttagacgtggtgataaaccacagccatgaggctatcattttaaagcctgaagctattgaaatgtatattgaaatcgtcatggtctcagaaacaattcactttcttaaaaactcaatagcaaagaaactagacaaacagaggtttcgaggtatgctttggtttgatttgtcacttcttcctgagctggttcagtgccaagaaaaaatggcttctttttcatttcttaaagataactcaacagatgtttgcctttggaaagtgatagagactgctgtttccgaacttaagaaagatctggatattatctgcaaatataatgaagctgttaattgctcatatgctattcatttgctctcaagagaacttcaagaactttcagaaataaaaaagcttctgaagaagtccaagtattttatttccacatatattgactttgtgccatatatagcatccataaattatggaagcactgtgacagagttagaatacaactacaatcaattttctacactgctgaagaatgtaatgtctgcccctaggaaagatttaggaaaaatggcccacattaggaaagtcatgaaaacgattgaacatatgaagatgatatgtactaaaaatgctgaactaaccatttcctttttcctatgccaaatgctgtataacagaaggaagattttacagctgaagagaaaagaaaaaatgaatattcatattgtaaaacctggggaaaataacaataaatttagtatttctacgatgttgcccccagtatcagagtgcataaacaaaaacatctcaaattcctctaaaaaacgaccgagcactgtagacaaatgtgaagactctcaggaacaacagcaagatactactgtttccagttgtaaaaagctaaaggtagacatgaaagatgtcacaaaaatcaacagagaaaaggcaacattcaagcatccaaggactacaggatctcatcccaaaagcgaaaacaaaatagtaccaagttcatgtgacagtctgaaaagaaatcatttaacgccaaaaaaggttgaaatgcaaagatcactacctggctcacttttacccttagagaacccaaaagacacttgcgcatcaaagtcggaaagcaaaatagacttaactgtttcatctgatcacttcagtggacaacaggaaaatttaaatagcatgaagaaaagaaatgtgaacttcagtgctgctgaaacaaaaagtgataagaaagattgtgctgcttttgcaatttgtgaccaaaaaagtgtacatggcacattttcaccagaccatgggacgcttttgcagaaatttcttaaaaattccccagatcccacccaaaaatcctgcctttctgatataaacccagaaactgatgtttctcttgtgcctgatgcgtcggtgctctcaaagccaattttctgttttgtgaaagatgtccatcctgatctagaaatgaatgacacagtctttgaacttcaagataatgatatagtaaattcatctattaaaaattcctcatgcatgacttctccagaacccatctgtatccagaacaaaattcctactctgcagataaacaaactacagcctacagaaactgagtcagaggacaaatacatgaaggatacattgaatcccaatactgtgcatacttttggagcatctgggcatataacccttaatgtgaatcaaggagcagagtactctctttctgaacaacagaatgacaaaaattcaaaagtcctaatgcagaatgctgccacatattggaatgaacttccacagtctgcatgtaacccaacatataattcttctgagcatttatttggaacttcatatccatactctgcttggtgtgtttatcagtacagcaacagcaatggcaatgccattacccagacataccaagggataacatcatatgaagtacagccatctccttctgggctgttgaccacagttgcaagtactgcccagggcacacattctaatcttctgtactctcaatattttacttattttgcgggggagccacaagcaaatggctttgtgccagtgaatgggtattttcaatctcaaatacctgcttctaattttcggcagccaattttttcacaatatgcttctcatcagccattaccacaagctacatacccttaccttcctaatcgatttgtgcctccagaagttccttgggtttatgctccatggcaccaagaatcctttcatccaggacactgaaaatagtcttctgtctattgaaataagacataacaagtttttccaaatattttttacttatatattttttaacatttagcgatttttaatgtttgtaaatgtggtaggaaatataaatcatatggtcctttgtaaaatatacaaataatctaacacatatcatataggacatcaatttctaacatctgatataccagaattatttccatgcaattataaggggagggtaatatgatcaaagttaagcaatagtggtaaaatctttaaaactagattcttgcttctgatatgtttcaatacattgttgatggcattgtgccatttgagctgaaagcaggattttttttcattagtcatcaaaccaagaattttataattcttgacactttattatataatttacaattctatgccagatatggcaaatttcttcaatttcagtattttatagtttctacttgtaaaatatttttaataagaaaaattggtttgcataatctcagtgtttccttgagtagagatgttttaaatgtttatgttggaagcaattgtagttaattatattggcaatgaagcactttcaatgcctttttctacaagagccatttccagaagattattttgtttttggatttcacaatttaaatagttattttaatgattttctagcaaataatagagaataatgtttatgcttatgcagttagtctttattacagtaatttaaacaatgtggcacaaacatagttttttcatgctcttgtcatagacttttctttttaaccttctgcaaaagtaaaaactctcttagtaataatcatcatagggcaacaggatatagtatgtaactgcagtcttgagctgtctcttttcatgtattacctttcttgctcaacagctattcctgttttctgtaagatcctagtcagacagagccctcacaactggatagacctttctcaagggttagccctaaaatgtgacaagagaattggtttggctgaatcacaacaaataactagcaaagcttcagtgcttttgcaaactttttatgtaagcaaactttttgtgttatctggcacaggcctttgaaaagactataattctactttgtttaatgtagagtaactaatttttcaatttagaaagacagtgagaatccccaggataagcctctttatactcacttaaaccaactgggatggaattcagaatacctaagctgcttctttaacatagagatctttaaaaagggaaggtcaagcaaagaactgtaaccgaaagaagtaagagatttgaaaagacgatagagttaaaacaatatttaaaaaacatttctatttggtccatgcagttttatttgaaaatagtctgtcaaaatcagaactcctgaacaactttgaaagcagtaatattaactggtattcaaaaatgaataacagccaaaaatgaataacagccatttgatttatgtttccctcagtcatttggtttatgtttggttatggcaagatgttacagcatttatagttaatactactactaatatgtaaaccaaaagttaaatattctagttaaggattgtttctttaaacaactttcagattctgttgacattgtctttgtggtatttttatttcatgggttttaatttctcttaaagacttacctaaatattcagttacatttttaaaaaatctgtacgtgacagaatattaaaacatggaatatttttgcttcaa

SEQ ID NO: 190187 - DNA, 1936 bp, Homo sapiens
  Payload ID: 17558
  Gene Symbol: TEX19
  Gene Name: testis expressed 19
  Uniprot ID: Q8NA77
  ENST ID: ENST00000333437
  CDS Start-End: 311-805
ctttccctgggtgcccacatgaacagagacaccaggatgctctcctgagaccacagcaactgcagaagctgaagacatttccagaagttcaagcttccaccctctgcaggtccccactgagctgggacccaggtcatccaccccaccccaaatccctggataggaaacccctttctcctcctgctccttgtccccttcatccctgccgcccagcatcctactggcctcagcacctgtggccagaccgtccaagatcctctgaaggcccagctcttgctgtccaccccggcagtaggcaggcagcctggccatgtgccctccggtcagcatgcggtatgaggaagagggcatgtcctacctctacgcctcctggatgtatcagcttcaacatggagatcagctaagcatttgcttcacctgcttcaaggctgcctttctagactttaaagacttgctggagtcagaggactgggaagaagacaactgggaccctgagctgatggagcacactgaggcagagtcagagcaggaggggtcctcagggatggagctgagctgggggcagagcccaggacagcctgtgcaggggggctctgaggcatgggggccagggaccctggcagcagccccagaagggttggaagatgcaggtctggacccccactttgtccccactgaactatggcctcaggaggctgtgcccctgggcctgggccttgaggatgctgactggacccagggtcttccctggagatttgaggagcttcttacctgctcacactggccaagcttctttccttcatagcaggggtttctcaaagtggacctgcccccaggggagcccgtggtgttgaagctgggcattacctgggcagtggaccctgccgaggctgaggcctagttactggccctgcagcttgtctccatggtgggctgctatgataccatctacctacagaagatgaccccagacagggccctgaggaccccagggcagcactggaaattgctgctggagcctggtgaagtgtgggtggtgagactccaagatgcaccccaagagcaggacctgcactggtggatgctgagcattctagaaacatcgttaacaggacacagggcagagctggtccctgcagcctcagccctgcagaagaggattcaccatagtctcttattcaccctggaccaacagggagagcaagaagggagactcagcctgtaagccacagtcctccagccaagaacaggatctcagcacccctgagacacagagcaggggtcctgaggaaagcctggctgttgcaggagcctcggccatgggggagctgccctgtttccagcctcagtccagggccccagaactgagagactaaggctcatgtagctgccattgtcctgggcacaccaggacatcagagactgggaagggccagcaattgctgttccacaacagccaggggagcagttggcaaaggaaacatggggagcaactttaggggctgggagatagggcctgttgtggcctcagagggaagcattacaaatattcataacctggaaacaagttcttaccagttgattgtcacatagttctggatgtgttggcctgaatggctgttgtgctgcttgtgacatggggggcagggcacagaacttgtgcctatttcaccttggccatggggagggacattgcttgtaaaacacatgctctgcagaacacaccagaatctgtggtgacctggatgtgttctcgactttgccaggacaatctcaggggtgccacaagaccctgtcagcagcactaggatctctggtctacagtggagggagagctggttttaaatgttggccgttgatgcaatttaaccatttaattcctgttgctctatatgttgtttttaattttaaaaagtcataaaagctttcaaacaag

SEQ ID NO: 190188 - DNA, 5232 bp, Homo sapiens
  Payload ID: 17559
  Gene Symbol: TEX2
  Gene Name: testis expressed 2
  Uniprot ID: Q8IWB9
  ENST ID: ENST00000258991
  CDS Start-End: 86-3490
gtcgcgcggccgggagcacgggcgccggcatagtacaatgaggcagccagcggatcttggagcctgagcccttgtgaagccggcaatgacaagtctgtatggtcgccatgccgagaaaaccactgacatgccaaaaccatcagcccctaaagtgcacgtgcagaggtccgtgtcccgagataccatcgccattcacttctcggcatccggcgaggaggaggaggaagaggaggaggagttcagggagtactttgaggaggggctggatgaccaaagcattgtaacagggctggaagccaaggaagacctctatcttgaaccccaagttggccatgaccccgccggccctgctgcctcgcctgtcctggcagatggactgtccgtgtcccaggcccctgccattttgcccgtctccaagaacactgtaaagctgttggagtcccctgttccagcagcacaagtattaagtacagtgccattggctgtgtccccagggtcgtcttcgtcggggcccttagctagctctcccagtgtgtcatccctttctgagcagaaaaccagttcttcctccccattgtcctctccttctaagtctcccatcctctcatccagtgcctcaacctccaccctttccagtgcaaaacccttcatgagccttgtgaagtccctgtcgaccgaggtggagccaaaagaatccccacaccccgcaaggcacaggcacttgatgaagacattagtcaagtctctgtccacggacacttcccggcaggagtcggatacagtgtcctataagccacctgattccaaactgaacttacacctgttcaagcagttcacacagccccgaaacacaggtggagattccaaaactgcaccttcttccccactgacttctccctctgatactcgttccttttttaaagtgcccgaaatggaggctaaaattgaagatactaaacgacgcctttcagaagtcatctatgagccttttcagctccttagtaaaattataggggaagaaagtggcagccataggcccaaagccttatcttcaagtgcttcagaactctccaatctgtccagcttgaatgggcacttggaaagcaataacaactacagcatcaaggaggaggagtgtgattctgagggggatggctacggaagtgattccaacatccccagaagtgaccacccaaagtccactggtgagcccacaagagagatagaactgaaaagttcccaggggagcagtctgaaggatttaggcctgaagacaagttctctagttctggagaaatgttctttgtctgccttagtgagcaaagaagatgaagagttttgtgaactgtacactgaggacttcgatttggaaacggagggggagagtaaagttgataagctctcagatattcctctcaagccagaggtgctcgcggaagatggtgtggtccttgacagtgaggacgaggtggactcggccgtgcagcacccggaattgccagtgaagacgttgggcttctttataatgtgtgtctatgtgtacctcatcctccccctcccccactatgtgagtggactctttctgggaattggccttggattcatgactgcagtttgcgtgatttggttttttacaccaccaagtgctcataaatatcacaagttacacaaaaatctgcgacactggaacacaagatctctggatatcaaagaacctgaaatactgaagggatggatgaatgagatttacaactatgatccagaaacctaccatgcgactttgacacattcagtctttgttcgacttgagggtggaaccttaagactttcaaagcccaataaaaatatatccaggagggccagctacaatgaacccaagccagaggtcacctacatcagccagaaaatctatgacctctcagacagcaagatttatcttgtacctaaaactttggctcgaaagcgaatctggaataaaaagtaccccatttgtatcgagcttggtcagcaagatgactttatgtctaaagctcagactgataaggagacttcagaagagaagccgccagctgagggaagtgaggaccctaagaagccaccccgccctcaggagggaacaagatctagccagcgagatcagatactctatctctttgggagaactggccgagaaaaagaggaatggtttaggagatttattctggcatctaagctaaagtcggaaatcaagaagtcatcgggtgtctctggaggtaaaccagcccccgtcttcttggctccagggcttttgcctgcacacagcagacacaacagtccgtccgggcacctgacccacagccgcagcagcagcaaaggcagtgtggaggagatcatgtcacagccaaagcagaaggagctggcaggcagcgtgcggcagaagatgcttctcgactacagcgtgtacatgggcaggtgtgtcccccaggaaagccgaagcccccagaggagccccctgcagagtgcggagagcagccccacagctgggaagaagttgccagaggttccaccctctgaggaggaagaacaggaagcctgggtgaatgccttgcttggaagaatattttgggacttcttaggagagaaatactggtctgatctggtgtctaagaagatccaaatgaaactcagcaaaataaagctcccctactttatgaatgagctcactctgacggaacttgacatgggcgtggctgtgccaaaaatcctccaggccttcaagccttacgttgatcaccaaggactctggattgatttggaaatgtcctacaatgggtcctttctgatgactctcgagaccaaaatgaatttgaccaaactaggtaaagagcctcttgttgaagccctgaaggttggagaaattggcaaagaaggttgcaggccccgggcattctgtctggcggacagcgatgaggaatcctccagcgctggctcctccgaggaagacgatgccccagagcccagcgggggagacaaacagctcctcccaggggctgaagggtacgttggaggtcatcgaacaagtaagattatgaggtttgttgataaaattaccaagtcaaaatatttccaaaaagcaacagagacagagtttattaaaaagaagatcgaagaagtctccaacacacccctgctgctcactgttgaagtacaagaatgtagaggaaccttggcggtcaacattccaccacccccgactgaccgagtatggtatggtttccgaaagccaccacatgtggagctgaaagctcggccaaaacttggagagagagaagtgactttagttcatgtgacagactggatagagaagaaactggagcaagagtttcagaaagtttttgtcatgccaaacatggatgatgtttatatcactataatgcactcagccatggaccctcgctctacttcctgcctcctgaaagacccacctgtggaggctgctgatcagccatgatgggtgatgtcagatgttccccatattgtgacatcgagctggatgtgtggggttcttggccgccatctgtactgtagcactggcctctgtgccacagctactgtttcttaaaggactgcttctgccctctgcctgccagtgcccattccactgtgaggtgtcattccctgcatctagtgacaactgtctggattgcctgctgcaaagctttgatttggcaaaggagaccatggaagaatcatggtggatccagaagttatacgtgacccacaccatggcttttaaaagtctacccatgtttgtggcagcaaatgagcacagtaagagcaaagctgaacaacttgcctcctctactcctccaaagcttttcttcaggcagccggtgcacagtggactttttcacttctatactttgtatgcggccttccacacttccagagaatgtcagtgtgcaatgtgtctggagggtggggagaggaattctgtgagccttttcatttcggtgacagaagagatgggcagagcaacttattttccacattaaattgtgcatttgggaagcaagtagccatagtacacacacaacacgctatcagcttgggtaaggacagtgggatttatgtgaacatcaggcaaagccatgagatcaaaccatcccaagcctttcaccaatgaggtacaaccacctgggggctagctaatcttgaatgttttcctgagacaggagcgtatgtgaaaacatcaaacactgcacatgacaggatgggtcctctcatacagatgggatggggttagaaagccagagccagtttttccatctggcgtttcctgtgtcctccaggtttatatgggaatcgaaacagtttgttaatctgattgggagagttccatgggcagatttcccttcctgaaggccaaaacggagaactgctctctttaattatttcaagagtcaagaccaaaagtttgctcagcatcacactacatctcaaaattaatgttgccaacttaattttgtgcatttgtgtcagaatgtttagtttacaaggttgggggctctctttgcttcgagaagtaaacctaataccatttttttattgtttaaagctgcattcaacgtcaaaattaccttgggtaacttttgataacttacatgtgtggacaaagctaatagtggttttttaaacagcaccttgcctgaacatgactttaaagaaattaatatattgaaaacatgtttgaacccttattttaattgcaccattaaaacatttgacttaaattgtttgaccattccagttggtgtactgttctgatttttcgttgtgtaggccgatctgcctgtcagagtccacgtgtcctggtcactggtctttataattgttgtgcaataactaaaggctaaggactagatgcactatcgtgtaaagagattacacatgactgtaccatgttgcacttaatcaaatagtatgtggggatttaaaatcgcttgcattgtttcacaaaataaatatctcaatgtcaaatactagataagcatctaagtcatttctacggaatcctgttcagataggggcacaataaaatgagtacagagcaccggggccctcacctggcaatcgcagctttcatttactgcgttgatcactgcccagtcctaaggctacaaagccatcctcactacatccttcaaactatgtgccattatcttcagcccacatttaaagaatccagtgaaa

SEQ ID NO: 190189 - DNA, 458 bp, Homo sapiens
  Payload ID: 17559
  Gene Symbol: TEX2
  Gene Name: testis expressed 2
  ENST ID: ENST00000583738
  CDS Start-End: 331-458
gtgccccagccgaagccggagtcgcgcggccgggagcacgggcgccggcatagtacaatgaggcagccagcggatcttggcagaaacaaccttatacaaagtggttccgtggaggagagaattaccatgttatagtcctcaggaaggcttttgttcctggaaaggataccattgaatagtgacatctgagttttaaggtaataacagaaaaaacttggaaataaacatcccattatttgacctccaaggcagaagactggcaccaaggaaatggcagcttcgtccctttcctgtcttgggcattgagcctgagcccttgtgaagccggcaatgacaagtctgtatggtcgccatgccgagaaaaccactgacatgccaaaaccatcagcccctaaagtgcacgtgcagaggtccgtgtcccgagataccatcgccattcacttctcggcatccggcga

SEQ ID NO: 190190 - DNA, 1966 bp, Homo sapiens
  Payload ID: 17559
  Gene Symbol: TEX2
  Gene Name: testis expressed 2
  ENST ID: ENST00000583501
  CDS Start-End: 1-1880
tgggaattggccttggattcatgactgcagtttgcgtgatttggttttttacaccaccaagtgctcataaatatcacaagttacacaaaaatctgcgacactggaacacaagatctctggatatcaaagaacctgaaatactgaagggatggatgaatgagatttacaactatgatccagaaacctaccatgcgactttgacacattcagtctttgttcgacttgagggtggaaccttaagactttcaaagcccaataaaaatatatccaggagggccagctacaatgaacccaagccagaggtcacctacatcagccagaaaatctatgacctctcagacagcaagatttatcttgtacctaaaactttggctcgaaagcgaatctggaataaaaagtaccccatttgtatcgagcttggtcagcaagatgactttatgtctaaagctcagactgataaggagacttcagaagagaagccgccagctgagggaagtgaggaccctaagaagccaccccgccctcaggagggaacaagatctagccagcgagatcagatactctatctctttgggagaactggccgagaaaaagaggaatggtttaggagatttattctggcatctaagctaaagtcggaaatcaagaagtcatcgggtgtctctggaggtaaaccagggcttttgcctgcacacagcagacacaacagtccgtccgggcacctgacccacagccgcagcagcagcaaaggcagtgtggaggagatcatgtcacagccaaagcagaaggagctggcaggcagcgtgcggcagaagatgcttctcgactacagcgtgtacatgggcaggtgtgtcccccaggaaagccgaagcccccagaggagccccctgcagagtgcggagagcagccccacagctgggaagaagttgccagaggttccaccctctgaggaggaagaacaggaagcctgggtgaatgccttgcttggaagaatattttgggacttcttaggagagaaatactggtctgatctggtgtctaagaagatccaaatgaaactcagcaaaataaagctcccctactttatgaatgagctcactctgacggaacttgacatgggcgtggctgtgccaaaaatcctccaggccttcaagccttacgttgatcaccaaggactctggattgatttggaaatgtcctacaatgggtcctttctgatgactctcgagaccaaaatgaatttgaccaaactaggtaaagagcctcttgttgaagccctgaaggttggagaaattggcaaagaagggccccgggcattctgtctggcggacagcgatgaggaatcctccagcgctggctcctccgaggaagacgatgccccagagcccagcgggggagacaaacagctcctcccaggggctgaagggtacgttggaggtcatcgaacaagtaagattatgaggtttgttgataaaattaccaagtcaaaatatttccaaaaagcaacagagacagagtttattaaaaagaagatcgaagaagtctccaacacacccctgctgctcactgttgaagtacaagaatgtagaggaaccttggcggtcaacattccaccacccccgactgaccgagtatggtatggtttccgaaagccaccacatgtggagctgaaagctcggccaaaacttggagagagagaagtgactttagttcatgtgacagactggatagagaagaaactggagcaagagtttcagaaagtttttgtcatgccaaacatggatgatgtttatatcactataatgcactcagccatggaccctcgctctacttcctgcctcctgaaagacccacctgtggaggctgctgatcagccatgatgggtgatgtcagatgttccccatattgtgacatcgagctggatgtgtggggttcttggccgccatctgtactgtagcactggcct

SEQ ID NO: 190191 - DNA, 4852 bp, Homo sapiens
  Payload ID: 17559
  Gene Symbol: TEX2
  Gene Name: testis expressed 2
  Uniprot ID: Q8IWB9
  ENST ID: ENST00000583097
  CDS Start-End: 174-3557
gacaatggaggaagcttccctcagtttacagcagaaccccaggctcagggaggtgaagtggggagctccgtcactgtcatttgagggccatttgagggctgtggtcctccgtggagctcctccctctgctgcctcatggcctcactcgagcctgagcccttgtgaagccggcaatgacaagtctgtatggtcgccatgccgagaaaaccactgacatgccaaaaccatcagcccctaaagtgcacgtgcagaggtccgtgtcccgagataccatcgccattcacttctcggcatccggcgaggaggaggaggaagaggaggaggagttcagggagtactttgaggaggggctggatgaccaaagcattgtaacagggctggaagccaaggaagacctctatcttgaaccccaagttggccatgaccccgccggccctgctgcctcgcctgtcctggcagatggactgtccgtgtcccaggcccctgccattttgcccgtctccaagaacactgtaaagctgttggagtcccctgttccagcagcacaagtattaagtacagtgccattggctgtgtccccagggtcgtcttcgtcggggcccttagctagctctcccagtgtgtcatccctttctgagcagaaaaccagttcttcctccccattgtcctctccttctaagtctcccatcctctcatccagtgcctcaacctccaccctttccagtgcaaaacccttcatgagccttgtgaagtccctgtcgaccgaggtggagccaaaagaatccccacaccccgcaaggcacaggcacttgatgaagacattagtcaagtctctgtccacggacacttcccggcaggagtcggatacagtgtcctataagccacctgattccaaactgaacttacacctgttcaagcagttcacacagccccgaaacacaggtggagattccaaaactgcaccttcttccccactgacttctccctctgatactcgttccttttttaaagtgcccgaaatggaggctaaaattgaagatactaaacgacgcctttcagaagtcatctatgagccttttcagctccttagtaaaattataggggaagaaagtggcagccataggcccaaagccttatcttcaagtgcttcagaactctccaatctgtccagcttgaatgggcacttggaaagcaataacaactacagcatcaaggaggaggagtgtgattctgagggggatggctacggaagtgattccaacatccccagaagtgaccacccaaagtccactggtgagcccacaagagagatagaactgaaaagttcccaggggagcagtctgaaggatttaggcctgaagacaagttctctagttctggagaaatgttctttgtctgccttagtgagcaaagaagatgaagagttttgtgaactgtacactgaggacttcgatttggaaacggagggggagagtaaagttgataagctctcagatattcctctcaagccagaggtgctcgcggaagatggtgtggtccttgacagtgaggacgaggtggactcggccgtgcagcacccggaattgccagtgaagacgttgggcttctttataatgtgtgtctatgtgtacctcatcctccccctcccccactatgtgagtggactctttctgggaattggccttggattcatgactgcagtttgcgtgatttggttttttacaccaccaagtgctcataaatatcacaagttacacaaaaatctgcgacactggaacacaagatctctggatatcaaagaacctgaaatactgaagggatggatgaatgagatttacaactatgatccagaaacctaccatgcgactttgacacattcagtctttgttcgacttgagggtggaaccttaagactttcaaagcccaataaaaatatatccaggagggccagctacaatgaacccaagccagaggtcacctacatcagccagaaaatctatgacctctcagacagcaagatttatcttgtacctaaaactttggctcgaaagcgaatctggaataaaaagtaccccatttgtatcgagcttggtcagcaagatgactttatgtctaaagctcagactgataaggagacttcagaagagaagccgccagctgagggaagtgaggaccctaagaagccaccccgccctcaggagggaacaagatctagccagcgagatcagatactctatctctttgggagaactggccgagaaaaagaggaatggtttaggagatttattctggcatctaagctaaagtcggaaatcaagaagtcatcgggtgtctctggaggtaaaccagggcttttgcctgcacacagcagacacaacagtccgtccgggcacctgacccacagccgcagcagcagcaaaggcagtgtggaggagatcatgtcacagccaaagcagaaggagctggcaggcagcgtgcggcagaagatgcttctcgactacagcgtgtacatgggcaggtgtgtcccccaggaaagccgaagcccccagaggagccccctgcagagtgcggagagcagccccacagctgggaagaagttgccagaggttccaccctctgaggaggaagaacaggaagcctgggtgaatgccttgcttggaagaatattttgggacttcttaggagagaaatactggtctgatctggtgtctaagaagatccaaatgaaactcagcaaaataaagctcccctactttatgaatgagctcactctgacggaacttgacatgggcgtggctgtgccaaaaatcctccaggccttcaagccttacgttgatcaccaaggactctggattgatttggaaatgtcctacaatgggtcctttctgatgactctcgagaccaaaatgaatttgaccaaactaggtaaagagcctcttgttgaagccctgaaggttggagaaattggcaaagaaggttgcaggccccgggcattctgtctggcggacagcgatgaggaatcctccagcgctggctcctccgaggaagacgatgccccagagcccagcgggggagacaaacagctcctcccaggggctgaagggtacgttggaggtcatcgaacaagtaagattatgaggtttgttgataaaattaccaagtcaaaatatttccaaaaagcaacagagacagagtttattaaaaagaagatcgaagaagtctccaacacacccctgctgctcactgttgaagtacaagaatgtagaggaaccttggcggtcaacattccaccacccccgactgaccgagtatggtatggtttccgaaagccaccacatgtggagctgaaagctcggccaaaacttggagagagagaagtgactttagttcatgtgacagactggatagagaagaaactggagcaagagtttcagaaagtttttgtcatgccaaacatggatgatgtttatatcactataatgcactcagccatggaccctcgctctacttcctgcctcctgaaagacccacctgtggaggctgctgatcagccatgatgggtgatgtcagatgttccccatattgtgacatcgagctggatgtgtggggttcttggccgccatctgtactgtagcactggcctctgtgccacagctactgtttcttaaaggactgcttctgccctctgcctgccagtgcccattccactgtgaggtgtcattccctgcatctagtgacaactgtctggattgcctgctgcaaagctttgatttggcaaaggagaccatggaagaatcatggtggatccagaagttatacgtgacccacaccatggcttttaaaagtctacccatgtttgtggcagcaaatgagcacagtaagagcaaagctgaacaacttgcctcctctactcctccaaagcttttcttcaggcagccggtgcacagtggactttttcacttctatactttgtatgcggccttccacacttccagagaatgtcagtgtgcaatgtgtctggagggtggggagaggaattctgtgagccttttcatttcggtgacagaagagatgggcagagcaacttattttccacattaaattgtgcatttgggaagcaagtagccatagtacacacacaacacgctatcagcttgggtaaggacagtgggatttatgtgaacatcaggcaaagccatgagatcaaaccatcccaagcctttcaccaatgaggtacaaccacctgggggctagctaatcttgaatgttttcctgagacaggagcgtatgtgaaaacatcaaacactgcacatgacaggatgggtcctctcatacagatgggatggggttagaaagccagagccagtttttccatctggcgtttcctgtgtcctccaggtttatatgggaatcgaaacagtttgttaatctgattgggagagttccatgggcagatttcccttcctgaaggccaaaacggagaactgctctctttaattatttcaagagtcaagaccaaaagtttgctcagcatcacactacatctcaaaattaatgttgccaacttaattttgtgcatttgtgtcagaatgtttagtttacaaggttgggggctctctttgcttcgagaagtaaacctaataccatttttttattgtttaaagctgcattcaacgtcaaaattaccttgggtaacttttgataacttacatgtgtggacaaagctaatagtggttttttaaacagcaccttgcctgaacatgactttaaagaaattaatatattgaaaacatgtttgaacccttattttaattgcaccattaaaacatttgacttaaattgtttgaccatt

SEQ ID NO: 190192 - DNA, 4825 bp, Homo sapiens
  Payload ID: 17559
  Gene Symbol: TEX2
  Gene Name: testis expressed 2
  Uniprot ID: Q8IWB9
  ENST ID: ENST00000584379
  CDS Start-End: 160-3543
ggggcggcgtgtgcccgggggcgggcgggcggcagggcagcaggaccgcggccggtgccccagccgaagccggagtcgcgcggccgggagcacgggcgccggcatagtacaatgaggcagccagcggatcttggagcctgagcccttgtgaagccggcaatgacaagtctgtatggtcgccatgccgagaaaaccactgacatgccaaaaccatcagcccctaaagtgcacgtgcagaggtccgtgtcccgagataccatcgccattcacttctcggcatccggcgaggaggaggaggaagaggaggaggagttcagggagtactttgaggaggggctggatgaccaaagcattgtaacagggctggaagccaaggaagacctctatcttgaaccccaagttggccatgaccccgccggccctgctgcctcgcctgtcctggcagatggactgtccgtgtcccaggcccctgccattttgcccgtctccaagaacactgtaaagctgttggagtcccctgttccagcagcacaagtattaagtacagtgccattggctgtgtccccagggtcgtcttcgtcggggcccttagctagctctcccagtgtgtcatccctttctgagcagaaaaccagttcttcctccccattgtcctctccttctaagtctcccatcctctcatccagtgcctcaacctccaccctttccagtgcaaaacccttcatgagccttgtgaagtccctgtcgaccgaggtggagccaaaagaatccccacaccccgcaaggcacaggcacttgatgaagacattagtcaagtctctgtccacggacacttcccggcaggagtcggatacagtgtcctataagccacctgattccaaactgaacttacacctgttcaagcagttcacacagccccgaaacacaggtggagattccaaaactgcaccttcttccccactgacttctccctctgatactcgttccttttttaaagtgcccgaaatggaggctaaaattgaagatactaaacgacgcctttcagaagtcatctatgagccttttcagctccttagtaaaattataggggaagaaagtggcagccataggcccaaagccttatcttcaagtgcttcagaactctccaatctgtccagcttgaatgggcacttggaaagcaataacaactacagcatcaaggaggaggagtgtgattctgagggggatggctacggaagtgattccaacatccccagaagtgaccacccaaagtccactggtgagcccacaagagagatagaactgaaaagttcccaggggagcagtctgaaggatttaggcctgaagacaagttctctagttctggagaaatgttctttgtctgccttagtgagcaaagaagatgaagagttttgtgaactgtacactgaggacttcgatttggaaacggagggggagagtaaagttgataagctctcagatattcctctcaagccagaggtgctcgcggaagatggtgtggtccttgacagtgaggacgaggtggactcggccgtgcagcacccggaattgccagtgaagacgttgggcttctttataatgtgtgtctatgtgtacctcatcctccccctcccccactatgtgagtggactctttctgggaattggccttggattcatgactgcagtttgcgtgatttggttttttacaccaccaagtgctcataaatatcacaagttacacaaaaatctgcgacactggaacacaagatctctggatatcaaagaacctgaaatactgaagggatggatgaatgagatttacaactatgatccagaaacctaccatgcgactttgacacattcagtctttgttcgacttgagggtggaaccttaagactttcaaagcccaataaaaatatatccaggagggccagctacaatgaacccaagccagaggtcacctacatcagccagaaaatctatgacctctcagacagcaagatttatcttgtacctaaaactttggctcgaaagcgaatctggaataaaaagtaccccatttgtatcgagcttggtcagcaagatgactttatgtctaaagctcagactgataaggagacttcagaagagaagccgccagctgagggaagtgaggaccctaagaagccaccccgccctcaggagggaacaagatctagccagcgagatcagatactctatctctttgggagaactggccgagaaaaagaggaatggtttaggagatttattctggcatctaagctaaagtcggaaatcaagaagtcatcgggtgtctctggaggtaaaccagggcttttgcctgcacacagcagacacaacagtccgtccgggcacctgacccacagccgcagcagcagcaaaggcagtgtggaggagatcatgtcacagccaaagcagaaggagctggcaggcagcgtgcggcagaagatgcttctcgactacagcgtgtacatgggcaggtgtgtcccccaggaaagccgaagcccccagaggagccccctgcagagtgcggagagcagccccacagctgggaagaagttgccagaggttccaccctctgaggaggaagaacaggaagcctgggtgaatgccttgcttggaagaatattttgggacttcttaggagagaaatactggtctgatctggtgtctaagaagatccaaatgaaactcagcaaaataaagctcccctactttatgaatgagctcactctgacggaacttgacatgggcgtggctgtgccaaaaatcctccaggccttcaagccttacgttgatcaccaaggactctggattgatttggaaatgtcctacaatgggtcctttctgatgactctcgagaccaaaatgaatttgaccaaactaggtaaagagcctcttgttgaagccctgaaggttggagaaattggcaaagaaggttgcaggccccgggcattctgtctggcggacagcgatgaggaatcctccagcgctggctcctccgaggaagacgatgccccagagcccagcgggggagacaaacagctcctcccaggggctgaagggtacgttggaggtcatcgaacaagtaagattatgaggtttgttgataaaattaccaagtcaaaatatttccaaaaagcaacagagacagagtttattaaaaagaagatcgaagaagtctccaacacacccctgctgctcactgttgaagtacaagaatgtagaggaaccttggcggtcaacattccaccacccccgactgaccgagtatggtatggtttccgaaagccaccacatgtggagctgaaagctcggccaaaacttggagagagagaagtgactttagttcatgtgacagactggatagagaagaaactggagcaagagtttcagaaagtttttgtcatgccaaacatggatgatgtttatatcactataatgcactcagccatggaccctcgctctacttcctgcctcctgaaagacccacctgtggaggctgctgatcagccatgatgggtgatgtcagatgttccccatattgtgacatcgagctggatgtgtggggttcttggccgccatctgtactgtagcactggcctctgtgccacagctactgtttcttaaaggactgcttctgccctctgcctgccagtgcccattccactgtgaggtgtcattccctgcatctagtgacaactgtctggattgcctgctgcaaagctttgatttggcaaaggagaccatggaagaatcatggtggatccagaagttatacgtgacccacaccatggcttttaaaagtctacccatgtttgtggcagcaaatgagcacagtaagagcaaagctgaacaacttgcctcctctactcctccaaagcttttcttcaggcagccggtgcacagtggactttttcacttctatactttgtatgcggccttccacacttccagagaatgtcagtgtgcaatgtgtctggagggtggggagaggaattctgtgagccttttcatttcggtgacagaagagatgggcagagcaacttattttccacattaaattgtgcatttgggaagcaagtagccatagtacacacacaacacgctatcagcttgggtaaggacagtgggatttatgtgaacatcaggcaaagccatgagatcaaaccatcccaagcctttcaccaatgaggtacaaccacctgggggctagctaatcttgaatgttttcctgagacaggagcgtatgtgaaaacatcaaacactgcacatgacaggatgggtcctctcatacagatgggatggggttagaaagccagagccagtttttccatctggcgtttcctgtgtcctccaggtttatatgggaatcgaaacagtttgttaatctgattgggagagttccatgggcagatttcccttcctgaaggccaaaacggagaactgctctctttaattatttcaagagtcaagaccaaaagtttgctcagcatcacactacatctcaaaattaatgttgccaacttaattttgtgcatttgtgtcagaatgtttagtttacaaggttgggggctctctttgcttcgagaagtaaacctaataccatttttttattgtttaaagctgcattcaacgtcaaaattaccttgggtaacttttgataacttacatgtgtggacaaagctaatagtggttttttaaacagcaccttgcctgaacatgactttaaagaaattaatatattgaaaacatgtttgaacccttattttaattgcaccattaaaacatttgacttaaa

SEQ ID NO: 190193 - DNA, 563 bp, Homo sapiens
  Payload ID: 17559
  Gene Symbol: TEX2
  Gene Name: testis expressed 2
  ENST ID: ENST00000583922
  CDS Start-End: 407-563
aaggtagattatgttggactttctgtggtgtgctaagcattcagcacccgtacctgggagacttggccctacctgtaggcatctctgcagtgggtgcagtcctgagtgtggagcaaggtggaccggaagcagctgttcctctgctcttgcctgcagttgtttgctttagtgtttggatgcgggcagatctttcaccttttttcctgataagaggagacagagactactggccttacagccaggtggtcaaacatgacaactcggagttgctgtgtgcaaaacctgcctgaaccccatctccagcgagatttgatgatgtttccccattcaaaggaacaaccacgcctcaggaccatacaaggagaggacttcatgaaacagagcctgagcccttgtgaagccggcaatgacaagtctgtatggtcgccatgccgagaaaaccactgacatgccaaaaccatcagcccctaaagtgcacgtgcagaggtccgtgtcccgagataccatcgccattcacttctcggcatccggcgaggaggaggaggaagaggaggaggagttca

SEQ ID NO: 190194 - DNA, 4852 bp, Homo sapiens
  Payload ID: 17559
  Gene Symbol: TEX2
  Gene Name: testis expressed 2
  ENST ID: ENST00000615733
  CDS Start-End: 174-3557
gacaatggaggaagcttccctcagtttacagcagaaccccaggctcagggaggtgaagtggggagctccgtcactgtcatttgagggccatttgagggctgtggtcctccgtggagctcctccctctgctgcctcatggcctcactcgagcctgagcccttgtgaagccggcaatgacaagtctgtatggtcgccatgccgagaaaaccactgacatgccaaaaccatcagcccctaaagtgcacgtgcagaggtccgtgtcccgagataccatcgccattcacttctcggcatccggcgaggaggaggaggaagaggaggaggagttcagggagtactttgaggaggggctggatgaccaaagcattgtaacagggctggaagccaaggaagacctctatcttgaaccccaagttggccatgaccccgccggccctgctgcctcgcctgtcctggcagatggactgtccgtgtcccaggcccctgccattttgcccgtctccaagaacactgtaaagctgttggagtcccctgttccagcagcacaagtattaagtacagtgccattggctgtgtccccagggtcgtcttcgtcggggcccttagctagctctcccagtgtgtcatccctttctgagcagaaaaccagttcttcctccccattgtcctctccttctaagtctcccatcctctcatccagtgcctcaacctccaccctttccagtgcaaaacccttcatgagccttgtgaagtccctgtcgaccgaggtggagccaaaagaatccccacaccccgcaaggcacaggcacttgatgaagacattagtcaagtctctgtccacggacacttcccggcaggagtcggatacagtgtcctataagccacctgattccaaactgaacttacacctgttcaagcagttcacacagccccgaaacacaggtggagattccaaaactgcaccttcttccccactgacttctccctctgatactcgttccttttttaaagtgcccgaaatggaggctaaaattgaagatactaaacgacgcctttcagaagtcatctatgagccttttcagctccttagtaaaattataggggaagaaagtggcagccataggcccaaagccttatcttcaagtgcttcagaactctccaatctgtccagcttgaatgggcacttggaaagcaataacaactacagcatcaaggaggaggagtgtgattctgagggggatggctacggaagtgattccaacatccccagaagtgaccacccaaagtccactggtgagcccacaagagagatagaactgaaaagttcccaggggagcagtctgaaggatttaggcctgaagacaagttctctagttctggagaaatgttctttgtctgccttagtgagcaaagaagatgaagagttttgtgaactgtacactgaggacttcgatttggaaacggagggggagagtaaagttgataagctctcagatattcctctcaagccagaggtgctcgcggaagatggtgtggtccttgacagtgaggacgaggtggactcggccgtgcagcacccggaattgccagtgaagacgttgggcttctttataatgtgtgtctatgtgtacctcatcctccccctcccccactatgtgagtggactctttctgggaattggccttggattcatgactgcagtttgcgtgatttggttttttacaccaccaagtgctcataaatatcacaagttacacaaaaatctgcgacactggaacacaagatctctggatatcaaagaacctgaaatactgaagggatggatgaatgagatttacaactatgatccagaaacctaccatgcgactttgacacattcagtctttgttcgacttgagggtggaaccttaagactttcaaagcccaataaaaatatatccaggagggccagctacaatgaacccaagccagaggtcacctacatcagccagaaaatctatgacctctcagacagcaagatttatcttgtacctaaaactttggctcgaaagcgaatctggaataaaaagtaccccatttgtatcgagcttggtcagcaagatgactttatgtctaaagctcagactgataaggagacttcagaagagaagccgccagctgagggaagtgaggaccctaagaagccaccccgccctcaggagggaacaagatctagccagcgagatcagatactctatctctttgggagaactggccgagaaaaagaggaatggtttaggagatttattctggcatctaagctaaagtcggaaatcaagaagtcatcgggtgtctctggaggtaaactcagggcttttgccgcacacagcagacacaacagtccgtccgggcacctgacccacagccgcagcagcagcaaaggcagtgtggaggagatcatgtcacagccaaagcagaaggagctggcaggcagcgtgcggcagaagatgcttctcgactacagcgtgtacatgggcaggtgtgtcccccaggaaagccgaagcccccagaggagccccctgcagagtgcggagagcagccccacagctgggaagaagttgccagaggttccaccctctgaggaggaagaacaggaagcctgggtgaatgccttgcttggaagaatattttgggacttcttaggagagaaatactggtctgatctggtgtctaagaagatccaaatgaaactcagcaaaataaagctcccctactttatgaatgagctcactctgacggaacttgacatgggcgtggctgtgccaaaaatcctccaggccttcaagccttacgttgatcaccaaggactctggattgatttggaaatgtcctacaatgggtcctttctgatgactctcgagaccaaaatgaatttgaccaaactaggtaaagagcctcttgttgaagccctgaaggttggagaaattggcaaagaaggttgcaggccccgggcattctgtctggcggacagcgatgaggaatcctccagcgctggctcctccgaggaagacgatgccccagagcccagcgggggagacaaacagctcctcccaggggctgaagggtacgttggaggtcatcgaacaagtaagattatgaggtttgttgataaaattaccaagtcaaaatatttccaaaaagcaacagagacagagtttattaaaaagaagatcgaagaagtctccaacacacccctgctgctcactgttgaagtacaagaatgtagaggaaccttggcggtcaacattccaccacccccgactgaccgagtatggtatggtttccgaaagccaccacatgtggagctgaaagctcggccaaaacttggagagagagaagtgactttagttcatgtgacagactggatagagaagaaactggagcaagagtttcagaaagtttttgtcatgccaaacatggatgatgtttatatcactataatgcactcagccatggaccctcgctctacttcctgcctcctgaaagacccacctgtggaggctgctgatcagccatgatgggtgatgtcagatgttccccatattgtgacatcgagctggatgtgtggggttcttggccgccatctgtactgtagcactggcctctgtgccacagctactgtttcttaaaggactgcttctgccctctgcctgccagtgcccattccactgtgaggtgtcattccctgcatctagtgacaactgtctggattgcctgctgcaaagctttgatttggcaaaggagaccatggaagaatcatggtggatccagaagttatacgtgacccacaccatggcttttaaaagtctacccatgtttgtggcagcaaatgagcacagtaagagcaaagctgaacaacttgcctcctctactcctccaaagcttttcttcaggcagccggtgcacagtggactttttcacttctatactttgtatgcggccttccacacttccagagaatgtcagtgtgcaatgtgtctggagggtggggagaggaattctgtgagccttttcatttcggtgacagaagagatgggcagagcaacttattttccacattaaattgtgcatttgggaagcaagtagccatagtacacacacaacacgctatcagcttgggtaaggacagtgggatttatgtgaacatcaggcaaagccatgagatcaaaccatcccaagcctttcaccaatgaggtacaaccacctgggggctagctaatcttgaatgttttcctgagacaggagcgtatgtgaaaacatcaaacactgcacatgacaggatgggtcctctcatacagatgggatggggttagaaagccagagccagtttttccatctggcgtttcctgtgtcctccaggtttatatgggaatcgaaacagtttgttaatctgattgggagagttccatgggcagatttcccttcctgaaggccaaaacggagaactgctctctttaattatttcaagagtcaagaccaaaagtttgctcagcatcacactacatctcaaaattaatgttgccaacttaattttgtgcatttgtgtcagaatgtttagtttacaaggttgggggctctctttgcttcgagaagtaaacctaataccatttttttattgtttaaagctgcattcaacgtcaaaattaccttgggtaacttttgataacttacatgtgtggacaaagctaatagtggttttttaaacagcaccttgcctgaacatgactttaaagaaattaatatattgaaaacatgtttgaacccttattttaattgcaccattaaaacatttgacttaaattgtttgaccatt

SEQ ID NO: 190195 - DNA, 2571 bp, Homo sapiens
  Payload ID: 17560
  Gene Symbol: TEX22
  Gene Name: testis expressed 22
  Uniprot ID: C9J3V5
  ENST ID: ENST00000451127
  CDS Start-End: 93-545
ctcaagccgcggtgtactccagcggccccctgtggcctctccatccgcggcggatctcagaggtgtggacaagcagcctactagggctagagatggacagcaggaaactgtccccccgggggaagaagctggagtcgcacctctcccaagagcacaggcggcccccactgggcctgatagcagcctggggccagcccagtatccagagcagcgttcagcagggactgcagactcaggactgggtgtgcgagccgccggaacgcaggcgcccgggccgccgctggagcgtcagcatcgacgagcgccggcggctggccacgctgggcggccgggagaggccgggcgccgccgggacccagctgcactgcagggacgtcgtgcagatggtagcccagctggtgtcggaggacgtggacaaggacgtgctccttccccacccgctgaggtccaccgagtccaccaacgccttccaggccttcctggcgcgcagtgcgcctttctggcataatgcgactttcgaggcctcgaggtcacccccttcctaagagccccattcagcccattgtctgtcttccagtgcctttccttgggggcccacggtgggggcagcctctgcgccttctttgtgccccaccagggggtcaccacccacccatgttaggaaaacaggccaggcaggacctggctccggacagcctgcagctgctgaggccttggagaccgggctaggggctatgggaggccatctaggggaggggaacactgccccgggtcagtctgagagggccctggcaaggcctgggtagcaggagcttgccctcggggccgctgggaggaggcctggggtacctgggcctgcctgaggtgcactggtgtcctgggaagccccagtggcaggcgctgcctggagactcagctccttggctggcctggtctggggaactgggtatctgcctgcaccaggctgtgagatgggccaggcagagttctccagggggcggggtctcacattgggtcctgcctctgaagacccagaagggcacacgggaccccaggggtgctgtggtggggagcagcaagcccagggacccaatgcagtgcccagcacagagggaggctgtctggaggcagagatgcctcctggcctctggacagcgatgctggtggtggacgagggccaagagggtatcctgcgcagggggtctgagcaactgtgaggagctggctgccgcaggggcctgtgggacatggtccactgggtgactgcctcgtttccaggctgcagggccctcggaagggtgctgagccggggtaacgtgtcccagctgcattttggggacactaagttgcagggggactggattgggaggcggggcaggagagctgtgagcatgggttcccagcccggggtgggtgggggtggggaaagggccctgaactctgtgactgactgttaggggcctgactgggcttctgtggaggtggctaggtggaggaggctttggggcaagcggaggtgatcactcctgggctccaggtgagggcaggagctggacctgtgcggtggcctggaccaccagatacactacatgctggctgtgctgcccacctggcctgtaaccctccccttcccgctgctgagaagccacctgactgcactgccagccacctgctgccctgacacaggatccctggcccgagttgaatcctctgcacctgcctgtctccccttcttactgtaagactcagtgaagttccctcctccttcaggaagccttccaagattacacagccaggtgctccccttctctcccaagtcctctgaatgtcatttggtgcaccctagggatcctctgcatttctcaggagccctagggtaggtggatggagggcagatcctccaggggctagggcaggtgtccttaagggtgtggggagttttgggcagggcactgtccttaagggtgtggggagttttgggtcatgacccaccccctctgaggcccctgatgatgatgtggggaatgggatcctatgggcccagctgcatgccaggcaggcatccccaggtgtaaacagggcagagcggagctgacaggtaagcagttgccatgggggtgatgagctgggcagtcctctgttgctgagtggctttaaagaaccactcgttgttctgtgacttgggggttggctgggctcatcctgccagctctcctgctctcgtttgagtgtctcctgaggctgcagtcagagcgtggtggtccaggatgctggtgatgctgggatggttgccctctctgctccatgaggtctccctacagagcacctcccccatggtggcagcagagacaaaaccctggcctccttcaggctgaggcccagagccagtctcctggtgggtaaggtggccacagggccagctggcagcagggtattggcactgagaggcacaggcctctccaacagaggtggtgccgggacaggggcagtgcctggagaccgcttaggttgtcacaactgggatttgtgtactagttttctgtagctgccataaaaattgccacaaattca

SEQ ID NO: 190196 - DNA, 508 bp, Homo sapiens
  Payload ID: 17560
  Gene Symbol: TEX22
  Gene Name: testis expressed 22
  ENST ID: ENST00000548638
  CDS Start-End: 97-288
ccccctcaagccgcggtgtactccagcggccccctgtggcctctccatccgcggcggatctcagaggtgtggacaagcagcctactagggctagagatggacagcaggaaactgtccccccgggggaagaagctggagtcgcacctctcccaagagcacaggcggcccccactgggcctgatagcagcctggggccagcccagtatccagagcagcgttcagcagggactgcagactcaggactggactacgtctactttgagaactcctccagcaacccatacctgatccggagaatcgaggagctcaacaagacggccaatgggaacgtggaggccaaagtggtgtgcttctaccggaggcgggacatctccagcaccctcatcgccctggccgacaagcacgcaaccctgtcagtctgctataaggccggaccgggggcggacaacggcgaggaaggggaaatagaagaggaaatggagaacccggaaatggtggacctgcccga

SEQ ID NO: 190197 - DNA, 1478 bp, Homo sapiens
  Payload ID: 17561
  Gene Symbol: TEX26
  Gene Name: testis expressed 26
  Uniprot ID: Q8N6G2
  ENST ID: ENST00000380473
  CDS Start-End: 14-883
ctcctggggcagaatggaacagcctgggcccagggctccggatccctctctctgccaccacaacctccagccaacagatgaccccaactgggattcctatgctaccactatgaggactgcattcacgcctaaaacaggagcagtgcctgccttaattcgccaaaacggtatcagaagattaggatatacatattcacttagtgatcctattctcaatcagacacaatatagtgatgagtacacttggaaatcacactctaaagaagatttgatcaaaactgagacttcaagaggaatcaagagccacaaatctcatctcaatgaagacattttcctgtggacactacctcactgtcaacaaacggggacactaaagaactgcctcccttggaaaatcccggcttcaatgaaagaagttaacaaggcactatcaaatcagtttatttcccttactaagagagactttgtggacagatcaaaagctcagaagattaagaaaagttctcacttgtctctggaatggaaaaagttacttccccaacctccagacactgaattccgaaggaattaccaaattccagctaaaattcctgagcttcaagatttcagtttcaaatatggatgctactcaagcttgcctgttgcttctcagggtctagtgccttctgtgctgcacagctacctgaggaaccaagagcacacaaagaaacagaccacataccaaagtgactacgacaaaacctacccagatttcttaatgcttttaaactcatttacttcctctcaagtcaaagagtaccttcagagtctttcctacaaagatagacaaattattgatcgctttattcgtactcactgtgacactaacaaaaagaagaaatgaaaagggaaaatagtacaaatgaagaaaatctgaaaatcaatggaagcacgaggacattcctagtcattttctcaattatcaaggaaaaataagatgcaaatagcttcaagtatgatgtgatagtcatgaatttgtgtcttttgctccgctttatttttaaacaataaaattaaggctacaaaattttccctgaacatagctttagctgtatccaatagtttttgatacaatgtttttttcttttcccttttggatacttaatttgtagtttcaattttgatttctcctgtgaactaggaattatgtggaagagatttcttaatgtcccattaatcagagacttaagaaatcattttattgccttatctcttctttgaatgaatgaaagtttaaaaatctgcttttgggaaatcaattgcagttttatttaatgccattaatcaagtatatgattaatttgtgtgttacgtgaatatgagaaaaaaattatagtttattgtattttttaatcccttatatctttaattgtatacttgaattgttcaattctgaaagaatattggaacctcccacaataaatatatttttatcaatt

SEQ ID NO: 190198 - DNA, 804 bp, Homo sapiens
  Payload ID: 17561
  Gene Symbol: TEX26
  Gene Name: testis expressed 26
  ENST ID: ENST00000531960
  CDS Start-End: 1-186
cctgggcccagggctccggatccctctctctgccaccacaacctccagccaacagatgaccccaactgggattcctatgctaccactatgaggactgcattcacgcctaaaacaggagcagtgcctgccttaattcggacattttcctgtggacactacctcactgtcaacaaacggggacactaaagaactgcctcccttggaaaatcccggcttcaatgaaagaagttaacaaggcactatcaaatcagtttatttcccttactaagagagactttgtggacagatcaaaagctcagaagattaagaaaagttctcacttgtctctggaatggaaaaagttacttccccaacctccagacactgaattccgaaggaattaccaaattccagctaaaattcctgagcttcaagatttcagtttcaaatatggatgctactcaagcttgcctgttgcttctcagggtctagtgccttctgtgctgcacagctacctgaggaaccaagagcacacaaagaaacagaccacataccaaagtgactacgacaaaacctacccagatttcttaatgcttttaaactcatttacttcctctcaagtcaaagagtaccttcagagtctttcctacaaagatagacaaattattgatcgctttattcgtactcactgtgacactaacaaaaagaagaaatgaaaagggaaaatagtacaaatgaagaaaatctgaaaatcaatggaagcacgaggacattcctagtcattttctcaattatcaaggaaaaataagatgcaaatagcttcaa

SEQ ID NO: 190199 - DNA, 3441 bp, Homo sapiens
  Payload ID: 17562
  Gene Symbol: TEX261
  Gene Name: testis expressed 261
  Uniprot ID: Q6UWH6
  ENST ID: ENST00000272438
  CDS Start-End: 189-779
gcggcgctagcgcgagcctggccccgggcagcgctagggccgggctcctctcggcggcggcgcaccgtcgtcctgtcgtccgcggggcggggacgcggcggcggcggcggcggtggcggctgtgtgtcgccggagccgaagcgcgcaggcccgtcccggtggccggggagcgggcgggtgggggcgccatgtggttcatgtacctgctgagctggctgtcgctcttcatccaggtggccttcatcacgctggctgtcgcggctggactctattacctggcagaactgatagaagaatacacagtggccaccagcaggatcataaaatacatgatctggttctccaccgctgtactgattggcctctacgtctttgagcgcttccccaccagcatgattggagtgggcctattcaccaacctcgtctactttggcctcctccagaccttccccttcatcatgctgacctcgcctaacttcatcctgtcgtgtggactagtggtggtgaatcattacctagcatttcagttttttgcagaagaatattatcccttctcagaggtcctggcctatttcactttctgcctgtggataattccgtttgcgttttttgtgtcactttcggccggggagaacgtcctgccctctaccatgcagccaggagatgatgtcgtctccaattatttcaccaaaggcaagcggggcaaacgcttagggatcctggttgtcttctccttcatcaaagaggccattctacccagtcgtcagaagatatactgacccccatgcaggcaggatgtggggggcaagatcaggagagtcaggcccctgggcctctatgccaggtggggaccagaagtcgggaaggcacctaccacctgccctggctttcttcccctcaactctggagccccatccccaccctccttggggggctcagcttggctcagatctgatgcttcaagaggctgtaacctcagagggcaccaaggagggtggcagagcctgcttagccaggaggccgaggtccctcagtcctcccctgtcccttccaaggtgggtcaggaggttctggccccgctggggcaggcagggcagggtctgtgaagcttaagagcagatggtgacaagttctctgggcaggtggccatggggaggggccatggcttggcatgtccaacagaaatagtttttgctgttgaacggtgatttctgtccaagtgcagatttccgtttgaataaagcttcgcttctaggtggcactgtttgccttaataccctgacagttcatcttcctttcttcctgctaaccttctgctctggactggactcacttttctgctccagggactccttttctgggtttgggtcttgcccttcccaagggactgttcttgtggcccttaatgggaagggggcaggggtgaggagctgagcctgctcaaggagtgggaagtggggctataggcagcctctctgatgcactctcttccatctctttccccaaggctccgtgactgtcaaactgggagtaggagaggggacaatttaggactgggctagattttcagaagaacatctacaatatcctatttataaatcttcctctgggaaaaggagtggtttctggctgaatactatcttaggctcaaggagaaacaaaataaaaattagcttccaggcagcctgtttttaaagaaatgggactaatgggagaagctgtttgtcactctaagagcatccaagccctggcccgtctgtgcactcttggctcctggggagatatatctgccttctaagaaggcaggccaggtcttgggcacagacctgcatttgttgaccttgcactccaactatagtgccttgcaagtgctcaacagtacatattggaatgaagtccctatgagagccatttctggccatgttctatacctcaaagtgaggctggcaggtacagagatgaactgtacacatgtgatacatttaagccactggaaaaacccctgtgcttgaaaatatttcctctatatcatgcctggagttccatcatagcccttcatttccttggctttagcatttaccttctcttaagaataccagctttcccctttccctgagaggaagagcacatgttggtctcctcttagtgtgaacgagattgccaggcccttttctcctatgcacaccaggatagacaaggcaggggatactggcagcctgcatcatcctcccattgggctgacagctggccctactttcctccctctgctgcttggtccctcaccttgatgatgtggcttcgccccctccactctactgccagtgttctcccagggcttgctaaatccagcagacccctttcctgtcttactagatctgggcagcatttgacatggctgatcaccccttgcttcttggatggcacttccctggcacctctgtggctagttgtcctacctccctggctgttcctttcaggcttccgtgcaggcttctccacttgcccatgcacagtagggtctttcagggttctgctgtgggctccctagggaagcccatccatctggatggtttcaaggatggtgaggaatttagagttgacctccagccccaacatccttcctgatcacctgaaccacagttttgctgccctctaggtgcacagacaattcaggtccatggcccagatggtacttgctgtcttctgcaaacctgccccttctgggtacttcccttgaccccgagatcactcaggagccagacaggaaacttattctattcctgttttctctttctgcccaccacatccaatctctcaaaacggtcaggtctaccttaacatctcttgatttgagccactcccactgtcatcagctttcacctggattatcgtgacagcctcctactgcttctctatcatgtggccagagctatcttcctaaaatgcattgcatagttgatcaagtcactctctggcctaaaaccttccttggctccctgctgccctcaggataaagtctggacccctcagcatggcttgtgagactcatggtgtccttgtccctgctcacctctctggtctcatcacttgccttcttgcattctgggtcccagcctcctgtatccagagatgcagtggctctccattgccactctgattcctcctttcttttggtcacagagaaagggtactttctctgtcaaatctcaacttagacttgacttcctccaaggagctttggctatactctctcctcccgacccccaccctggcatactacacagatcactctgggctcacttgcctgcctaatggtcatctccccagtagactgtaagctccttgagggcaaggattgtgttggaatttttgtattaacagtgcctggcttggtgcctggcacctagaaagcactcaataaatgtttgtttaatgaatgaa

SEQ ID NO: 190200 - DNA, 758 bp, Homo sapiens
  Payload ID: 17562
  Gene Symbol: TEX261
  Gene Name: testis expressed 261
  ENST ID: ENST00000433258
  CDS Start-End: 76-231
tggcggctgtgtgtcgccggagccgaagcgcgcaggcccgtcccggtggccggggagcgggcgggtgggggcgccatgtggttcatgtacctgctgagctggctgtcgctcttcatccaggtggccttcatcacgctggctgtcgcggctggactctattacctggcagaactgatagaagaatacacagtggccaccagcaggatcataaaatacatgatctgggactagtggtggtgaatcattacctagcatttcagttttttgcagaagaatattatcccttctcagaggtcctggcctatttcactttctgcctgtggataattccgtttgcgttttttgtgtcactttcggccggggagaacgtcctgccctctaccatgcagccaggagatgatgtcgtctccaattatttcaccaaaggcaagcggggcaaacgcttagggatcctggttgtcttctccttcatcaaagaggccattctacccagtcgtcagaagatatactgacccccatgcaggcaggatgtggggggcaagatcaggagagtcaggcccctgggcctctatgccaggtggggaccagaagtcgggaaggcacctaccacctgccctggctttcttcccctcaactctggagccccatccccaccctccttggggggctcagcttggctcagatctgatgcttcaagaggctgtaacctcagagggcaccaaggagggtggcagagcctgcttagccaggaggccgag

SEQ ID NO: 190201 - DNA, 1340 bp, Homo sapiens
  Payload ID: 17563
  Gene Symbol: TEX264
  Gene Name: testis expressed 264
  Uniprot ID: Q9Y6I9
  ENST ID: ENST00000341333
  CDS Start-End: 92-1033
gtaaccgaaccctgagccgcctgcgcggatcggcgtccgcagcgggcggctgctgagctgccttgaggtgcagtgttggggatccagagccatgtcggacctgctactactgggcctgattgggggcctgactctcttactgctgctgacgctgctggcctttgccgggtactcagggctactggctggggtggaagtgagtgctgggtcaccccccatccgcaacgtcactgtggcctacaagttccacatggggctctatggtgagactgggcggcttttcactgagagctgcagcatctctcccaagctccgctccatcgctgtctactatgacaacccccacatggtgccccctgataagtgccgatgtgccgtgggcagcatcctgagtgaaggtgaggaatcgccctcccctgagctcatcgacctctaccagaaatttggcttcaaggtgttctccttcccggcacccagccatgtggtgacagccaccttcccctacaccaccattctgtccatctggctggctacccgccgtgtccatcctgccttggacacctacatcaaggagcggaagctgtgtgcctatcctcggctggagatctaccaggaagaccagatccatttcatgtgcccactggcacggcagggagacttctatgtgcctgagatgaaggagacagagtggaaatggcgggggcttgtggaggccattgacacccaggtggatggcacaggagctgacacaatgagtgacacgagttctgtaagcttggaagtgagccctggcagccgggagacttcagctgccacactgtcacctggggcgagcagccgtggctgggatgacggtgacacccgcagcgagcacagctacagcgagtcaggtgccagcggctcctcttttgaggagctggacttggagggcgaggggcccttaggggagtcacggctggaccctgggactgagcccctggggactaccaagtggctctgggagcccactgcccctgagaagggcaaggagtaacccatggcctgcaccctcctgcagtgcagttgctgaggaactgagcagactctccagcagactctccagccctcttcctccttcctctgggggaggaggggttcctgagggacctgacttcccctgctccaggcctcttgctaagccttctcctcactgccctttaggctcccagggccagaggagccagggactattttctgcaccagcccccagggctgccacccctgttgtgtctttttttcagactcacagtggagcttccaggacccagaataaagccaatgatttacttgtttcacctgga

SEQ ID NO: 190202 - DNA, 1555 bp, Homo sapiens
  Payload ID: 17563
  Gene Symbol: TEX264
  Gene Name: testis expressed 264
  Uniprot ID: Q9Y6I9
  ENST ID: ENST00000395057
  CDS Start-End: 309-1250
cgggcggctgctgaggtgagggccgggccagaggagaggcatacccactggggcgtaggtctgggactccccctgtccgccctggcgcgacctcaggactctccgtgtcccctccgtgacccccgcggcccgggccgctctttgcatcttgtcttgcccacagctggcctcggccaggtccgagggcctggatgcgaccttggggcagcccctactcttccgggcagcccacttccgcggccaccggtgcagggcatgccccggggccgtggagctgccttgaggtgcagtgttggggatccagagccatgtcggacctgctactactgggcctgattgggggcctgactctcttactgctgctgacgctgctggcctttgccgggtactcagggctactggctggggtggaagtgagtgctgggtcaccccccatccgcaacgtcactgtggcctacaagttccacatggggctctatggtgagactgggcggcttttcactgagagctgcagcatctctcccaagctccgctccatcgctgtctactatgacaacccccacatggtgccccctgataagtgccgatgtgccgtgggcagcatcctgagtgaaggtgaggaatcgccctcccctgagctcatcgacctctaccagaaatttggcttcaaggtgttctccttcccggcacccagccatgtggtgacagccaccttcccctacaccaccattctgtccatctggctggctacccgccgtgtccatcctgccttggacacctacatcaaggagcggaagctgtgtgcctatcctcggctggagatctaccaggaagaccagatccatttcatgtgcccactggcacggcagggagacttctatgtgcctgagatgaaggagacagagtggaaatggcgggggcttgtggaggccattgacacccaggtggatggcacaggagctgacacaatgagtgacacgagttctgtaagcttggaagtgagccctggcagccgggagacttcagctgccacactgtcacctggggcgagcagccgtggctgggatgacggtgacacccgcagcgagcacagctacagcgagtcaggtgccagcggctcctcttttgaggagctggacttggagggcgaggggcccttaggggagtcacggctggaccctgggactgagcccctggggactaccaagtggctctgggagcccactgcccctgagaagggcaaggagtaacccatggcctgcaccctcctgcagtgcagttgctgaggaactgagcagactctccagcagactctccagccctcttcctccttcctctgggggaggaggggttcctgagggacctgacttcccctgctccaggcctcttgctaagccttctcctcactgccctttaggctcccagggccagaggagccagggactattttctgcaccagcccccagggctgccacccctgttgtgtctttttttcagactcacagtggagcttccaggacccagaataaagccaatgatttacttgtttcacctg

SEQ ID NO: 190203 - DNA, 596 bp, Homo sapiens
  Payload ID: 17563
  Gene Symbol: TEX264
  Gene Name: testis expressed 264
  ENST ID: ENST00000412249
  CDS Start-End: 178-596
gaaccctgagccgcctgcgcggatcggcgtccgcagcgggcggctgctgaggggtgactgttctttcagctcccagcactggagcgctcggcccctgccgcactggatgccagcagttactaaaagtgagcctggcatttcagctgccttgaggtgcagtgttggggatccagagccatgtcggacctgctactactgggcctgattgggggcctgactctcttactgctgctgacgctgctggcctttgccgggtactcagggctactggctggggtggaagtgagtgctgggtcaccccccatccgcaacgtcactgtggcctacaagttccacatggggctctatggtgagactgggcggcttttcactgagagctgcagcatctctcccaagctccgctccatcgctgtctactatgacaacccccacatggtgccccctgataagtgccgatgtgccgtgggcagcatcctgagtgaaggtgaggaatcgccctcccctgagctcatcgacctctaccagaaatttggcttcaaggtgttctccttcccggcacccagccatgtggtgacagccaccttcccctacaccac

SEQ ID NO: 190204 - DNA, 2290 bp, Homo sapiens
  Payload ID: 17563
  Gene Symbol: TEX264
  Gene Name: testis expressed 264
  Uniprot ID: Q9Y6I9
  ENST ID: ENST00000415259
  CDS Start-End: 1082-2023
cgcggatcggcgtccgcagcgggcggctgctgaggtgagggccgggccagaggagaggcatacccactggggcgtaggtctgggactccccctgtccgccctggcgcgacctcaggactctccgtgtcccctccgtgacccccgcggcccgggccgctctttgcatcttgtcttgcccacagctggcctcggccaggtccgagggcctggatgcgaccttggggcagcccctactcttccgggcagcccacttccgcggccaccggtgcagggcatgccccggggccgtggaggtgagggaaagaggcgcgagtcgcgttttaactccgcccccgtcccccaaggccgcgcctcgcagcctgggctgcaaactttagcgtcctttaagttacagacgtgcgtggggctccgtgaggaggtgggcgaagagaaaggctctgagtaaataggcaaggcccggggtgagcaggggctggaatccgaaagtgggaggcggcggccccccaccctccatagtccttccgccctctgctagcaccgaagtttagcccaggacgggggccgtttaagggcccggccctccgccgccgcgcacgtgagcggcaccaggaagctggctgggcgcagccttccctgaggctcgctggcaccggccgcacgcgtccatcccgggcctctgagcggagggggagccgaggctagagggagggcgcagtctgcccaaggtcagcggcagcggcagtttctgggcgccaagtgtgattggagtactccaggaagaggggcgtgaccagagctctagcgaagagacctgacattgtaaagctaggtttggcttctgatttccacagggggtttgagaatgggacgagggtgctttagagggaccggtaggctttccctgaggacggtaatcagggcatgatggttggctcagtggttatttcctgggcaggggtgactgttctttcagctcccagcactggagcgctcggcccctgccgcactggatgccagcagttactaaaagtgagcctggcatttcagctgccttgaggtgcagtgttggggatccagagccatgtcggacctgctactactgggcctgattgggggcctgactctcttactgctgctgacgctgctggcctttgccgggtactcagggctactggctggggtggaagtgagtgctgggtcaccccccatccgcaacgtcactgtggcctacaagttccacatggggctctatggtgagactgggcggcttttcactgagagctgcagcatctctcccaagctccgctccatcgctgtctactatgacaacccccacatggtgccccctgataagtgccgatgtgccgtgggcagcatcctgagtgaaggtgaggaatcgccctcccctgagctcatcgacctctaccagaaatttggcttcaaggtgttctccttcccggcacccagccatgtggtgacagccaccttcccctacaccaccattctgtccatctggctggctacccgccgtgtccatcctgccttggacacctacatcaaggagcggaagctgtgtgcctatcctcggctggagatctaccaggaagaccagatccatttcatgtgcccactggcacggcagggagacttctatgtgcctgagatgaaggagacagagtggaaatggcgggggcttgtggaggccattgacacccaggtggatggcacaggagctgacacaatgagtgacacgagttctgtaagcttggaagtgagccctggcagccgggagacttcagctgccacactgtcacctggggcgagcagccgtggctgggatgacggtgacacccgcagcgagcacagctacagcgagtcaggtgccagcggctcctcttttgaggagctggacttggagggcgaggggcccttaggggagtcacggctggaccctgggactgagcccctggggactaccaagtggctctgggagcccactgcccctgagaagggcaaggagtaacccatggcctgcaccctcctgcagtgcagttgctgaggaactgagcagactctccagcagactctccagccctcttcctccttcctctgggggaggaggggttcctgagggacctgacttcccctgctccaggcctcttgctaagccttctcctcactgccctttaggctcccagggccagaggagccagggactattttctgcaccagcccccagggctgccacccctgttgtgtctttttttcagactcacagtggagcttccag

SEQ ID NO: 190205 - DNA, 1313 bp, Homo sapiens
  Payload ID: 17563
  Gene Symbol: TEX264
  Gene Name: testis expressed 264
  Uniprot ID: Q9Y6I9
  ENST ID: ENST00000416589
  CDS Start-End: 71-1012
ccgggccagaggagaggcatacccactggggcgtagctgccttgaggtgcagtgttggggatccagagccatgtcggacctgctactactgggcctgattgggggcctgactctcttactgctgctgacgctgctggcctttgccgggtactcagggctactggctggggtggaagtgagtgctgggtcaccccccatccgcaacgtcactgtggcctacaagttccacatggggctctatggtgagactgggcggcttttcactgagagctgcagcatctctcccaagctccgctccatcgctgtctactatgacaacccccacatggtgccccctgataagtgccgatgtgccgtgggcagcatcctgagtgaaggtgaggaatcgccctcccctgagctcatcgacctctaccagaaatttggcttcaaggtgttctccttcccggcacccagccatgtggtgacagccaccttcccctacaccaccattctgtccatctggctggctacccgccgtgtccatcctgccttggacacctacatcaaggagcggaagctgtgtgcctatcctcggctggagatctaccaggaagaccagatccatttcatgtgcccactggcacggcagggagacttctatgtgcctgagatgaaggagacagagtggaaatggcgggggcttgtggaggccattgacacccaggtggatggcacaggagctgacacaatgagtgacacgagttctgtaagcttggaagtgagccctggcagccgggagacttcagctgccacactgtcacctggggcgagcagccgtggctgggatgacggtgacacccgcagcgagcacagctacagcgagtcaggtgccagcggctcctcttttgaggagctggacttggagggcgaggggcccttaggggagtcacggctggaccctgggactgagcccctggggactaccaagtggctctgggagcccactgcccctgagaagggcaaggagtaacccatggcctgcaccctcctgcagtgcagttgctgaggaactgagcagactctccagcagactctccagccctcttcctccttcctctgggggaggaggggttcctgagggacctgacttcccctgctccaggcctcttgctaagccttctcctcactgccctttaggctcccagggccagaggagccagggactattttctgcaccagcccccagggctgccacccctgttgtgtctttttttcagactcacagtggagcttccaggacccagaataaagccaatgatttacttgtttca

SEQ ID NO: 190206 - DNA, 583 bp, Homo sapiens
  Payload ID: 17563
  Gene Symbol: TEX264
  Gene Name: testis expressed 264
  ENST ID: ENST00000425781
  CDS Start-End: 131-583
gagccgcctgcgcggatcggcgtccgcagcgggcggctgctgaggggaaattcacgttacctctccacgtgccgaccaaggctctgagacccccagctgccttgaggtgcagtgttggggatccagagccatgtcggacctgctactactgggcctgattgggggcctgactctcttactgctgctgacgctgctggcctttgccgggtactcagggctactggctggggtggaagtgagtgctgggtcaccccccatccgcaacgtcactgtggcctacaagttccacatggggctctatggtgagactgggcggcttttcactgagagctgcagcatctctcccaagctccgctccatcgctgtctactatgacaacccccacatggtgccccctgataagtgccgatgtgccgtgggcagcatcctgagtgaaggtgaggaatcgccctcccctgagctcatcgacctctaccagaaatttggcttcaaggtgttctccttcccggcacccagccatgtggtgacagccaccttcccctacaccaccattctgtccatctggctggctacccgccgtgtc

SEQ ID NO: 190207 - DNA, 1155 bp, Homo sapiens
  Payload ID: 17563
  Gene Symbol: TEX264
  Gene Name: testis expressed 264
  ENST ID: ENST00000457927
  CDS Start-End: 509-1155
ccggccctccgccgccgcgcacgtgagcggcaccaggaagctggctgggcgcagccttccctgaggctcgctggcaccggccgcacgcgtccatcccgggcctctgagcggagggggagccgaggctagagggagggcgcagtctgcccaaggtcagcggcagcggcagtttctgggcgccaagtgtgattggagtactccaggaagaggggcgtgaccagagctctagcgaagagacctgacattgtaaagctaggtttggcttctgatttccacagggggtttgagaatgggacgagggtgctttagagggaccggtaggctttccctgaggacggtaatcagggcatgatggttggctcagtggttatttcctgggcaggggtgactgttctttcagctcccagcactggagcgctcggcccctgccgcactggatgccagcagttactaaaagtgagcctggcatttcagctgccttgaggtgcagtgttggggatccagagccatgtcggacctgctactactgggcctgattgggggcctgactctcttactgctgctgacgctgctggcctttgccgggtactcagggctactggctggggtggaagtgagtgctgggtcaccccccatccgcaacgtcactgtggcctacaagttccacatggggctctatggtgagactgggcggcttttcactgagagctgcagcatctctcccaagctccgctccatcgctgtctactatgacaacccccacatggtgccccctgataagtgccgatgtgccgtgggcagcatcctgagtgaaggtgaggaatcgccctcccctgagctcatcgacctctaccagaaatttggcttcaaggtgttctccttcccggcacccagccatgtggtgacagccaccttcccctacaccaccattctgtccatctggctggctacccgccgtgtccatcctgccttggacacctacatcaaggagcggaagctgtgtgcctatcctcggctggagatctaccaggaagaccagatccatttcatgtgcccactggcacggcagggagacttctatgtgcctgagatgaaggagacagagtggaaatggcgggggcttgtggaggccattgacacccaggtggatggcac

SEQ ID NO: 190208 - DNA, 1448 bp, Homo sapiens
  Payload ID: 17563
  Gene Symbol: TEX264
  Gene Name: testis expressed 264
  Uniprot ID: Q9Y6I9
  ENST ID: ENST00000457573
  CDS Start-End: 201-1142
atgtcccgccgcgagagggggcggagcgagcgtgcgcggcgggcgcgcgcaggctccgtaaccgaaccctgagccgcctgcgcggatcggcgtccgcagcgggcggctgctgaggggaaattcacgttacctctccacgtgccgaccaaggctctgagacccccagctgccttgaggtgcagtgttggggatccagagccatgtcggacctgctactactgggcctgattgggggcctgactctcttactgctgctgacgctgctggcctttgccgggtactcagggctactggctggggtggaagtgagtgctgggtcaccccccatccgcaacgtcactgtggcctacaagttccacatggggctctatggtgagactgggcggcttttcactgagagctgcagcatctctcccaagctccgctccatcgctgtctactatgacaacccccacatggtgccccctgataagtgccgatgtgccgtgggcagcatcctgagtgaaggtgaggaatcgccctcccctgagctcatcgacctctaccagaaatttggcttcaaggtgttctccttcccggcacccagccatgtggtgacagccaccttcccctacaccaccattctgtccatctggctggctacccgccgtgtccatcctgccttggacacctacatcaaggagcggaagctgtgtgcctatcctcggctggagatctaccaggaagaccagatccatttcatgtgcccactggcacggcagggagacttctatgtgcctgagatgaaggagacagagtggaaatggcgggggcttgtggaggccattgacacccaggtggatggcacaggagctgacacaatgagtgacacgagttctgtaagcttggaagtgagccctggcagccgggagacttcagctgccacactgtcacctggggcgagcagccgtggctgggatgacggtgacacccgcagcgagcacagctacagcgagtcaggtgccagcggctcctcttttgaggagctggacttggagggcgaggggcccttaggggagtcacggctggaccctgggactgagcccctggggactaccaagtggctctgggagcccactgcccctgagaagggcaaggagtaacccatggcctgcaccctcctgcagtgcagttgctgaggaactgagcagactctccagcagactctccagccctcttcctccttcctctgggggaggaggggttcctgagggacctgacttcccctgctccaggcctcttgctaagccttctcctcactgccctttaggctcccagggccagaggagccagggactattttctgcaccagcccccagggctgccacccctgttgtgtctttttttcagactcacagtggagcttccaggacccagaataaagccaatgatttacttgtttcacctgg

SEQ ID NO: 190209 - DNA, 531 bp, Homo sapiens
  Payload ID: 17563
  Gene Symbol: TEX264
  Gene Name: testis expressed 264
  ENST ID: ENST00000419358
  CDS Start-End: 219-531
tagggggtcattgcctcaatagttccctcttggtgactggccagccctgtggtgacaggcacccagtgctggacttaaggggccacaagcgaaagttggccacaccacctgctgcccaggagtcatcccgccggcggtccaggaagggtcatctgccagcccccgtgcagccgtatgaacacggctgccttgaggtgcagtgttggggatccagagccatgtcggacctgctactactgggcctgattgggggcctgactctcttactgctgctgacgctgctggcctttgccgggtactcagggctactggctggggtggaagtgagtgctgggtcaccccccatccgcaacgtcactgtggcctacaagttccacatggggctctatggtgagactgggcggcttttcactgagagctgcagcatctctcccaagctccgctccatcgctgtctactatgacaacccccacatggtgccccctgataagtgccgatgtgccgtgggcagcatcctgagtgaaggtgagg

SEQ ID NO: 190210 - DNA, 873 bp, Homo sapiens
  Payload ID: 17563
  Gene Symbol: TEX264
  Gene Name: testis expressed 264
  ENST ID: ENST00000444233
  CDS Start-End: 224-873
tcgctggcaccggccgcacgcgtccatcccgggcctctgagcggagggggagccgaggctagagggagggcgcagtctgcccaaggtcagcggcagcggcagtttctgggcgccaagtgtgattggagtactccaggaagaggggcgtgaccagagctctagcgaagagacctgacattgtaaagctagctgccttgaggtgcagtgttggggatccagagccatgtcggacctgctactactgggcctgattgggggcctgactctcttactgctgctgacgctgctggcctttgccgggtactcagggctactggctggggtggaagtgagtgctgggtcaccccccatccgcaacgtcactgtggcctacaagttccacatggggctctatggtgagactgggcggcttttcactgagagctgcagcatctctcccaagctccgctccatcgctgtctactatgacaacccccacatggtgccccctgataagtgccgatgtgccgtgggcagcatcctgagtgaaggtgaggaatcgccctcccctgagctcatcgacctctaccagaaatttggcttcaaggtgttctccttcccggcacccagccatgtggtgacagccaccttcccctacaccaccattctgtccatctggctggctacccgccgtgtccatcctgccttggacacctacatcaaggagcggaagctgtgtgcctatcctcggctggagatctaccaggaagaccagatccatttcatgtgcccactggcacggcagggagacttctatgtgcctgagatgaaggagacagagtggaaatggcgggggcttgtggaggccattgacacccaggtggatggcacagg

SEQ ID NO: 190211 - DNA, 1488 bp, Homo sapiens
  Payload ID: 17563
  Gene Symbol: TEX264
  Gene Name: testis expressed 264
  Uniprot ID: Q9Y6I9
  ENST ID: ENST00000611400
  CDS Start-End: 241-1182
atgtcccgccgcgagagggggcggagcgagcgtgcgcggcgggcgcgcgcaggctccgtaaccgaaccctgagccgcctgcgcggatcggcgtccgcagcgggcggctgctgaggggtgactgttctttcagctcccagcactggagcgctcggcccctgccgcactggatgccagcagttactaaaagtgagcctggcatttcagctgccttgaggtgcagtgttggggatccagagccatgtcggacctgctactactgggcctgattgggggcctgactctcttactgctgctgacgctgctggcctttgccgggtactcagggctactggctggggtggaagtgagtgctgggtcaccccccatccgcaacgtcactgtggcctacaagttccacatggggctctatggtgagactgggcggcttttcactgagagctgcagcatctctcccaagctccgctccatcgctgtctactatgacaacccccacatggtgccccctgataagtgccgatgtgccgtgggcagcatcctgagtgaaggtgaggaatcgccctcccctgagctcatcgacctctaccagaaatttggcttcaaggtgttctccttcccggcacccagccatgtggtgacagccaccttcccctacaccaccattctgtccatctggctggctacccgccgtgtccatcctgccttggacacctacatcaaggagcggaagctgtgtgcctatcctcggctggagatctaccaggaagaccagatccatttcatgtgcccactggcacggcagggagacttctatgtgcctgagatgaaggagacagagtggaaatggcgggggcttgtggaggccattgacacccaggtggatggcacaggagctgacacaatgagtgacacgagttctgtaagcttggaagtgagccctggcagccgggagacttcagctgccacactgtcacctggggcgagcagccgtggctgggatgacggtgacacccgcagcgagcacagctacagcgagtcaggtgccagcggctcctcttttgaggagctggacttggagggcgaggggcccttaggggagtcacggctggaccctgggactgagcccctggggactaccaagtggctctgggagcccactgcccctgagaagggcaaggagtaacccatggcctgcaccctcctgcagtgcagttgctgaggaactgagcagactctccagcagactctccagccctcttcctccttcctctgggggaggaggggttcctgagggacctgacttcccctgctccaggcctcttgctaagccttctcctcactgccctttaggctcccagggccagaggagccagggactattttctgcaccagcccccagggctgccacccctgttgtgtctttttttcagactcacagtggagcttccaggacccagaataaagccaatgatttacttgtttcacctgg

SEQ ID NO: 190212 - DNA, 1174 bp, Homo sapiens
  Payload ID: 17563
  Gene Symbol: TEX264
  Gene Name: testis expressed 264
  ENST ID: ENST00000614067
  CDS Start-End: 149-868
atgtcccgccgcgagagggggcggagcgagcgtgcgcggcgggcgcgcgcaggctccgtaaccgaaccctgagccgcctgcgcggatcggcgtccgcagcgggcggctgctgagctgccttgaggtgcagtgttggggatccagagccatgtcggacctgctactactgggcctgattgggggcctgactctcttactgctgctgacgctgctggcctttgccgggtactcagggctactggctggggtggaagtgagtgctgggtcaccccccatccgcaacgtcactgtggcctacaagttccacatggggctctatggtgagactgggcggcttttcactgagagctgcagcatctctcccaagctccgctccatcgctgtctactatgacaacccccacatggagcggaagctgtgtgcctatcctcggctggagatctaccaggaagaccagatccatttcatgtgcccactggcacggcagggagacttctatgtgcctgagatgaaggagacagagtggaaatggcgggggcttgtggaggccattgacacccaggtggatggcacaggagctgacacaatgagtgacacgagttctgtaagcttggaagtgagccctggcagccgggagacttcagctgccacactgtcacctggggcgagcagccgtggctgggatgacggtgacacccgcagcgagcacagctacagcgagtcaggtgccagcggctcctcttttgaggagctggacttggagggcgaggggcccttaggggagtcacggctggaccctgggactgagcccctggggactaccaagtggctctgggagcccactgcccctgagaagggcaaggagtaacccatggcctgcaccctcctgcagtgcagttgctgaggaactgagcagactctccagcagactctccagccctcttcctccttcctctgggggaggaggggttcctgagggacctgacttcccctgctccaggcctcttgctaagccttctcctcactgccctttaggctcccagggccagaggagccagggactattttctgcaccagcccccagggctgccacccctgttgtgtctttttttcagactcacagtggagcttccaggacccagaataaagccaatgatttacttgtttcacctgg

SEQ ID NO: 190213 - DNA, 1549 bp, Homo sapiens
  Payload ID: 17564
  Gene Symbol: TEX28
  Gene Name: testis expressed 28
  Uniprot ID: O15482
  ENST ID: ENST00000619903
  CDS Start-End: 167-1399
gaggcaagccccgtgtgattgttgaggaggagttagcccattgccagcctgtgacgtgactgactcgaatgaaccctgttattctctcagtgtatcgaagatatcagtcaactatcttctggattgcattgatgctattgagaaggcagcctgcagtctaaaagtcatggttttaaaggcggaacacaccaggagccccagcgcaaccctcccctccaatgtgccttcatgccggtccctgtcatccagcgaagacggccccagtggcccttccagcctcgcagatggaggcctagcccacaacttacaggatagtgtcaggcaccgcatcctctacctctcagagcagctgagagtggagaaggccagtcgggatggcaacactgtgagctacctcaagctggtatccaaagcagaccggcaccaggtgccgcacatccagcaggcctttgagaaggtgaaccagcgcgcctctgccaccatcgcccagatcgagcacaggctccaccagtgtcaccagcagctccaggagctggaggaaggctgcaggcccgagggcttactgctgatggcagaaagcgacccagccaactgcgagccacccagtgagaaggccctgctttcagagccccccgagccaggtggggaagacgggccggtcaacctgcctcatgccagcaggcccttcatcttggagagtcgcttccagagcttacagcaggggacgtgcttagagacagaggatgtggcccagcaacaaaacctgctgttgcagaaggtaaaggcagagctggaagaagccaagaggttccacatcagcctccaggagtcctatcacagcctaaaggagaggtctctgactgacctgcagctgttgctggagtcccttcaggaggagaagtgtaggcaagcattgatggaagaacaggtgaatggtcgcctgcagggacagctgaatgagatttacaacctcaaacacaatctggcctgcagcgaagagagaatggcctatctatcctatgagagagccaaggaaatatgggagatcacggagaccttcaagagccgaatatccaagctggagatgctacagcaagtcacccaactggaggcagcggagcacctccaaagccgtcccccgcagatgttgttcaagttcctgagtccgcgcctctcactggcaaccgtcctcttggtctttgtctccaccttgtgtgcctgcccctcgtcactgatcagctcacgcctgtgcacctgcaccatgctgatgctgatcgggcttggggtcctggcctggcagaggtggcgcgccatccctgccacagactggcaggaatgggtcccctccaggtgtagactgtactccaaggactctgggcctccagcagatggaccttaaggggccaggagggccacctgccttagcttgctagctccctccctcctcctgggtgctgagggcatccagcaagcccctccacagctcttgcttgccgattatgtaaccaccagcctggtgaaatggatatagacgcccacctgcctcaca

SEQ ID NO: 190214 - DNA, 1233 bp, Homo sapiens
  Payload ID: 17564
  Gene Symbol: TEX28
  Gene Name: testis expressed 28
  Uniprot ID: O15482
  ENST ID: ENST00000610938
  CDS Start-End: 1-1233
atggttttaaaggcggaacacaccaggagccccagcgcaaccctcccctccaatgtgccttcatgccggtccctgtcatccagcgaagacggccccagtggcccttccagcctcgcagatggaggcctagcccacaacttacaggatagtgtcaggcaccgcatcctctacctctcagagcagctgagagtggagaaggccagtcgggatggcaacactgtgagctacctcaagctggtatccaaagcagaccggcaccaggtgccgcacatccagcaggcctttgagaaggtgaaccagcgcgcctctgccaccatcgcccagatcgagcacaggctccaccagtgtcaccagcagctccaggagctggaggaaggctgcaggcccgagggcttactgctgatggcagaaagcgacccagccaactgcgagccacccagtgagaaggccctgctttcagagccccccgagccaggtggggaagacgggccggtcaacctgcctcatgccagcaggcccttcatcttggagagtcgcttccagagcttacagcaggggacgtgcttagagacagaggatgtggcccagcaacaaaacctgctgttgcagaaggtaaaggcagagctggaagaagccaagaggttccacatcagcctccaggagtcctatcacagcctaaaggagaggtctctgactgacctgcagctgttgctggagtcccttcaggaggagaagtgtaggcaagcattgatggaagaacaggtgaatggtcgcctgcagggacagctgaatgagatttacaacctcaaacacaatctggcctgcagcgaagagagaatggcctatctatcctatgagagagccaaggaaatatgggagatcacggagaccttcaagagccgaatatccaagctggagatgctacagcaagtcacccaactggaggcagcggagcacctccaaagccgtcccccgcagatgttgttcaagttcctgagtccgcgcctctcactggcaaccgtcctcttggtctttgtctccaccttgtgtgcctgcccctcgtcactgatcagctcacgcctgtgcacctgcaccatgctgatgctgatcgggcttggggtcctggcctggcagaggtggcgcgccatccctgccacagactggcaggaatgggtcccctccaggtgtagactgtactccaaggactctgggcctccagcagatggaccttaa

SEQ ID NO: 190215 - DNA, 1525 bp, Homo sapiens
  Payload ID: 17564
  Gene Symbol: TEX28
  Gene Name: testis expressed 28
  Uniprot ID: O15482
  ENST ID: ENST00000617225
  CDS Start-End: 145-1377
tggtgccagcactagcccccatgtcggtctcagagaaccttctccccacctctgagttattctctcagtgtatcgaagatatcagtcaactatcttctggattgcattgatgctattgagaaggcagcctgcagtctaaaagtcatggttttaaaggcggaacacaccaggagccccagcgcaaccctcccctccaatgtgccttcatgccggtccctgtcatccagcgaagacggccccagtggcccttccagcctcgcagatggaggcctagcccacaacttacaggatagtgtcaggcaccgcatcctctacctctcagagcagctgagagtggagaaggccagtcgggatggcaacactgtgagctacctcaagctggtatccaaagcagaccggcaccaggtgccgcacatccagcaggcctttgagaaggtgaaccagcgcgcctctgccaccatcgcccagatcgagcacaggctccaccagtgtcaccagcagctccaggagctggaggaaggctgcaggcccgagggcttactgctgatggcagaaagcgacccagccaactgcgagccacccagtgagaaggccctgctttcagagccccccgagccaggtggggaagacgggccggtcaacctgcctcatgccagcaggcccttcatcttggagagtcgcttccagagcttacagcaggggacgtgcttagagacagaggatgtggcccagcaacaaaacctgctgttgcagaaggtaaaggcagagctggaagaagccaagaggttccacatcagcctccaggagtcctatcacagcctaaaggagaggtctctgactgacctgcagctgttgctggagtcccttcaggaggagaagtgtaggcaagcattgatggaagaacaggtgaatggtcgcctgcagggacagctgaatgagatttacaacctcaaacacaatctggcctgcagcgaagagagaatggcctatctatcctatgagagagccaaggaaatatgggagatcacggagaccttcaagagccgaatatccaagctggagatgctacagcaagtcacccaactggaggcagcggagcacctccaaagccgtcccccgcagatgttgttcaagttcctgagtccgcgcctctcactggcaaccgtcctcttggtctttgtctccaccttgtgtgcctgcccctcgtcactgatcagctcacgcctgtgcacctgcaccatgctgatgctgatcgggcttggggtcctggcctggcagaggtggcgcgccatccctgccacagactggcaggaatgggtcccctccaggtgtagactgtactccaaggactctgggcctccagcagatggaccttaaggggccaggagggccacctgccttagcttgctagctccctccctcctcctgggtgctgagggcatccagcaagcccctccacagctcttgcttgccgattatgtaaccaccagcctggtgaaatggatatagacgcccacctgcctca

SEQ ID NO: 190216 - DNA, 709 bp, Homo sapiens
  Payload ID: 17565
  Gene Symbol: TEX29
  Gene Name: testis expressed 29
  Uniprot ID: Q8N6K0
  ENST ID: ENST00000283547
  CDS Start-End: 130-585
ccagtttgttgttttacctaaaaggtgttttccacgtggagtgggactgagaggcacaggtggctgaggggacccgcctgggatgtgaggcgcaggtgtgctcggccccttcatctgtcagctgcagcaatggaatacgtgctggaagtgaagaactctccgcggcacctcctgaagcaattcacagtgtgtgacgttcctctgtatgacatttgtgactacaacgtctccagggaccgatgccaggagctcgggtgctgcttctacgaaggcgtctgctacaagaaagcggttcccatttacatccacgtgttctctgccttgattgtgatcatcgctggggccttcgtcatcaccatcatctacagagtcattcaggagagcaggaaagaaaaggccatccctgtggatgtcgcgctgccacagaagtccagcgaaaaggcggagttggcctcatccagcagcaagttagggctgaagcctgcgagtcctgggcctccaagtgctgggccctcgatgaagagtgacgaggataaggatgatgtaacagggacaataacagaagccgaagaaactgaggactgactgagacgcatgaagaagtggagattgtcagaattatccaaatgaaatggtacagcaggtgcactgttaacagtgtgatggaatgaccacccaaagagaaaaaaataaaggtattttgaaaatt

SEQ ID NO: 190217 - DNA, 835 bp, Homo sapiens
  Payload ID: 17565
  Gene Symbol: TEX29
  Gene Name: testis expressed 29
  ENST ID: ENST00000497241
  CDS Start-End: 28-282
ggtgagttctcctggaagaagaacctgatgccagccatctgtcaaggaagacaggaagtaacagtgcaggctcagtgtgctcggccccttcatctgtcagctgcagcaatggaatacgtgctggaagtgaagaactctccgcggcacctcctgaagcaattcacagtgtgtgacgttcctctgtatgacatttgtgactacaacgtctccagggaccgatgccaggagctcgggtgctgcttctacgaaggcgtctgctacaagaaagcggttcccatttaggggaggaattgacctgggcattgaggagccatttccagggagctggggagcacagcaggaacagaggggccagcgccatctctccacgcacccccaggggtcaggagccagcaccatctatcctccacacactcccgaggtttacatccacgtgttctctgccttgattgtgatcatcgctggggccttcgtcatcaccatcatctacagagtcattcaggagagcaggaaagaaaaggccatccctgtggatgtcgcgctgccacagaagtccagcgaaaaggcggagttggcctcatccagcagcaagttagggctgaagcctgcgagtcctgggcctccaagtgctgggccctcgatgaagagtgacgaggataaggatgatgtaacagggacaataacagaagccgaagaaactgaggactgactgagacgcatgaagaagtggagattgtcagaattatccaaatgaaatggtacagcaggtgcactgttaacagtgtgatggaatgaccacccaaagagaaaaaaataaaggtattttgaaaattgc

SEQ ID NO: 190218 - DNA, 1689 bp, Homo sapiens
  Payload ID: 17566
  Gene Symbol: TEX30
  Gene Name: testis expressed 30
  ENST ID: ENST00000376019
  CDS Start-End: 838-1398
ccaaccctgcacctggccctctaaccaattctgagtgcccgtagaaaaatgtacatgtaaagacaccagattttagggaagtaattctaaatgtttattttagctactgaatgtgttcattcatagtttttgtgtcatatccatgtctgccaactcacctttcacaacagaatcttcttttcagggagatgtcctttgcttctcagatgtaaatgcactttaagtttgttattcaacagtgaaaatgagtcatacagaggtaatattttcgtatgttctgcatcttcagggttcctggttttttgtttgtttgtaattatgtggcttcagagtaattttattttcaactttcactgtgggaggcagtatagcataagtggttaagagcgaggaatctagagcagactaccctgagtttaaatcctagctagcggctatataaccttgggcaagttacttaatctgctgtgccttatctataaaatggggataatgatagtgcttgcctcacagaattgttagaaaagtgaaataagttaatacatataaagcacttataataatacccgacacagtaagcacttaactactattattaatatcactactttttatttggaggctatgacttgaattatgagcctcacagagcaaacatatatatagctgttcagttgtcttaataggcaagaaagtaatttttgatccctttattctcttgaattccaggttaaattaaaaataccttttggaaataaattactagatgctgtttgtttggtacctaacaagagcttaacatatggaataattcttacacatggagcatcaggagatatgaatcttcctcatttgatgtcactggcatcccatcttgcatctcatgggtttttctgcctgagatttacctgtaaaggccttaatattgtacatagaattaaggcgtataaatcagttttgaattacctgaagacatcaggagaatacaaacttgcaggtgtttttcttggaggtcgttcaatgggctcaagagcagctgcttctgtaatgtgtcacattgagccagatgatggtgatgattttgttcggggtctcatttgtatttcttacccactgcaccatccaaagcagcagcataaactcagagatgaagacctctttcgtttaaaagagcctgtactgtttgtgtcaggctcagcagatgaaatgtgtgaaaagaacttgttggagaaagtggcacagaaaatgcaagctccccataaaatccactggattgagaaggcaaatcattccatggcagtgaaaggacggtcgacaaatgatgttttcaaagaaataaatacacagattttgttttggatccaagaaattactgaaatggacaagaaatgtcattagttaaaagccatgttatcttgagtacacatacagttaatttgataaagaagagtatgcctctcagcattgtgagatatatttcagactaatttgatgttctttaatgttcccttatttttgaaacacgttttaaatgtgaaattaatgtccttcacaaaatgtcttttgaaagcactgttacagttgtataaagatgatgtaaaaatattgaaggtggtctacatataatttattttcattagtatagttaagttttgaaaaaaattaaacatctgaattttgttacaaaaa

SEQ ID NO: 190219 - DNA, 1038 bp, Homo sapiens
  Payload ID: 17566
  Gene Symbol: TEX30
  Gene Name: testis expressed 30
  ENST ID: ENST00000376021
  CDS Start-End: 187-747
gtcgcttcgagcgcgctagtcagctccctgaagggagtgacggcggttgggtgcccgcggccacttttgccttcccgggttaaattaaaaataccttttggaaataaattactagatgctgtttgtttggtacctaacaagagcttaacatatggaataattcttacacatggagcatcaggagatatgaatcttcctcatttgatgtcactggcatcccatcttgcatctcatgggtttttctgcctgagatttacctgtaaaggccttaatattgtacatagaattaaggcgtataaatcagttttgaattacctgaagacatcaggagaatacaaacttgcaggtgtttttcttggaggtcgttcaatgggctcaagagcagctgcttctgtaatgtgtcacattgagccagatgatggtgatgattttgttcggggtctcatttgtatttcttacccactgcaccatccaaagcagcagcataaactcagagatgaagacctctttcgtttaaaagagcctgtactgtttgtgtcaggctcagcagatgaaatgtgtgaaaagaacttgttggagaaagtggcacagaaaatgcaagctccccataaaatccactggattgagaaggcaaatcattccatggcagtgaaaggacggtcgacaaatgatgttttcaaagaaataaatacacagattttgttttggatccaagaaattactgaaatggacaagaaatgtcattagttaaaagccatgttatcttgagtacacatacagttaatttgataaagaagagtatgcctctcagcattgtgagatatatttcagactaatttgatgttctttaatgttcccttatttttgaaacacgttttaaatgtgaaattaatgtccttcacaaaatgtcttttgaaagcactgttacagttgtataaagatgatgtaaaaatattgaaggtggtctacatataatttattttcattagtatagttaagttttgaaaaaaattaaacatctgaattttgttacaaaaa

SEQ ID NO: 190220 - DNA, 828 bp, Homo sapiens
  Payload ID: 17566
  Gene Symbol: TEX30
  Gene Name: testis expressed 30
  ENST ID: ENST00000376022
  CDS Start-End: 183-401
cttcgagcgcgctagtcagctccctgaagggagtgacggcggttgggtgcccgcggccacttttgccttcccgggttaaattaaaaataccttttggaaataaattactagatgctgtttgtttggtacctaacaagagcttaacatatggaataattcttacacatggagcatcaggagatatgaatcttcctcatttgatgtcactggcatcccatcttgcatctcatgggtttttctgcctgagatttacctgtaaaggccttaatattgtacatagaattaaggcgtataaatcagttttgaattacctgaagacatcaggagaatacaaacttgcaggtgtttttcttggagaacttgttggagaaagtggcacagaaaatgcaagctccccataaaatccactggattgagaaggcaaatcattccatggcagtgaaaggacggtcgacaaatgatgttttcaaagaaataaatacacagattttgttttggatccaagaaattactgaaatggacaagaaatgtcattagttaaaagccatgttatcttgagtacacatacagttaatttgataaagaagagtatgcctctcagcattgtgagatatatttcagactaatttgatgttctttaatgttcccttatttttgaaacacgttttaaatgtgaaattaatgtccttcacaaaatgtcttttgaaagcactgttacagttgtataaagatgatgtaaaaatattgaaggtggtctacatataatttattttcattagtatagttaagttttgaaaaaaattaaacatctgaattttgttacaaaaa

SEQ ID NO: 190221 - DNA, 1106 bp, Homo sapiens
  Payload ID: 17566
  Gene Symbol: TEX30
  Gene Name: testis expressed 30
  Uniprot ID: Q5JUR7
  ENST ID: ENST00000376027
  CDS Start-End: 218-559
tcatggatcttcagatcagctgttggtcagatgttggttagactagtctggactccagacttcagttttgggttcagttctgttccgtgtgtcttcattttgagacccaggctgaaaatgcaaaaccacctagagcatgtttttctcatggctgaggggagatgtcctttgcttctcagatgtaaatgcactttaagtttgttattcaacagtgaaaatgagtcatacagaggttaaattaaaaataccttttggaaataaattactagatgctgtttgtttggtacctaacaagagcttaacatatggaataattcttacacatggagcatcaggagatatgaatcttcctcatttgatgtcactggcatcccatcttgcatctcatgggtttttctgcctgagatttacctgtaaaggccttaatattgtacatagaattaaggcgtataaatcagttttgaattacctgaagacatcaggagaatacaaacttgcaggtgtttttcttggagaacttgttggagaaagtggcacagaaaatgcaagctccccataaaatccactggattgagaaggcaaatcattccatggcagtgaaaggacggtcgacaaatgatgttttcaaagaaataaatacacagattttgttttggatccaagaaattactgaaatggacaagaaatgtcattagttaaaagccatgttatcttgagtacacatacagttaatttgataaagaagagtatgcctctcagcattgtgagatatatttcagactaatttgatgttctttaatgttcccttatttttgaaacacgttttaaatgtgaaattaatgtccttcacaaaatgtcttttgaaagcactgttacagttgtataaagatgatgtaaaaatattgaaggtggtctacatataatttattttcattagtatagttaagttttgaaaaaaattaaacatctgaattttgttacaaaaaggtgcttttgtcttattgataggcaactgagaaattttgcagagcagcgttatcttcagaaaaggaaaacattatggttaatctagtcagagatttatagaatgcacacatctcttcacc

SEQ ID NO: 190222 - DNA, 959 bp, Homo sapiens
  Payload ID: 17566
  Gene Symbol: TEX30
  Gene Name: testis expressed 30
  Uniprot ID: Q5JUR7
  ENST ID: ENST00000376029
  CDS Start-End: 191-532
gcctgcgcgcgcgtgcgtcgtagccgaacgctgtggcggggcaggcgaggcggtcgcttcgagcgcgctagtcagctccctgaagggagtgacggcggttgggtgcccgcggccacttttgccttcccggggagatgtcctttgcttctcagatgtaaatgcactttaagtttgttattcaacagtgaaaatgagtcatacagaggttaaattaaaaataccttttggaaataaattactagatgctgtttgtttggtacctaacaagagcttaacatatggaataattcttacacatggagcatcaggagatatgaatcttcctcatttgatgtcactggcatcccatcttgcatctcatgggtttttctgcctgagatttacctgtaaaggccttaatattgtacatagaattaaggcgtataaatcagttttgaattacctgaagacatcaggagaatacaaacttgcaggtgtttttcttggagaacttgttggagaaagtggcacagaaaatgcaagctccccataaaatccactggattgagaaggcaaatcattccatggcagtgaaaggacggtcgacaaatgatgttttcaaagaaataaatacacagattttgttttggatccaagaaattactgaaatggacaagaaatgtcattagttaaaagccatgttatcttgagtacacatacagttaatttgataaagaagagtatgcctctcagcattgtgagatatatttcagactaatttgatgttctttaatgttcccttatttttgaaacacgttttaaatgtgaaattaatgtccttcacaaaatgtcttttgaaagcactgttacagttgtataaagatgatgtaaaaatattgaaggtggtctacatataatttattttcattagtatagttaagttttgaaaaaaattaaacatctgaattttgttacaaaaa

SEQ ID NO: 190223 - DNA, 1165 bp, Homo sapiens
  Payload ID: 17566
  Gene Symbol: TEX30
  Gene Name: testis expressed 30
  Uniprot ID: Q5JUR7
  ENST ID: ENST00000376032
  CDS Start-End: 191-874
gcctgcgcgcgcgtgcgtcgtagccgaacgctgtggcggggcaggcgaggcggtcgcttcgagcgcgctagtcagctccctgaagggagtgacggcggttgggtgcccgcggccacttttgccttcccggggagatgtcctttgcttctcagatgtaaatgcactttaagtttgttattcaacagtgaaaatgagtcatacagaggttaaattaaaaataccttttggaaataaattactagatgctgtttgtttggtacctaacaagagcttaacatatggaataattcttacacatggagcatcaggagatatgaatcttcctcatttgatgtcactggcatcccatcttgcatctcatgggtttttctgcctgagatttacctgtaaaggccttaatattgtacatagaattaaggcgtataaatcagttttgaattacctgaagacatcaggagaatacaaacttgcaggtgtttttcttggaggtcgttcaatgggctcaagagcagctgcttctgtaatgtgtcacattgagccagatgatggtgatgattttgttcggggtctcatttgtatttcttacccactgcaccatccaaagcagcagcataaactcagagatgaagacctctttcgtttaaaagagcctgtactgtttgtgtcaggctcagcagatgaaatgtgtgaaaagaacttgttggagaaagtggcacagaaaatgcaagctccccataaaatccactggattgagaaggcaaatcattccatggcagtgaaaggacggtcgacaaatgatgttttcaaagaaataaatacacagattttgttttggatccaagaaattactgaaatggacaagaaatgtcattagttaaaagccatgttatcttgagtacacatacagttaatttgataaagaagagtatgcctctcagcattgtgagatatatttcagactaatttgatgttctttaatgttcccttatttttgaaacacgttttaaatgtgaaattaatgtccttcacaaaatgtcttttgaaagcactgttacagttgtataaagatgatgtaaaaatattgaaggtggtctacatataatttattttcattagtatagttaagttttgaaaaaaattaaacatctgaattttgttacaaaaa

SEQ ID NO: 190224 - DNA, 978 bp, Homo sapiens
  Payload ID: 17567
  Gene Symbol: TEX33
  Gene Name: testis expressed 33
  Uniprot ID: O43247
  ENST ID: ENST00000381821
  CDS Start-End: 113-955
atctgcacttctgggcttcagcacacatcagtgtggttcacgtgtttcctgctgttatgaaagagattggagaggactaagcttggaattgcctgtcccacagcaagaggctatggagctgggccacggagcaggtacaaccactttcaccagggcccatctgaatgacaaggagggccaacaggacttggacccctggaaagcggcctacagttccttggacacctccaagttcaagaaccagggtctgtcatccccacagcccctgcccctgggagccagcgctcaaggcagctccctagggcagtgccacttgaaggagattccccctccacccccgactgctgccagcagggattctctgggcatggacccacagtccaggtccctgaagaatgcgggctctcgatcctcctcgagagagaacagggccacctcgggagagggggctcagccatgccaggggacggatgacggtcccagcttgggggctcaggaccagaggagcacgcccacgaaccagaagggcagcatcattcctaacaacattcgccacaagtttgggagcaatgtggtggaccagctggtctccgaggagcaggctcaaaaggctattgatgaagtcttcgagggccagaaaagggcaagctcatggcccagcaggacccagaatcctgtggaaatctcctccgtcttctcagactactatgacctcggctacaacatgcggtcaaacttgtttcgaggggctgctgaggagacaaagagcctcatgaaggcttcttacacaccagaggtcattgagaaatcagtgagggacttagaacactggcatggcaggaagacggatgatctggggcggtggcaccagaaaaatgctatgaacctgaacttgcagaaagcactggaagagaaatatggagaaaacagcaaatccaagagctccaagtactagttttgacacagtagaggtgtctt

SEQ ID NO: 190225 - DNA, 986 bp, Homo sapiens
  Payload ID: 17567
  Gene Symbol: TEX33
  Gene Name: testis expressed 33
  Uniprot ID: O43247
  ENST ID: ENST00000402860
  CDS Start-End: 345-932
gcacttctgggcttcagcacacatcagtgtggttcacgtgtttcctgctgttatgaaagagattggagaggactaagcttggaattgcctgtcccacagcaagaggctatggagctgggccacggagcagggcccatctgaatgacaaggagggccaacaggacttggacccctggaaagcggcctacagttccttggacacctccaagttcaagaaccagggtctgtcatccccacagcccctgcccctgggagccagcgctcaaggcagctccctagggcagtgccacttgaaggagattccccctccacccccgactgctgccagcagggattctctgggcatggacccacagtccaggtccctgaagaatgcgggctctcgatcctcctcgagagagaacagggccacctcgggagagggggctcagccatgccaggggacggatgacggtcccagcttgggggctcaggaccagaggagcacgcccacgaaccagaagggcagcatcattcctaacaacattcgccacaagtttgggagcaatgtggtggaccagctggtctccgaggagcaggctcaaaaggctattgatgaagtcttcgagggccagaaaagggcaagctcatggcccagcaggacccagaatcctgtggaaatctcctccgtcttctcagactactatgacctcggctacaacatgcggtcaaacttgtttcgaggggctgctgaggagacaaagagcctcatgaaggcttcttacacaccagaggtcattgagaaatcagtgagggacttagaacactggcatggcaggaagacggatgatctggggcggtggcaccagaaaaatgctatgaacctgaacttgcagaaagcactggaagagaaatatggagaaaacagcaaatccaagagctccaagtactagttttgacacagtagaggtgtcttctactcaaataaagtgctaacaataaggaaa

SEQ ID NO: 190226 - DNA, 1149 bp, Homo sapiens
  Payload ID: 17567
  Gene Symbol: TEX33
  Gene Name: testis expressed 33
  Uniprot ID: O43247
  ENST ID: ENST00000405091
  CDS Start-End: 253-1095
aaccatccattggtcttcaccagtagttctgcagtggggatctgcacttctgggcttcagcacacatcagtgtggttcacgtgtttcctgctgttatgaaagagattggagaggtgagaaactggaagtgagtccacacttccattgtagcccgtccagactgctgtggactggcagtgcactgggacgtacagagctgccgtgggcacgtcaggactaagcttggaattgcctgtcccacagcaagaggctatggagctgggccacggagcaggtacaaccactttcaccagggcccatctgaatgacaaggagggccaacaggacttggacccctggaaagcggcctacagttccttggacacctccaagttcaagaaccagggtctgtcatccccacagcccctgcccctgggagccagcgctcaaggcagctccctagggcagtgccacttgaaggagattccccctccacccccgactgctgccagcagggattctctgggcatggacccacagtccaggtccctgaagaatgcgggctctcgatcctcctcgagagagaacagggccacctcgggagagggggctcagccatgccaggggacggatgacggtcccagcttgggggctcaggaccagaggagcacgcccacgaaccagaagggcagcatcattcctaacaacattcgccacaagtttgggagcaatgtggtggaccagctggtctccgaggagcaggctcaaaaggctattgatgaagtcttcgagggccagaaaagggcaagctcatggcccagcaggacccagaatcctgtggaaatctcctccgtcttctcagactactatgacctcggctacaacatgcggtcaaacttgtttcgaggggctgctgaggagacaaagagcctcatgaaggcttcttacacaccagaggtcattgagaaatcagtgagggacttagaacactggcatggcaggaagacggatgatctggggcggtggcaccagaaaaatgctatgaacctgaacttgcagaaagcactggaagagaaatatggagaaaacagcaaatccaagagctccaagtactagttttgacacagtagaggtgtcttctactcaaataaagtgctaacaataaggaaa

SEQ ID NO: 190227 - DNA, 477 bp, Homo sapiens
  Payload ID: 17567
  Gene Symbol: TEX33
  Gene Name: testis expressed 33
  ENST ID: ENST00000442538
  CDS Start-End: 1-418
caggacttggacccctggaaagcggcctacagttccttggacacctccaagttcaagaaccagggctcaaaaggctattgatgaagtcttcgagggccagaaaagggcaagctcatggcccagcaggacccagaatcctgtggaaatctcctccgtcttctcagactactatgacctcggctacaacatgcggtcaaacttgtttcgaggggctgctgaggagacaaagagcctcatgaaggcttcttacacaccagaggtcattgagaaatcagtgagggacttagaacactggcatggcaggaagacggatgatctggggcggtggcaccagaaaaatgctatgaacctgaacttgcagaaagcactggaagagaaatatggagaaaacagcaaatccaagagctccaagtactagttttgacacagtagaggtgtcttctactcaaataaagtgctaacaataaggaaaggctc

SEQ ID NO: 190228 - DNA, 1023 bp, Homo sapiens
  Payload ID: 17568
  Gene Symbol: TEX35
  Gene Name: testis expressed 35
  Uniprot ID: Q5T0J7
  ENST ID: ENST00000319416
  CDS Start-End: 113-814
acacaaaggggtggtcaccctgccctcaccttgacctgtaagttgcctaggacagtggcctggtcccaggggctgttgtggggagttgaagaacaccctggcctcctccatcatgtcggccaagagggcagaattgaagaaaacacatctgagcaagaactacaaggcagtttgcctggaattgaagccagagccgaccaaaacatttgattacaaagcagttaaacaagaagggcggtttaccaaagcaggagtgacacaggacctaaagaatgaactcagggaagtgagagaagagctcaaggagaaaatggaggagataaaacagataaaggatctaatggacaaggattttgataaacttcacgaatttgtggaaattatgaaggaaatgcagaaagatatggatgagaagatggacattttaataaatacacagaagaactataagcttccccttagaagagcaccaaaggagcagcaggaactcaggctgatgggaaagactcacagagaaccacagctcaggcccaagaaaatggatggagccagtggagtcaatggagcaccctgtgctcttcacaagaagacgatggcaccacaaaaaacaaaacagggctcactggatccccttcatcactgtgggacctgctgcgagaaatgtttgttgtgtgctctaaagaacaactacaatcgggggaacattccttcagaggcctcaggcctttacaaaggtggagaggagccagtgaccacccaaccttctgtgggccacgctgtgcctgccccaaagtcccagactgagggaaggtgaagcttaactgccagcttgaaatgagagtaaagaagatacagagcaaacagtgtttcagaaactgtcctgccctgggtgtgattctttggcttcaatttgaaggacgaggaatgatgggatttcatattttatttcacaccagttcctccttgtttcatctctttgctaagctggctgcttctaccatctaataaataattggccaagtt

SEQ ID NO: 190229 - DNA, 785 bp, Homo sapiens
  Payload ID: 17568
  Gene Symbol: TEX35
  Gene Name: testis expressed 35
  Uniprot ID: Q5T0J7
  ENST ID: ENST00000367639
  CDS Start-End: 46-693
aggggctgttgtggggagttgaagaacaccctggcctcctccatcatgtcggccaagagggcagaattgaagaaaacacatctggtaaaagagagacattgctggacaagcaagaactacaaggcagtttgcctggaattgaagccagagccgaccaaaacatttgattacaaagcagttaaacaagaagggcggtttaccaaagcaggagtgacacaggacctaaagaatgaactcagggaagtgagagaagagctcaaggagaaaatggaggagataaaacagataaaggatctaatggacaaggattttgataaacttcacgaatttgtggaaattatgaaggaaatgcagaaagatatggatgagaagatggacattttaataaatacacagaagaactataagcttccccttagaagagcaccaaaggagcagcaggaactcaggctgatgggaaagactcacagagaaccacagctcaggcccaagaaaatggatggagccagtggagtcaatggagcaccctgtgctcttcacaagaagacgatggcaccacaaaaaacaaaacagggctcactggatccccttcatcactgtgggacctgctgcgagaaatgtttgttgtgtgctctaaagaacaactacaatcggggtatatacgctgcagtgggactgctggatctatggtagctcaatttttagttttttgaggaacaacctccaaactgttctccatagtggctgtactaatttacattcccaccaacagtgtacaaagattc

SEQ ID NO: 190230 - DNA, 2377 bp, Homo sapiens
  Payload ID: 17568
  Gene Symbol: TEX35
  Gene Name: testis expressed 35
  Uniprot ID: Q5T0J7
  ENST ID: ENST00000367641
  CDS Start-End: 60-665
agtggcctggtcccaggggctgttgtggggagttgaagaacaccctggcctcctccatcatgtcggccaagagggcagaattgaagaaaacacatctgagcaagaactacaaggcagtttgcctggaattgaagccagagccgaccaaaacatttgattacaaagcagttaaacaagaagggcggtttaccaaagcaggagtgacacaggacctaaagaatgaactcagggaagtgagagaagagctcaaggagaaaatggaggagataaaacagataaaggatctaatggacaaggattttgataaacttcacgaatttgtggaaattatgaaggaaatgcagaaagatatggatgagaagatggacattttaataaatacacagaagaactataagcttccccttagaagagcaccaaaggagcagcaggaactcaggctgatgggaaagactcacagagaaccacagctcaggcccaagaaaatggatggagccagtggagtcaatggagcaccctgtgctcttcacaagaagacgatggcaccacaaaaaacaaaacagggctcactggatccccttcatcactgtgggacctgctgcgtaagtgaaaccctgcccgagcccagcactggtgccagacccctggctccggctccctggtgacttccccgagcttgtgctgtatcatagtgaagggacaggtccgcccgctgctgacttctgggtgccgcccgagcctgcgccctccctgacctgccttgccttctaggcctgtggagcctccttagctgtgaccatgcaggacttgaccctggatgggcctacccgccagctccaccctcttattctgtccttccctttagcaagggcagataaggtgcctagcaggctgcccttcttggaccaggggaaattgatctttcttgtgccgtttctgtcctctgcaggagaaatgtttgttgtgtgctctaaagaacaactacaatcggggtaggtagattcatacaagatgtgccttttctcgatcaggtgccttgttgtccccaaggccatgtgctcccagccgcattcacatcacacccctcctgaggttgtgccaggagtagggactgttagcagatgctgccacccagcatgctcagtcatacaggatgtggcaccaggaaggaggacttgggtcacccagcctagaggctgctgcctggggctcccatggtggggagggtgcaccactagtggcggaactgaccttgcctcaggtcctgccctttctccccatccagtgggaaatattcacaccaggtctgggcacccttttcacccttggcttctggagctgccttctgatttatctgtacctcaaccccggtgacatcgaatatgtgtttccaacctagcgcagctgcagaacctaccagcagttccgattcatcacctccaagctccttaagatgcacagtcagggcttcttgtcctgttaaataccaccccaaccccaggcctccactggagattaaaaaccttcattcaaagccaaaggggatgtcatggttttgagtaccagtccaaaacttgagtgtgtggaggttgattatttttggttctatatcagtgtatttcagactccaacccttccccctgcttcctgatggattggtgggaaattacatcttagtcatcttagggtcctcccaaccaccacctccctccattccacctgggtctgcaaacgtcccaggtcatagcatggggagggcccctgatgatagcggacgccagtctgtgtggtctcaggagagaccctgctgcctggcccatccgctccctccacataatcagcctccacctgtgcatggggccagggtgtcttgggtgatgcagggaacccctcagcctcgagttctgcctgcaccacacccctctgaggtcttgtcaccaagcaggactcaggtccctgctgctcataggaactgggtagctttcttgggttctggggatccacccttctcacccccttgaaggtttcctctccctccctccacccccaaagggaacattccttcagaggcctcaggcctttacaaaggtggagaggagccagtgaccacccaaccttctgtgggccacgctgtgcctgccccaaagtcccagactgagggaaggtgaagcttaactgccagcttgaaatgagagtaaagaagatacagagcaaacagtgtttcagaaactgtcctgccctgggtgtgattctttggcttcaatttgaaggacgaggaatgatgggatttcatattttatttcacaccagttcctccttgtttcatctctttgctaagctggctgcttctaccatctaataaataattggccaagtt

SEQ ID NO: 190231 - DNA, 2452 bp, Homo sapiens
  Payload ID: 17568
  Gene Symbol: TEX35
  Gene Name: testis expressed 35
  ENST ID: ENST00000367642
  CDS Start-End: 72-371
gttgcctaggacagtggcctggtcccaggggctgttgtggggagttgaagaacaccctggcctcctccatcatgtcggccaagagggcagaattgaagaaaacacatctgagcaagaactacaaggcagtttgcctggaattgaagccagagccgaccaaagtaagaagcccttttgaggccatgcaggcagccaggcctgagatccatggggaagtgaccaggagtcaggggtcatttgctgatcctagtggccaagatttgtcccagacatttgattacaaagcagttaaacaagaagggcggtttaccaaagcaggaaggacacccagactcttggaggagttgtctttgctcctactgcccctgtgacttggagtcaaggccttccatggccacccgtgtactggttatctccttgtcatgctgcaaaatgtctccccaactctctgcccctccctggccctcctcccccagtccccttagaagagcaccaaaggagcagcaggaactcaggctgatgggaaagactcacagagaaccacagctcaggcccaagaaaatggatggagccagtggagtcaatggagcaccctgtgctcttcacaagaagacgatggcaccacaaaaaacaaaacagggctcactggatccccttcatcactgtgggacctgctgcgtaagtgaaaccctgcccgagcccagcactggtgccagacccctggctccggctccctggtgacttccccgagcttgtgctgtatcatagtgaagggacaggtccgcccgctgctgacttctgggtgccgcccgagcctgcgccctccctgacctgccttgccttctaggcctgtggagcctccttagctgtgaccatgcaggacttgaccctggatgggcctacccgccagctccaccctcttattctgtccttccctttagcaagggcagataaggtgcctagcaggctgcccttcttggaccaggggaaattgatctttcttgtgccgtttctgtcctctgcaggagaaatgtttgttgtgtgctctaaagaacaactacaatcggggtaggtagattcatacaagatgtgccttttctcgatcaggtgccttgttgtccccaaggccatgtgctcccagccgcattcacatcacacccctcctgaggttgtgccaggagtagggactgttagcagatgctgccacccagcatgctcagtcatacaggatgtggcaccaggaaggaggacttgggtcacccagcctagaggctgctgcctggggctcccatggtggggagggtgcaccactagtggcggaactgaccttgcctcaggtcctgccctttctccccatccagtgggaaatattcacaccaggtctgggcacccttttcacccttggcttctggagctgccttctgatttatctgtacctcaaccccggtgacatcgaatatgtgtttccaacctagcgcagctgcagaacctaccagcagttccgattcatcacctccaagctccttaagatgcacagtcagggcttcttgtcctgttaaataccaccccaaccccaggcctccactggagattaaaaaccttcattcaaagccaaaggggatgtcatggttttgagtaccagtccaaaacttgagtgtgtggaggttgattatttttggttctatatcagtgtatttcagactccaacccttccccctgcttcctgatggattggtgggaaattacatcttagtcatcttagggtcctcccaaccaccacctccctccattccacctgggtctgcaaacgtcccaggtcatagcatggggagggcccctgatgatagcggacgccagtctgtgtggtctcaggagagaccctgctgcctggcccatccgctccctccacataatcagcctccacctgtgcatggggccagggtgtcttgggtgatgcagggaacccctcagcctcgagttctgcctgcaccacacccctctgaggtcttgtcaccaagcaggactcaggtccctgctgctcataggaactgggtagctttcttgggttctggggatccacccttctcacccccttgaaggtttcctctccctccctccacccccaaagggaacattccttcagaggcctcaggcctttacaaaggtggagaggagccagtgaccacccaaccttctgtgggccacgctgtgcctgccccaaagtcccagactgagggaaggtgaagcttaactgccagcttgaaatgagagtaaagaagatacagagcaaacagtgtttcagaaactgtcctgccctgggtgtgattctttggcttcaatttgaaggacgaggaatgatgggatttcatattttatttcacaccagttcctccttgtttcatctctttgctaagctggctgcttctaccatctaataaataattggccaagt

SEQ ID NO: 190232 - DNA, 802 bp, Homo sapiens
  Payload ID: 17568
  Gene Symbol: TEX35
  Gene Name: testis expressed 35
  Uniprot ID: Q5T0J7
  ENST ID: ENST00000367643
  CDS Start-End: 78-716
ctgtaagttgcctaggacagtggcctggtcccaggggctgttgtggggagttgaagaacaccctggcctcctccatcatgtcggccaagagggcagaattgaagaaaacacatctgagcaagaactacaaggcagtttgcctggaattgaagccagagccgaccaaaacatttgattacaaagcagttaaacaagaagggcggtttaccaaagcaggagtgacacaggacctaaagaatgaactcagggaagtgagagaagagctcaaggagaaaatggaggagataaaacagataaaggatctaatggacaaggattttgataaacttcacgaatttgtggaaattatgaaggaaatgcagaaagatatggatgagaagatggacattttaataaatacacagaagaactataagcttccccttagaagagcaccaaaggagcagcaggaactcaggctgatgggaaagactcacagagaaccacagctcaggcccaagaaaatggatggagccagtggagtcaatggagcaccctgtgctcttcacaagaagacgatggcaccacaaaaaacaaaacagggctcactggatccccttcatcactgtgggacctgctgcgagaaatgtttgttgtgtgctctaaagaacaactacaatcgggcgcagctgcagaacctaccagcagttccgattcatcacctccaagctccttaagatgcacagtcagggcttcttgtcctgttaaataccaccccaaccccaggcctccactggagattaaaaaccttcattcaaagcca

SEQ ID NO: 190233 - DNA, 344 bp, Homo sapiens
  Payload ID: 17568
  Gene Symbol: TEX35
  Gene Name: testis expressed 35
  ENST ID: ENST00000442872
  CDS Start-End: 1-153
aaaacagggctcactggatccccttcatcactgtgggacctgctgcgagaaatgtttgttgtgtgctctaaagaacaactacaatcgggtgggaaatattcacaccaggtctgggcacccttttcacccttggcttctggagctgccttctgatttatctgtacctcaaccccggtgacatcgaatatgtgtttccaacctagcgcagctgcagaacctaccagcagttccgattcatcacctccaagctccttaagatgcacagtcagggcttcttgtcctgttaaataccaccccaaccccaggcctccactggagattaaaaaccttcattcaaagccaaa

SEQ ID NO: 190234 - DNA, 1832 bp, Homo sapiens
  Payload ID: 17568
  Gene Symbol: TEX35
  Gene Name: testis expressed 35
  ENST ID: ENST00000419909
  CDS Start-End: 57-323
ggcctggtcccaggggctgttgtggggagttgaagaacaccctggcctcctccatcatgtcggccaagagggcagaattgaagaaaacacatctgagcaagaactacaaggcagtttgcctggaattgaagccagagccgaccaaaacatttgattacaaagcagttaaacaagaagggcggtttaccaaagcaggagtgacacaggacctaaagaatgaactcagggaagtgagagaagagctcaaggagaaaatggaggagataaaacagccatgcctttcttccttgttagataaaggatctaatggacaaggattttgataaacttcacgaatttgtggaaattatgaaggaaatgcagaaagatatggatgagaagatggacattttaataaatacacagaagaactataagcttccccttagaagagcaccaaaggagcagcaggaactcaggctgatgggaaagactcacagagaaccacagctcaggcccaagaaaatggatggagccagtggagtcaatggagcaccctgtgctcttcacaagaagacgatggcaccacaaaaaacaaaacagggctcactggatccccttcatcactgtgggacctgctgcgagaaatgtttgttgtgtgctctaaagaacaactacaatcgggctgctcccctaaaggaagctcgtcacctcctgacagccaattctattgacccttctgcagctcttgttcttctgattgagttcctgcttttgaccctggtaacaggtgcggcagccccaggccttgacgcatgtggtcatcagagaaacatgagggatgaaataaactcagagagaaggtaatgagcataatctgtctgaggtcacaggatacgtggcagagctgaaattcgaatcctagcattctgacttcagaacctgtttcctggacactctggcttctctcgatgtggtccccggcccggcagcatcagcactgtctgggagcttgtgggaggtgcagcatctcaggctctaccccagacctactgaatcagaatctgcattttcacaatacttcctggggtcagagaaaaggaataggggaaggacagtgtggagaagagagagaaaggaagggagacaagtaggagcgagaggactggagagaaaaagaagctgggtttcaatcccatcatgaggcggagatctcaccacgttgccttggccggtctccaaccccttgtgagctcaagtgatcctcccacctcggcctcccaaagtgctgtgattataggtgtgagcccttacacccagcctgtttgcatcttttaatgagtacccaaattaacctctaattgggacttgattttctacaagtgctgctccaagaggcttctacacccccgcagggaggcaagcaccgttttgaggtggccgggctggcgaggagattgggggcaggagctgctttttcaatgagaagaatgaacagacctagtgggcgttgcctttagacccaggatgtaaaaggtaatgccagcagacgttggcagtgctggagacacctggtgggcagaggttacctggctggagtggcaggtgtgaggagatgcctcccagcataaggaatgtgggcttctgttggatctcttgttccaggcctcacacatgttcaaggcagcctgggtatgtcttggcccattcaatccctcaaagccctgtttaattctcatcttgctgtcacctatgtggtgccaagaaacaagtcaccaaaataatgaaatgcctacctaagcttaaaaacaaaaccatgaggtctttctaaataaattatgaaaaagtgcaaa

SEQ ID NO: 190235 - DNA, 922 bp, Homo sapiens
  Payload ID: 17569
  Gene Symbol: TEX36
  Gene Name: testis expressed 36
  Uniprot ID: Q5VZQ5
  ENST ID: ENST00000368821
  CDS Start-End: 156-716
ggaagaggctgagaagtaaagatcaggaacaaggaggaggaggagcttcccagacgtgtagagcttatgaagtttaggaagcagcttcccagacatgtagagcttatggagaggtgagggagccaatctcagccacattcagcttcctggagagaatgaccaaagggcgacgcttcaacccaccttcagacaaggatgggagatggttccctcacatcgggctaacgcaaaagacaccagaatccatcaccagtgctacgtcaaaagagccccagagtccacacttgcctcggcaagcggaggggaagctgccgcccatatacaaagtccgggagaagcaagcagtgaataaccagttccccttctccgtgcatgacaatcggcacagcttggagaactctggatgctaccttgactccggcctgggacgtaagaagatctctccagataagaggcaacatgtttcaagaaattttaatctctgggcatgtgactatgttccatcttgtcttgatggcttttcaaataaccaaatatcatacgtatataaagaagccatggtggtctcaagcttcagacgctttccacgatgctataaagagatatggaacgcttttacatttcttcctgagagaagctatacagaggttttgaaaaagaagcccaaagtaaggttcactgttgacaaaaaggttgtttcttcactggagtcctaatcctcccagaagatttttgatgaattttgtaatactggtatttcatcagacatcctaaaagtatatgttttctgatccagcaccactatttaatttttaaagtacttttatgatttttataaggtcaaaaaacattcaaatccttgtgaaatgaatttgtgatgacatacgcatgtgtaaataaacttttcagatggccacattta

SEQ ID NO: 190236 - DNA, 734 bp, Homo sapiens
  Payload ID: 17569
  Gene Symbol: TEX36
  Gene Name: testis expressed 36
  ENST ID: ENST00000532135
  CDS Start-End: 118-507
ggaggagcttcccagacgtgtagagcttatgaagtttaggaagcagcttcccagacatgtagagcttatggagaggtgagggagccaatctcagccacattcagcttcctggagagaatgaccaaagggcgacgcttcaacccaccttcagacaaggatgggagatggttccctcacatcgggctaacgcaaaagacaccagaatccatcaccagtgctacgtcaaaagagccccagagtccacacttgcctcggcaagcggaggggaagctgccgcccatatacaaagtccgggagaagcaagcagtgaataaccagttccccttctccgtgcatgacaatcggcacagcttggagaactctggatgctaccttgactccgaaagaatgacagcaacggacccacagggagaaccagacaagagacaagagttctatgagccggtgaggacccagtccattcctcatccaggcctgagaactaatgcacccctccttgcagtgtgagctctttgggagcaagtttctgtcacccattccccagagtcctgactaatagaatgtgtattagttgggaagaaaaggaccttttgtcttagcctagctagttagtaaccaccaggatttattcagcattcttggaaaaataaatttccagctatggagaaatcctcttattctgcttgcctgtgtgggcgcaggtattaatagggctatctccctggcaggaagaa

SEQ ID NO: 190237 - DNA, 438 bp, Homo sapiens
  Payload ID: 17569
  Gene Symbol: TEX36
  Gene Name: testis expressed 36
  ENST ID: ENST00000526819
  CDS Start-End: 142-438
agtaaagatcaggaacaaggaggaggaggagcttcccagacgtgtagagcttatgaagtttaggaagcagcttcccagacatgtagagcttatggagaggtgagggagccaatctcagccacattcagcttcctggagagaatgaccaaagggcgacgcttcaacccaccttcagacaaggatgggagatggttccctcacatcgggctaacgcaaaagacaccagaatccatcaccagtgctacgtcaaaagagccccagagtccacacttgcctcggcaagcggaggggaagctgccgcccatatacaaagtccgggagaagcaagcagtgaataaccagttccccttctccgtgcatgacaatcggcacagcttggagaactctggatgctaccttgactcctttgcagatggcctatcgtgggacttctctttg

SEQ ID NO: 190238 - DNA, 795 bp, Homo sapiens
  Payload ID: 17570
  Gene Symbol: TEX37
  Gene Name: testis expressed 37
  Uniprot ID: Q96LM6
  ENST ID: ENST00000303254
  CDS Start-End: 143-685
agcaacaggactctccatgtggcaagggcacctggaggtgggagggcaggagcgtcgtcttgccctggcagaagaagcggtaggctctgtctgcgtggcagctggtccccagccctaggagagaagctgtctgtcgtttgccatggcaggtgtgaaatacccgggacaggaccctgtggatttagacatataccaaagctcccacatggtcgactatcagccctacaggaagcacaaatactccagggtcacgccgcaagagcaggcaaagctcgatgctcaactccgggacaaagagttttacaggcccatccctaaccccaaccccaagctaacagatgggtaccctgctttcaaaagaccccacatgactgccaaagacctgggactccccggcttcttcccatcacaggaacatgaggccacgagggaggacgagcgcaagttcaccagcacctgccatttcacatatccagcttcccacgatctgcacctggcccagggtgaccccaaccaggtcctccagagtgctgactttccgtgcctcgtggatcccaaacaccagcctgctgcagagatggccaaaggctacctgctactgccagggtgtccctgtcttcattgccatatagtcaaggtccccatcttgaaccggtggggacccttgatgccattttaccagtaggaaggatgaaaataccttccaaaggctcttccaagggcatgtggaaatcctatgaccttggagtgcagagaggagaactgaaaataaaactggaaagatgttccaactgc

SEQ ID NO: 190239 - DNA, 866 bp, Homo sapiens
  Payload ID: 17571
  Gene Symbol: TEX38
  Gene Name: testis expressed 38
  Uniprot ID: Q6PEX7
  ENST ID: ENST00000334122
  CDS Start-End: 108-728
attctggagactctgattggctgggcagatgggctgactggctgggcagatgggtgggtgagttccctctccccagagccatcggccaggtaccaaagctcagctgtatggattcccaacaggaggacctgcgcttccctgggatgtgggtctcattgtactttggaatcctggggctgtgttctgtgataactggagggtgcattatctttctgcactggaggaagaacttgaggcgggaagagcatgcccagcagtgggtggaggtgatgagagctgccacattcacctacagcccattgttgtactggattaacaagcgacggcgctacggcatgaatgcagccatcaacacgggccctgcccctgctgtcaccaagactgagactgaggtccagaatccagatgttctgtgggatttggacatccccgaaggcaggagccatgctgaccaagacagcaaccccaaggcggaagcccctgctcccctgcaacctgcactgcagctggctccacagcagccccaggccagatccccattcccacttcccatctttcaggaggtgccctttgccccacccttgtgcaacctaccccccctgctgaaccactctgtctcctatcctttggccacctgtcctgaaaggaatgttctcttccattccctcctgaatctggcccaggaagaccatagcttcaatgccaagccttttccttcagaactgtagcctcctctcactgaaggtgggagctgcaggaatcaggtgcagagtaggaaatggaactaacctcaggaaggtggtattgacagaggtcaggacccacctggatgtcatgctatgaaacattaaaagaaaaaaaaaaaa

SEQ ID NO: 190240 - DNA, 637 bp, Homo sapiens
  Payload ID: 17571
  Gene Symbol: TEX38
  Gene Name: testis expressed 38
  ENST ID: ENST00000564373
  CDS Start-End: 141-599
tgggtgggtgagttccctctccccagagccatcggccaggtaccaaagctcagctgtatggattcccaacaggaggacctgcgcttccctgggagaagaacttgaggcgggaagagcatgcccagcagtgggtggaggtgatgagagctgccacattcacctacagcccattgttgtactggattaacaagcgacggcgctacggcatgaatgcagccatcaacacgggccctgcccctgctgtcaccaagactgagactgaggtccagaatccagatgttctgtgggatttggacatccccgaaggcaggagccatgctgaccaagacagcaaccccaaggcggaagcccctgctcccctgcaacctgcactgcagctggctccacagcagccccaggccagatccccattcccacttcccatctttcaggaggtgccctttgccccacccttgtgcaacctaccccccctgctgaaccactctgtctcctatcctttggccacctgtcctgaaaggaatgttctcttccattccctcctgaatctggcccaggaagaccatagcttcaatgccaagccttttccttcagaactgtagcctcctctcactgaaggtgggagctgcaggaatcaggt

SEQ ID NO: 190241 - DNA, 566 bp, Homo sapiens
  Payload ID: 17571
  Gene Symbol: TEX38
  Gene Name: testis expressed 38
  ENST ID: ENST00000415500
  CDS Start-End: 154-546
ggctgactggctgggcagatgggtgggtgagttccctctccccagagccatcggccaggtaccaaagctcagctgtatggattcccaacaggaggacctgcgcttccctgggacccattgttgtactggattaacaagcgacggcgctacggcatgaatgcagccatcaacacgggccctgcccctgctgtcaccaagactgagactgaggtccagaatccagatgttctgtgggatttggacatccccgaaggcaggagccatgctgaccaagacagcaaccccaaggcggaagcccctgctcccctgcaacctgcactgcagctggctccacagcagccccaggccagatccccattcccacttcccatctttcaggaggtgccctttgccccacccttgtgcaacctaccccccctgctgaaccactctgtctcctatcctttggccacctgtcctgaaaggaatgttctcttccattccctcctgaatctggcccaggaagaccatagcttcaatgccaagccttttccttcagaactgtagcctcctctcactgaaggtgg

SEQ ID NO: 190242 - DNA, 1003 bp, Homo sapiens
  Payload ID: 17571
  Gene Symbol: TEX38
  Gene Name: testis expressed 38
  ENST ID: ENST00000564071
  CDS Start-End: 585-1003
cgagagtaattatgtgacttgttcaagttctacccgacagctgagctcttttcaagatggcagctgcctcccaagcctccttttcctctgcttcctgacatcctccttgaactccagccacagtgacctattctctcccaaagaaacaccaggattactccttgaagagtccttattcaggccctttttgacccctggaatcctctctccttccattctctcaacccaaatgccacaatcttccttaccgtctgaaccaggtgtgagctcctagggtcagggacagtgacattaacatctctgtgtcccacctgctcacagaacagggccagtcctggagtgggctctctgggacagtactcatcatcaggtccttcttgtctgggttttgtctgattgaagcccctcctgggacaggggcagagccttcaactctgctcaatccaacctatgctcatggagatcagccctgagccctgccctgtgcgaggaacagtgtaatggaagatgaataagtccttcaagtatgccagcccatacctggctcacactcctaacacttgctgttttctctgtggatctgcatgtggctgcctcctcatcatctaagggctcagttcacattgtgggtctcattgtactttggaatcctggggctgtgttctgtgataactggagggtgcattatctttctgcactggaggaagaacttgaggcgggaagagcatgcccagcagtgggtggaggtgatgagagctgccacattcacctacagcccattgttgtactggattaacaagcgacggcgctacggcatgaatgcagccatcaacacgggccctgcccctgctgtcaccaagactgagactgaggtccagaatccagatgttctgtgggatttggacatccccgaaggcaggagccatgctgaccaagacagcaaccccaaggcggaagcccctgctcccctgcaacctgcactgcagctggctccacagcagcc

SEQ ID NO: 190243 - DNA, 917 bp, Homo sapiens
  Payload ID: 17572
  Gene Symbol: TEX40
  Gene Name: testis expressed 40
  ENST ID: ENST00000539943
  CDS Start-End: 317-793
taggccccttaccctgtccgctccaacccacccttggtccgactcgggcccctggcgctatttcttactcagccttggctgcccgcagcccccacccaaccccacgttctacgggatccccaacccggcccggctcagttccccagcccgctcttccttcccgctccagccatccgcgacccttggctccctccttgtatgtggcccacaggtgtcgctcaagtcttccgaccgccaaggctcggacgaggagagcgtgcatagcgacactcgggacctgtggaccacgaccacgctgtcccaggcacagctgaacatgccgctgtccgaggtctgcgagggcttcgacgaggagggccgcaacattagcaagacccgcgggtggcacagcccggggcggggctcgttggacgaggggtacaaggccagccacaagccggaggaactggacgagcacgcgctggtggagctggagttgcaccgcggcagctccatggaaatcaatctgggggagaaggacactgcatcccagatcgaggccgaaaagtcttcctcaatgtcatcactcaatattgcgaagcacatgccccatcgagcctactgggcagagcagcagagcaggctgccactgcccctgatggaactcatggagaatgaagctctggaaatcctcaccaaagccctccggagctaccagttagggatcggcagggaccacttcctgactaaggagctgcagcgatacatcgaagggctcaagaagcgccggagcaagaggctgtacgtgaattaaaaacgccaccttgggctcgagcagcgacccgaaccagccccgtgccagcccggtccccagacccaagcctgaccccatccgagtggaatttgagtcctaaagaaataaaagagtcgatgcatgg

SEQ ID NO: 190244 - DNA, 464 bp, Homo sapiens
  Payload ID: 17573
  Gene Symbol: TEX43
  Gene Name: testis expressed 43
  Uniprot ID: Q6ZNM6
  ENST ID: ENST00000357147
  CDS Start-End: 14-418
attgctgtcaggaatggcttcagggaaagatacttgtcctactttgcctaaactcactaacaactgctctgatgagagtctctataaatctgctaataagtatgaagagattcatttgccacgattttcattaaagcaagggatgatcccaagacgttatgtcatgccttggaaagaaaacatgatattcaggaatgtgaatctgaagcaagcagaagtgtgtgggatccatactggccctttagaagactctctgtttttgaatcacagtgaaaggctttgccatggggaagatcgtaaagttgtcttccaaaaaggcccaccagaaataaaaattgcagatatgcctttgcattcgcctctctccagataccaaagcactgtgatttcccatggcttcaggaggcgactagtctaatgaaagaagaataaaataataaagtgtttcaatctctgctctctta

SEQ ID NO: 190245 - DNA, 1433 bp, Homo sapiens
  Payload ID: 17574
  Gene Symbol: TEX9
  Gene Name: testis expressed 9
  Uniprot ID: Q8N6V9
  ENST ID: ENST00000352903
  CDS Start-End: 25-1200
gtaaccgcgtcgcagtcgccgaagatggcggggcgaagtctgtgtctcacgagaagcagcgttccagggactccgttcccgccacccgttcagcaaccctctacacctggacccgacctcctcgccttggaggaagaatataagcgtttaaatgcagaattgcaggcaaaaacagctgacgtggttcaacaagctaaggaaataataagagatcggcaagaagtacgatctaggcctgtttcaacacaaatgaaatcatgtgatgacgaagatgattacagtttaagaggtctgttaccatctgaagggatagttcatcttcattcagaaactaagccaaagaccaaaaacattgatcctgtaaacaaggttcaaaacaaattacactctgcaaataaaggaaggaaaacaaattcaagtgttaaattgaaatactctgatgtccaaactgccgacgatgttgccattccagaggatttctcagacttttcccttgcaaaaacaattagcaaaattgaagggcaactggaggaagaaggcttacctgaatatatagatgatattttttctggtgttagtaatgacattggaacagaagcacagatcagatttctaaaggccaaactccatgttatgcaggaggaattggataatgttgtatgtgaatgcaataaaaaggaggatgaaattcagaatttaaagtctcaagtaaaaaattttgaagaagattttatgagacagcagcgaacaattaatatgcaacagtctcaagtagaaaaatacaaaactcttttcgaagaagcaaacaaaaagtatgatggattacagcaacagttgtcttcagtagaaagggaattagaaaataaaagaagactgcaaaaacaggctgcaagtagtcaaagtgccacagaggttcgcttgaatagagctctagaagaagcagaaaagtataaactggagttaagtaaattaaggcaaaataacaaggacatagcaaatgaagaacacaaaaaaattgaagtgttaaaatcagaaaacaagaagctagaaaaacaaaaaggagaattaatgatagggttcaagaaacagttaaaattaattgatgttttaaaaaggcaaaagatgcatattgaagctgccaagatgctatctttcactgaggaggaatttatgaaagcacttgaatggggaaattcataagtgatctacttcagttagtctctatgacaataagaaaactaaggctcagagaaaaagccaaaactagtacttgcatgacacctagtcaagtcctagtagtattcgactttcattttgtggatcaatttttatttggaaaatagcagcaattctcgtaggagtcagattaaaacgtctacaactaccttgaataacttcaactatcaggataattaaaactgcaaaccactgga

SEQ ID NO: 190246 - DNA, 1768 bp, Homo sapiens
  Payload ID: 17574
  Gene Symbol: TEX9
  Gene Name: testis expressed 9
  Uniprot ID: Q8N6V9
  ENST ID: ENST00000537232
  CDS Start-End: 462-1412
gcagtcgccgaagatggcggggcgaagtctgtgtctcacgagaagcagcgttccagggactccgttcccgccacccgttcagcaaccctctacacctggacccgacctcctcgccttggaggaagaatataagtaagaaattcggcggttgaacttttccttctttctttcatctgaatgaggctgcttacaagtacttttttctggagactggctggatcttcgggaccactcactctgcagcattcccttctcgtcatctcgttcacctgccgtttatcctttctttgtctttgatctgagtagttcgcctgcgtattagaagatatttgaagtgggcgaaaatttagcccaagcgtttaaatgcagaattgcaggcaaaaacagctgacgtggttcaacaagctaaggaaataataagagatcggcaagaagtacgatctaggcctgtttcaacacaaatgaaatcatgtgatgacgaagatgattacagtttaagaggtctgttaccatctgaagggatagttcatcttcattcagaaactaagccaaagaccaaaaacattgatcctgtaaacaaggttcaaaacaaattacactctgcaaataaaggaaggaaaacaaattcaagtgttaaattgaaatactctgatgtccaaactgccgacgatgttgccattccagaggatttctcagacttttcccttgcaaaaacaattagcaaaattgaagggcaactggaggaagaaggcttacctgaatatatagatgatattttttctggtgttagtaatgacattggaacagaagcacagatcagatttctaaaggccaaactccatgttatgcaggaggaattggataatgttgtatgtgaatgcaataaaaaggaggatgaaattcagaatttaaagtctcaagtaaaaaattttgaagaagattttatgagacagcagcgaacaattaatatgcaacagtctcaagtagaaaaatacaaaactcttttcgaagaagcaaacaaaaagtatgatggattacagcaacagttgtcttcagtagaaagggaattagaaaataaaagaagactgcaaaaacaggctgcaagtagtcaaagtgccacagaggttcgcttgaatagagctctagaagaagcagaaaagtataaactggagttaagtaaattaaggcaaaataacaaggacatagcaaatgaagaacacaaaaaaattgaagtgttaaaatcagaaaacaagaagctagaaaaacaaaaaggagaattaatgatagggttcaagaaacagttaaaattaattgatgttttaaaaaggcaaaagatgcatattgaagctgccaagatgctatctttcactgaggaggaatttatgaaagcacttgaatggggaaattcataagtgatctacttcagttagtctctatgacaataagaaaactaaggctcagagaaaaagccaaaactagtacttgcatgacacctagtcaagtcctagtagtattcgactttcattttgtggatcaatttttatttggaaaatagcagcaattctcgtaggagtcagattaaaacgtctacaactaccttgaataacttcaactatcaggataattaaaactgcaaaccactggacaaacaggacattgtttgtgctactttctttttcaaaggacagcgctatatggcttagcaaatgaagtctctccaccttttcttatcacctgccacacctaaaggtattcctgttaacagcat

SEQ ID NO: 190247 - DNA, 689 bp, Homo sapiens
  Payload ID: 17574
  Gene Symbol: TEX9
  Gene Name: testis expressed 9
  ENST ID: ENST00000560827
  CDS Start-End: 377-689
ggccagggaagcgcgccgctgggggccgggaggagtccggcccggctggtggagagcaggaaaacgtgggggaggtgctggcgagagaaagagaacttgcgtgaggaggaggaggagaaaccaaatttaataatatttggcgtggaaatgggatttgggcgggggaggcatcttcaaagcaagtaaagagaaatcaacattatcccccttcccctgcacatgcatgtgaggattacttcctccctgagtaaatgaagagaactgaagcaggcgtttaaatgcagaattgcaggcaaaaacagctgacgtggttcaacaagctaaggaaataataagagatcggcaagaagtacgatctaggcctgtttcaacacaaatgaaatcatgtgatgacgaagatgattacagtttaagaggtctgttaccatctgaagggatagttcatcttcattcagaaactaagccaaagaccaaaaacattgatcctgtaaacaaggttcaaaacaaattacactctgcaaataaaggaaggaaaacaaattcaagtgttaaattgaaatactctgatgtccaaactgccgacgatgttgccattccagaggatttctcagacttttcccttgcaaaaacaattagcaaaattgaagggcaactggaggaagaaggcttacctgaatatatagatgata

SEQ ID NO: 190248 - DNA, 4440 bp, Homo sapiens
  Payload ID: 17574
  Gene Symbol: TEX9
  Gene Name: testis expressed 9
  ENST ID: ENST00000558083
  CDS Start-End: 331-957
gaagatggcggggcgaagtctgtgtctcacggtcagttcaactccaggctcctggggagcgtctgggttccggcgactaggacgcctaacttcctttaacttcgggtctgaaagtctgtggctcttttacagagaagcagcgttccagggactccgttcccgccacccgttcagcaaccctctacacctggacccgacctcctcgccttggaggaagaatataagcgtttaaatgcagaattgcaggcaaaaacagctgacgtggttcaacaagctaaggaaataataagagatcggcaagaagtacgatctaggcctgtttcaacacaaatgaaatcatgtgatgacgaagatgattacagtttaagaggtctgttaccatctgaagggatagttcatcttcattcagaaactaagccaaagaccaaaaacattgatcctgtaaacaaggttcaaaacaaattacactctgcaaataaaggaaggaaaacaaattcaagtgttaaattgaaatactctgatgtccaaactgccgacgatgttgccattccagaggatttctcagacttttcccttgcaaaaacaattagcaaaattgaagggcaactggaggaagaaggcttacctgaatatatagatgatattttttctggtgttagtaatgacattggaacagaagcacagatcagatttctaaaggccaaactccatgttatgcaggaggaattggataatgttgtatgtgaatgcaataaaaaggaggatgaaattcagaatttaaagtctcaagtaaaaaattttgaagaagattttatgagacagcagcgaacaattaatatgcaacagtctcaagtagaaaaatacaaaactcttttcgaagaagcaaacaaaaagtatgatggattacagcaacagttgtcttcagtagaaagggtaattatttggtatttttcctaacttaatgccacagatacaagaaaattattaaggttacacatttgtatagatgccattttgacagttcagttattttattagtatttactgaaaactctttccccttacatagaatatttttaacaactttattgagatgtaattcacccttttaaagtatgcaattcaatggcttttggtgtattcatagaattgtgcaactatcaccacaaccattttcataatccctaaaagatacttcataccctttagccaccacaccctgaccctgctcccctcaatcccttacagccctaggcaaccactattctattttatgtctcaataaatttgtctattctggaaatcacatatacgtggaatcatataatatgtggtcttttgtgactgacttttacttaagatattttcaaggttcattcatgttgcagcccctatcagtattttatttctttttattggcaagtaacattctgttatatggatataacacatttaatttatctgtttatcagttcgtagctttaggttatttgggttgtttctactgtctgacaattttaaatactttgaatattcatgtacaagtttttgtgtgcacgtatgtttctatttctcttggttatatagccaggaatggaattgctgggtcatatggaaatcctatgttgaccttttgaggaattgctgactgttttccaacctgcctgtaccattttacattcctaccagtagtgcatgaagctcctaatttctacacatcctcaccaacatctgctagattatctttttgattatagccatactgcaagtgtaaaagggttacctcattgtggttttgatttgcatttccctaataactaatgatgttgaacatcttttcatgtgcttattggcatttgtatattttctttggagaaatgtctgttaaggtctttgcccattttttaaattggatttgaaaaaattactgaataataagaacttttaagttctttatgtgtttagatacaagtcccttatcaggtatattttgcaaatagttttcccctacagtgggttgtctttcactttctttatggtactctaaaggcacaaaagttttaaattttgatgaagtccagtttatctaatatttatttggtttcctgtgcttttggtgtcatatttaaggggagaatgtattttaaataaactatcctagcttatattagtgtgccattgtgaaaataaaaatatactgtttgagattgctttgtaaaatgtagtgacgataagaattatgtaatatagcatatcccgagatttagtaagaaaatgtgccccctttattagtacccttacatttctcgtttgtatggtcatatttaaaaaccctgctttttaaacattttggtcttgtataattagctttatcttgtaataaattttaatatcaaaatcacttagacaaaatttatatgcagtaaattcacactttttagtgtacaattctatgagttttgacaaatgtatgcagtaatataactatcactataattgagacatagaacagttccatcagccccccaaaattccctgtgaatttagtgaaggccttccctaattccaccaccaggcaaccactgatctgtgtttggttcttaaattttggacttttcccaaatgtcacataaatagaatcgcattggatatagacttttgaatctgttttttttttttttttttcagttagcataaaacatttgatatggtttggctgtgtccccacccaaatttcatcttgaattcccacttgttgcgggagggagccggtgggaggtaattgaatcatgggggcaagtctttcctgtgctgttcttgtgatggcgaaaaagtctcaggagatctgatggttttaaaagggagagtttcccagtgcaaactttcttgtctgctgctatgtgagacatgccttttactttccaacatgattgtgaggcctccccagccatgtggaactgtgagtccaataaacctctctcttttgtaaattgcccagtcttgggtgtgtcttaccagcagcatgacgatgaactaatccagtaaattggtactagtagagtcaggcgctactgaaaagataccaaaaagtgttgaagtgaccttggaactgggtaagaggcagaggttggaaaagtttggagggctcagaaaaatacaggaaaatatgggaaagtttggaactccctagagacttgttgaatggctttgaccaatatactgataatgatatggacaatgaaatccaggctgaggtgatctcagatggagatgaggaacttgttaggaactagagcaaatgtgactcttgttatgttttagcaaagagactggtggcattttgtccctcccctagagatctgtggaactttgaacttgagagagatgatttagggtatctggtggaacaaatttctaagcagcaaagcactcaagaggtgacttggtgctgttaaaggcatccagttttgaaagggaaacagagcacaaaaggttggaaaatttgcagcctgagaatgcagtggaaaagaaaatcccattttctgaggagaaattcaagccggctgcagaaatttgcataagtcttgaggagctgaatgttaatccccaggacaatggggaaaatgtctcccaaggtatgcagaggtcttcacggcagcgcctcccatcacaggcccagagacctaggaggcatgattggttttgaaatgtgaggacatgagatttgggagggtcttggggtagaatatggtttggctgtgtccccacccaaatttcatcttgaattcccatgtgttgtgggagggacccagtgggaggtcattgaatcacaggggcaggtctttcctgtgctgttctcatgagagtgaataagtctcaggagatttgatggttttaaaaatgggaatttccctgcacaagctctcgtctgccaccatgtgagatgtgcctttaccttccagcatgattgtgaggcctccccagccatgtgaaactgtgagtgcagtaaatctctttcttttgtaaattgcccagtcttgggtatgtctttatcagcagcatgaaaacggactaatacaacattcaatatttatccctattatagtccattcctttttattgctgagtagtgtaaactatgaatgaatgtacttcagtttgtttccccactcatctagtaataaaagttaattatagtatttaatagtctgaacttgtgtttccagtatggtagccacttaccatatgtggctaaattgcgatgtgctataactataaagtaaaaatcagattttgaagaattcatgtaaaacagaatgaagaatgtaaaatatctcaaaatctctttaatattttttgtattggttatatgttgaaataatatttgaatatattaggttaagtgaaatatgttattaaaattaattttacctgtttgtt

SEQ ID NO: 190249 - DNA, 687 bp, Homo sapiens
  Payload ID: 17574
  Gene Symbol: TEX9
  Gene Name: testis expressed 9
  ENST ID: ENST00000558127
  CDS Start-End: 5-244
gaagatggcggggcgaagtctgtgtctcacggtcagttcaactccaggctcctggggagcgtctgggttccggcgactaggacgcctaacttcctttaacttcgggtctgaaagtctgtggctcttttacagagaagcagcgttccagggactccgttcccgccacccgttcagcaaccctctacacctggacccgacctcctcgccttggaggaagaatataagtaagaaattcggcggttgaacttttccttctttctttcatctgaatgaggctgcttacaagtacttttttctggagactggctggatcttcgggaccactcactctgcagcattcccttctcgtcatctcgttcacctgccgtttatcctttctttgtctttgatctgagtagttcgcctgcgtattagaagatatttgaagtgggcgaaaatttagcccaagcgtttaaatgcagaattgcaggcaaaaacagctgacgtggttcaacaagctaaggaaataatatgttaaattgaaatactctgatgtccaaactgccgacgatgttgccattccagaggatttctcagacttttcccttgcaaaaacaattagcaaaattgaagggcaactggaggaagaaggcttacctgaatatatagatgatattttttctggtgttagtaatgacattggaacag

SEQ ID NO: 190250 - DNA, 2005 bp, Homo sapiens
  Payload ID: 17574
  Gene Symbol: TEX9
  Gene Name: testis expressed 9
  ENST ID: ENST00000560582
  CDS Start-End: 19-327
cagcagcgaacaattaatatgcaacagtctcaagtagaaaaatacaaaactcttttcgaagaagcaaacaaaaagtatgatggattacagcaacagttgtcttcagtagaaagggaattagaaaataaaagaagactgcaaaaacaggctgcaagtagtcaaagtgccacagaggttcgcttgaatagagctctagaagaagcagaaaagtataaactggagttaagtaaattaaggcaaaataacaagatgcatattgaagctgccaagatgctatctttcactgaggaggaatttatgaaagcacttgaatggggaaattcataagtgatctacttcagttagtctctatgacagtatgtgatggatacccattttacttattgtagtggtttgaattatttttattcttcataagtaatatatttgattatgaaagcaaaataatttcaaagaattccctttttagatttaggagattagctattagctctttttgagttgttttttaagttcttagcgtgacaattaagcacatcagataataaaattcttgactcttttcatttataattctcctcccttacagtagaccaaaaaagatgctttaaaagaaaattccaaatatttatttccctggctaaatcaagtaagtaaagttcgtaaacacagacagaaggcagttcactttggggtagagttctgtattagtcaaggtaaatatactgtcttgaggatggggatgcaaacagtgctctgtagtgttgtagaaatcggattttgaaattatcagtacaaaaataacagcttgattaaaattaatttgtatctgataattgtttacaagttatgaaattcagtgatgatttacaaaatccaaacagacaatggatacctaatgccactgaactgtaaaacaaaagttatgctgacatctagtggtaacatgcaaaaaatctatgctttacccaattttgatgatatcatttctcttcacaaatttcactcctttgttgatatactttcctgaactcttcaccaagcagatcaatatcatcctcttttttaaatactccctacgagaaaaatactttgtgggttacttttgaataccagaatatttcactaaatgcttttaagactgacagacataagattagtaaagttatctccaaggtaatgaaatctattcaacagattaatgaaactttaaaaaaatcaatacttttcaaaaaataagactttacatatatattgaatattcctagactgacccaattttctgatttatcagctctagtgtaggagcttttcataggaatctgagctcttctacaagttctactgcttggattacctagataggaaggcacttcatctatactgtaccctacccttttctttaaatagctctataatatgatataatggtgagcttcagtagattcatgcatgggattagttcttcatgcctcagttctatggctaatcagcaaacagtcaatcttgcagaaaagaatccaggtttggagttaagccatttaagcaaaccctttggaattcttcactgttctatttttcttttcccctacagtatactgcaaaaggctctttaaaacaaaattaaatatttacttaaattgcaatctaaagaataaagaattttagggataactgaagtcatttggcaccattaggacctaaaggataaaggtcatttttggatatcaagtttattaatccctcctgctgcctccacaattatttcctctacaaaaatatcaaatcccaaagaaagacattcctacaatttataatttagtttatgaaatgtattaattacatatggattttatcattaatacatcattttgtattccttaatcctttctaaccaattagactatcaagtcctgtggccaggcagtaattacctatatatctttttccttccttagcaccagagtgaatataataaaataaatatgcacttgattctactgaa

SEQ ID NO: 190251 - DNA, 2297 bp, Homo sapiens
  Payload ID: 17574
  Gene Symbol: TEX9
  Gene Name: testis expressed 9
  ENST ID: ENST00000561221
  CDS Start-End: 6-857
cgaagatggcggggcgaagtctgtgtctcacgagaagcagcgttccagggactccgttcccgccacccgttcagcaaccctctacacctggacccgacctcctcgccttggaggaagaatataagcgtttaaatgcagaattgcaggcaaaaacagctgacgtggttcaacaagctaaggaaataataagagatcggcaagaagtacgatctaggcctgtttcaacacaaatgaaatcatgtgatgacgaagatgattacagtttaagaggtctgttaccatctgaagggatagttcatcttcattcagaaactaagccaaagaccaaaaacattgatcctgtaaacaaggttcaaaacaaattacactctgcaaataaaggaaggaaaacaaattcaagtgttaaattgaaatactctgatgtccaaactgccgacgatgttgccattccagaggatttctcagacttttcccttgcaaaaacaattagcaaaattgaagggcaactggaggaagaaggcttacctgaatatatagatgatattttttctggtgttagtaatgacattggaacagaagcacagatcagatttctaaaggccaaactccatgttatgcaggaggaattggataatgttgtatgtgaatgcaataaaaaggaggatgaaattcagaatttaaagtctcaagtaaaaaattttgaagaagattttatgagacagcagcgaacaattaatatgcaacagtctcaagtagaaaaatacaaaactcttttcgaagaagcaaacaaaaagtatgatggattacagcaacagttgtcttcagtagaaagggtaattatttggtatttttcctaacttaatgccacagatacaagaaaattattaaggttacacatttgtatagatgccattttgacagttcagttattttattagtatttactgaaaactctttccccttacatagaatatttttaacaactttattgagatgtaattcacccttttaaagtatgcaattcaatggcttttggtgtattcatagaattgtgcaactatcaccacaaccattttcataatccctaaaagatacttcataccctttagccaccacaccctgaccctgctcccctcaatcccttacagccctaggcaaccactattctattttatgtctcaataaatttgtctattctggaaatcacatatacgtggaatcatataatatgtggtcttttgtgactgacttttacttaagatattttcaaggttcattcatgttgcagcccctatcagtattttatttctttttattggcaagtaacattctgttatatggatataacacatttaatttatctgtttatcagttcgtagctttaggttatttgggttgtttctactgtctgacaattttaaatactttgaatattcatgtacaagtttttgtgtgcacgtatgtttctatttctcttggttatatagccaggaatggaattgctgggtcatatggaaatcctatgttgaccttttgaggaattgctgactgttttccaacctgcctgtaccattttacattcctaccagtagtgcatgaagctcctaatttctacacatcctcaccaacatctgctagattatctttttgattatagccatactgcaagtgtaaaagggttacctcattgtggttttgatttgcatttccctaataactaatgatgttgaacatcttttcatgtgcttattggcatttgtatattttctttggagaaatgtctgttaaggtctttgcccattttttaaattggatttgaaaaaattactgaataataagaacttttaagttctttatgtgtttagatacaagtcccttatcaggtatattttgcaaatagttttcccctacagtgggttgtctttcactttctttatggtactctaaaggcacaaaagttttaaattttgatgaagtccagtttatctaatatttatttggtttcctgtgcttttggtgtcatatttaaggggagaatgtattttaaataaactatcctagcttatattagtgtgccattgtgaaaataaaaatatactgtttgagattgctttgtaaaatgtagtgacgataagaattatgtaatatagcatatcccgagatttagtaagaaaatgtgccccctttattagtacccttacatttctcgtttgtatggtcatatttaaaaaccctgctttttaaacattttggtcttgtataattagctttatcttgtaataaattttaatatcaaa

SEQ ID NO: 190252 - DNA, 1171 bp, Homo sapiens
  Payload ID: 17575
  Gene Symbol: TSPY1
  Gene Name: testis specific protein, Y-linked 1
  Uniprot ID: Q01534
  ENST ID: ENST00000423647
  CDS Start-End: 47-931
ggcccttcgcgcgcagtcccttagggggcgcctggaagcccggcgcatgcgccctgagggctcgctgacctaccgggtgccagagaggctgcggcagggtttctgtggcgtgggtcgggcagcacaggccttggtgtgtgcgagtgccaaggagggcaccgccttcaggatggaggctgtgcaggagggggcggccggggtggagagtgagcaggcggctttgggggaggaggcggtgctgctgttggatgacataatggcggaggtggaggtggtggcggaggaggagggcctcgtggagcggcgggaggaggcccagcgggcacagcaggctgtgcctggccctgggcccatgaccccagagtctgcaccggaggagctgctggccgttcaggtggagctggagccggttaatgcccaagccaggaaggccttttctcggcagcgggaaaagatggagcggaggcgcaagccccacctagaccgcagaggcgccgtcatccagagcgtccctggcttctgggccaatgttattgcaaaccacccccagatgtcagccctgatcactgacgaagatgaagacatgctgagctacatggtcagcctggaggtgggagaagagaagcatcctgttcatctctgcaagatcatgttgttctttcggagtaacccctacttccagaataaagtgattaccaaggaatatctggtgaacatcacagaatacagggcttctcattccactccaattgagtggtatccggattatgaagtggaggcctatcgccgcagacaccacaacagcagccttaacttcttcaactggttctctgaccacaacttcgcaggatctaacaagattgctgagtcccctgacagatcctatgtaaggacctgtggcgcaatcccctgcaatactacaagaggatgaagccacctgaagagggaacagagacgtcaggggactcccagttgttgagttgaatatgatggagcatcagattttacctaatacagcagaactcctaaaaagttacagccatatgcaggacggcagtactcagcatggtcttatgcacaggaactaaaggaaaaagagatcgagtcacaaaaattcaggaagagggggtaaatgtggattgtatggaatgaaaaataaacattctcaagg

SEQ ID NO: 190253 - DNA, 1160 bp, Homo sapiens
  Payload ID: 17575
  Gene Symbol: TSPY1
  Gene Name: testis specific protein, Y-linked 1
  Uniprot ID: Q01534
  ENST ID: ENST00000451548
  CDS Start-End: 47-973
ggcccttcgcgcgcagtcccttagggggcgcctggaagcccggcgcatgcgccctgagggctcgctgacctaccgggtgccagagaggctgcggcagggtttctgtggcgtgggtcgggcagcacaggccttggtgtgtgcgagtgccaaggagggcaccgccttcaggatggaggctgtgcaggagggggcggccggggtggagagtgagcaggcggctttgggggaggaggcggtgctgctgttggatgacataatggcggaggtggaggtggtggcggaggaggagggcctcgtggagcggcgggaggaggcccagcgggcacagcaggctgtgcctggccctgggcccatgaccccagagtctgcaccggaggagctgctggccgttcaggtggagctggagccggttaatgcccaagccaggaaggccttttctcggcagcgggaaaagatggagcggaggcgcaagccccacctagaccgcagaggcgccgtcatccagagcgtccctggcttctgggccaatgttattgcaaaccacccccagatgtcagccctgatcactgacgaagatgaagacatgctgagctacatggtcagcctggaggtgggagaagagaagcatcctgttcatctctgcaagatcatgttgttctttcggagtaacccctacttccagaataaagtgattaccaaggaatatctggtgaacatcacagaatacagggcttctcattccactccaattgagtggtatccggattatgaagtggaggcctatcgccgcagacaccacaacagcagccttaacttcttcaactggttctctgaccacaacttcgcaggatctaacaagattgctgagatcctatgtaaggacctgtggcgcaatcccctgcaatactacaagaggatgaagccacctgaagagggaacagagacgtcaggggactcccagttgttgagttgaatatgatggagcatcagattttacctaatacagcagaactcctaaaaagttacagccatatgcaggacggcagtactcagcatggtcttatgcacaggaactaaaggaaaaagagatcgagtcacaaaaattcaggaagagggggtaaatgtggattgtatggaatgaaaaataaacattctcaagg

SEQ ID NO: 190254 - DNA, 854 bp, Homo sapiens
  Payload ID: 17575
  Gene Symbol: TSPY1
  Gene Name: testis specific protein, Y-linked 1
  ENST ID: ENST00000440483
  CDS Start-End: 1-666
atgcgccctgagggctcgctgacctaccgggtgccagagaggctgcggcagggtttctgtggcgtgggtcgggcagcacaggccttggtggagctggagccggttaatgcccaagccaggaaggccttttctcggcagcgggaaaagatggagcggaggcgcaagccccacctagaccgcagaggcgccgtcatccagagcgtccctggcttctgggccaatgttattgcaaaccacccccagatgtcagccctgatcactgacgaagatgaagacatgctgagctacatggtcagcctggaggtgggagaagagaagcatcctgttcatctctgcaagatcatgttgttctttcggagtaacccctacttccagaataaagtgattaccaaggaatatctggtgaacatcacagaatacagggcttctcattccactccaattgagtggtatccggattatgaagtggaggcctatcgccgcagacaccacaacagcagccttaacttcttcaactggttctctgaccacaacttcgcaggatctaacaagattgctgagatcctatgtaaggacctgtggcgcaatcccctgcaatactacaagaggatgaagccacctgaagagggaacagagacgtcaggggactcccagttgttgagttgaatatgatggagcatcagattttacctaatacagcagaactcctaaaaagttacagccatatgcaggacggcagtactcagcatggtcttatgcacaggaactaaaggaaaaagagatcgagtcacaaaaattcaggaagagggggtaaatgtggattgtatggaatgaaaaataaacattctcaagga

SEQ ID NO: 190255 - DNA, 1161 bp, Homo sapiens
  Payload ID: 17575
  Gene Symbol: TSPY1
  Gene Name: testis specific protein, Y-linked 1
  ENST ID: ENST00000446779
  CDS Start-End: 47-973
ggcccttcgcgcgcagtcccttagggggcgcctggaagcccggcgcatgcgccctgagggctcgctgacctaccgggtgccagagaggctgcggcagggtttctgtggcgtgggtcgggcagcacaggccttggtgtgtgcgagtgccaaggagggcaccgccttcaggatggaggctgtgcaggagggggcggccggggtggagagtgagcaggcggctttgggggaggaggcggtgctgctgttggatgacataatggcggaggtggaggtggtggcggaggaggagggcctcgtggagcggcgggaggaggcccagcgggcacagcaggctgtgcctggccctgggcccatgaccccagagtctgcaccggaggagctgctggccgttcaggtggagctggagccggttaatgcccaagccaggaaggccttttctcggcagcgggaaaagatggagcggaggcgcaagccccacctagaccgcagaggcgccgtcatccagagcgtccctggcttctgggccaatgttattgcaaaccacccccagatgtcagccctgatcactgacgaagatgaagacatgctgagctacatggtcagcctggaggtggaagaagagaagcatcctgttcatctctgcaagatcatgttgttctttcggagtaacccctacttccagaataaagtgattaccaaggaatatctggtgaacatcacagaatacagggcttctcattccactccaattgagtggtatccggattatgaagtggaggcctatcgccgcagacaccacaacagcagccttaacttcttcaactggttctctgaccacaacttcgcaggatctaacaagattgctgagatcctatgtaaggacctgtggcgcaatcccctgcaatactacaagaggatgaagccacctgaagagggaacagagacgtcaggggactcccagttgttgagttgaatatgatggagcatcagattttacctaatacagcagaactcctaaaaagttacagccatatgcaggacggcagtactcagcatggtcttatgcacaggaactaaaggaaaaagagatcgagtcacaaaaattcaggaagagggggtaaatgtggattgtatggaatgaaaaataaacattctcaagga

SEQ ID NO: 190256 - DNA, 1125 bp, Homo sapiens
  Payload ID: 17576
  Gene Symbol: TSPY10
  Gene Name: testis specific protein, Y-linked 10
  ENST ID: ENST00000444056
  CDS Start-End: 1-885
atgcgccctgagggctcgctgacctaccgggtgccagagaggctgcggcagggtttctgtggcgtgggtcgggcagcacaggccttggtgtgtgcgagtgccaaggagggcaccgccttcaggatggaggctgtacaggagggggcggccggggtggagagtgagcaggcggctttgggggaggaggcggtgctgctgttggatgacataatggcggaggtggaggtggtggcggaggaggagggcctcgtggagcggcgggaggaggcccagcgggcacagcaggctgtgcctggccctgggcccatgaccccagagtctgcactggaggagctgctggccgttcaggtggagctggagccggttaatgcccaagccaggaaggccttttctcggcagcgggaaaagatggagcggaggcgcaagccccacctagaccgcagaggcgccgtcatccagagcgtccctggcttctgggccaatgttattgcaaaccacccccagatgtcagccctgatcactgacgaagatgaagacatgctgagctacatggtcagcctggaggtggaagaagagaagcatcctgttcatctctgcaagatcatgttgttctttcggagtaacccctacttccagaataaagtgattaccaaggaatatctggtgaacatcacagaatacagggcttctcattccactccaattgagtggtatccggattatgaagtggaggcctatcgccgcagacaccacaacagcagccttaacttcttcaactggttctctgaccacaacttcgcaggatctaacaagattgctgagtcccctgacagatcctatgtaaggacctgtggcgcaatcccctgcaatactacaagaggatgaagccacctgaagagggaacagagacgtcaggggactcccagttgttgagttgaatatgatggagcatcagattttacctaatacagcagaactcctaaaaagttacagccatatgcaggacggcagtactcagcatggtcttatgcacaggaactaaaggaaaaacagatcgagtcacaaaaattcaggaagagggggtaaatgtggattgtatggaatgaaaaataaacattctcaagg

SEQ ID NO: 190257 - DNA, 1161 bp, Homo sapiens
  Payload ID: 17576
  Gene Symbol: TSPY10
  Gene Name: testis specific protein, Y-linked 10
  ENST ID: ENST00000428845
  CDS Start-End: 47-973
ggcccttcgcgcgcagtcccttagggggcgcctggaagcccggcgcatgcgccctgagggctcgctgacctaccgggtgccagagaggctgcggcagggtttctgtggcgtgggtcgggcagcacaggccttggtgtgtgcgagtgccaaggagggcaccgccttcaggatggaggctgtacaggagggggcggccggggtggagagtgagcaggcggctttgggggaggaggcggtgctgctgttggatgacataatggcggaggtggaggtggtggcggaggaggagggcctcgtggagcggcgggaggaggcccagcgggcacagcaggctgtgcctggccctgggcccatgaccccagagtctgcactggaggagctgctggccgttcaggtggagctggagccggttaatgcccaagccaggaaggccttttctcggcagcgggaaaagatggagcggaggcgcaagccccacctagaccgcagaggcgccgtcatccagagcgtccctggcttctgggccaatgttattgcaaaccacccccagatgtcagccctgatcactgacgaagatgaagacatgctgagctacatggtcagcctggaggtggaagaagagaagcatcctgttcatctctgcaagatcatgttgttctttcggagtaacccctacttccagaataaagtgattaccaaggaatatctggtgaacatcacagaatacagggcttctcattccactccaattgagtggtatccggattatgaagtggaggcctatcgccgcagacaccacaacagcagccttaacttcttcaactggttctctgaccacaacttcgcaggatctaacaagattgctgagatcctatgtaaggacctgtggcgcaatcccctgcaatactacaagaggatgaagccacctgaagagggaacagagacgtcaggggactcccagttgttgagttgaatatgatggagcatcagattttacctaatacagcagaactcctaaaaagttacagccatatgcaggacggcagtactcagcatggtcttatgcacaggaactaaaggaaaaacagatcgagtcacaaaaattcaggaagagggggtaaatgtggattgtatggaatgaaaaataaacattctcaagga

SEQ ID NO: 190258 - DNA, 1161 bp, Homo sapiens
  Payload ID: 17577
  Gene Symbol: TSPY2
  Gene Name: testis specific protein, Y-linked 2
  Uniprot ID: A6NKD2
  ENST ID: ENST00000320701
  CDS Start-End: 47-973
ggctcttcgcgcgcagtcccttagggggcgcctggaagcccggcgcatgcgccctgagggctcgctgacctaccgggtgccagagaggctgcggcagggttcctgtggcgtgggtcgggcagcacaggccttggtgtgtgcgagtgccaaggagggcaccgccttcaggatggaggctgtgcaggagggggcggccggggtggagagtgagcaggcggctttgggggaggaggcggtgctgctgttggatgacataatggcggaggtggaggtggtggcggaggaggagggcctcgtggagcggcgggaggaggcccagcgggcacagcaggctgtgcctggccctgggcccatgaccccagagtctgcactggaggagctgctggccgttcaggtggagctggagccggttaatgcccaagccaggaaggccttttctcggcagcgggaaaagatggagcggaggcgcaagccccacctagaccgcagaggcgccgtcatccagagcgtccctggcttctgggccaatgttattgcaaaccacccccagatgtcagccctgatcactgacgaagatgaagacatgctgagctacatggtcagcctggaggtggaagaagagaagcatcgtgttcatctctgcaagatcatgttgttctttcggagtaacccctacttccagaataaagtgattaccaaggaatatctggtgaacatcacagaatacagggcttctcattccactccaattgagtggtatccggattatgaagtggaggcctatcgccgcagacaccacaacagcagccttaacttcttcaactggttctctgaccacaacttcgcaggatctaacaagattgctgagatcctatgtaaggacctgtggcgcaatcccctgcaatactacaagaggatgaagccacctgaagagggaacagagacgtcaggggactcccagttgttgagttgaatatgatggagcatcagattttacctaatacagcagaactcctaaaaagttacagccatatgcaggacagcagtactcagcatggtcttatgcacaggaactaaaggaaaaagagatcgagtcacaaaaattcaggaagagggggtaaatgtggattgtatggaatgaaaaataaacattctcaagga

SEQ ID NO: 190259 - DNA, 1125 bp, Homo sapiens
  Payload ID: 17577
  Gene Symbol: TSPY2
  Gene Name: testis specific protein, Y-linked 2
  ENST ID: ENST00000383042
  CDS Start-End: 1-885
atgcgccctgagggctcgctgacctaccgggtgccagagaggctgcggcagggttcctgtggcgtgggtcgggcagcacaggccttggtgtgtgcgagtgccaaggagggcaccgccttcaggatggaggctgtgcaggagggggcggccggggtggagagtgagcaggcggctttgggggaggaggcggtgctgctgttggatgacataatggcggaggtggaggtggtggcggaggaggagggcctcgtggagcggcgggaggaggcccagcgggcacagcaggctgtgcctggccctgggcccatgaccccagagtctgcactggaggagctgctggccgttcaggtggagctggagccggttaatgcccaagccaggaaggccttttctcggcagcgggaaaagatggagcggaggcgcaagccccacctagaccgcagaggcgccgtcatccagagcgtccctggcttctgggccaatgttattgcaaaccacccccagatgtcagccctgatcactgacgaagatgaagacatgctgagctacatggtcagcctggaggtggaagaagagaagcatcgtgttcatctctgcaagatcatgttgttctttcggagtaacccctacttccagaataaagtgattaccaaggaatatctggtgaacatcacagaatacagggcttctcattccactccaattgagtggtatccggattatgaagtggaggcctatcgccgcagacaccacaacagcagccttaacttcttcaactggttctctgaccacaacttcgcaggatctaacaagattgctgagtcccctgacagatcctatgtaaggacctgtggcgcaatcccctgcaatactacaagaggatgaagccacctgaagagggaacagagacgtcaggggactcccagttgttgagttgaatatgatggagcatcagattttacctaatacagcagaactcctaaaaagttacagccatatgcaggacagcagtactcagcatggtcttatgcacaggaactaaaggaaaaagagatcgagtcacaaaaattcaggaagagggggtaaatgtggattgtatggaatgaaaaataaacattctcaagg

SEQ ID NO: 190260 - DNA, 779 bp, Homo sapiens
  Payload ID: 17577
  Gene Symbol: TSPY2
  Gene Name: testis specific protein, Y-linked 2
  ENST ID: ENST00000429039
  CDS Start-End: 47-712
ggctcttcgcgcgcagtcccttagggggcgcctggaagcccggcgcatgcgccctgagggctcgctgacctaccgggtgccagagaggctgcggcagggttcctgtggcgtgggtcgggcagcacaggccttggtggagctggagccggttaatgcccaagccaggaaggccttttctcggcagcgggaaaagatggagcggaggcgcaagccccacctagaccgcagaggcgccgtcatccagagcgtccctggcttctgggccaatgttattgcaaaccacccccagatgtcagccctgatcactgacgaagatgaagacatgctgagctacatggtcagcctggaggtggaagaagagaagcatcgtgttcatctctgcaagatcatgttgttctttcggagtaacccctacttccagaataaagtgattaccaaggaatatctggtgaacatcacagaatacagggcttctcattccactccaattgagtggtatccggattatgaagtggaggcctatcgccgcagacaccacaacagcagccttaacttcttcaactggttctctgaccacaacttcgcaggatctaacaagattgctgagatcctatgtaaggacctgtggcgcaatcccctgcaatactacaagaggatgaagccacctgaagagggaacagagacgtcaggggactcccagttgttgagttgaatatgatggagcatcagattttacctaatacagcagaactcctaaaaagttacagccatatgcagga

SEQ ID NO: 190261 - DNA, 1161 bp, Homo sapiens
  Payload ID: 17578
  Gene Symbol: TSPY3
  Gene Name: testis specific protein, Y-linked 3
  Uniprot ID: P0CV98
  ENST ID: ENST00000457222
  CDS Start-End: 47-973
ggcccttcgcgcgcagtcccttagggggcgcctggaagcccggcgcatgcgccctgagggctcgctgacctaccgggtgccagagaggctgcggcagggtttctgtggcgtgggtcgggcagcacaggccttggtgtgtgcgagtgccaaggagggcaccgccttcaggatggaggctgtacaggagggggcggccggggtggagagtgagcaggcggctttgggggaggaggcggtgctgctgttggatgacataatggcggaggtggaggtggtggcggaggaggagggcctcgtggagcggcgggaggaggcccagcgggcacagcaggctgtgcctggccctgggcccatgaccccagagtctgcactggaggagctgctggccgttcaggtggagctggagccggttaatgcccaagccaggaaggccttttctcggcagcgggaaaagatggagcggaggcgcaagccccacctagaccgcagaggcgccgtcatccagagcgtccctggcttctgggccaatgttattgcaaaccacccccagatgtcagccctgatcactgacgaagatgaagacatgctgagctacatggtcagcctggaggtggaagaagagaagcatcctgttcatctctgcaagatcatgttgttctttcggagtaacccctacttccagaataaagtgattaccaaggaatatctggtgaacatcacagaatacagggcttctcattccactccaattgagtggtatccggattatgaagtggaggcgtatcgccgcagacaccacaacagcagccttaacttcttcaactggttctctgaccacaacttcgcaggatctaacaagattgctgagatcctatgtaaggacctgtggcgcaatcccctgcaatactacaagaggatgaagccacctgaagagggaacagagacgtcaggggactcccagttgttgagttgaatatgatggagcatcagattttacctaatacagcagaactcctaaaaagttacagccatatgcaggacggcagtactcagcatggtcttatgcacaggaactaaaggaaaaagagatcgagtcacaaaaattcaggaagagggggtaaatgtggattgtatggaatgaaaaataaacattctcaagga

SEQ ID NO: 190262 - DNA, 1125 bp, Homo sapiens
  Payload ID: 17578
  Gene Symbol: TSPY3
  Gene Name: testis specific protein, Y-linked 3
  ENST ID: ENST00000424594
  CDS Start-End: 1-885
atgcgccctgagggctcgctgacctaccgggtgccagagaggctgcggcagggtttctgtggcgtgggtcgggcagcacaggccttggtgtgtgcgagtgccaaggagggcaccgccttcaggatggaggctgtacaggagggggcggccggggtggagagtgagcaggcggctttgggggaggaggcggtgctgctgttggatgacataatggcggaggtggaggtggtggcggaggaggagggcctcgtggagcggcgggaggaggcccagcgggcacagcaggctgtgcctggccctgggcccatgaccccagagtctgcactggaggagctgctggccgttcaggtggagctggagccggttaatgcccaagccaggaaggccttttctcggcagcgggaaaagatggagcggaggcgcaagccccacctagaccgcagaggcgccgtcatccagagcgtccctggcttctgggccaatgttattgcaaaccacccccagatgtcagccctgatcactgacgaagatgaagacatgctgagctacatggtcagcctggaggtggaagaagagaagcatcctgttcatctctgcaagatcatgttgttctttcggagtaacccctacttccagaataaagtgattaccaaggaatatctggtgaacatcacagaatacagggcttctcattccactccaattgagtggtatccggattatgaagtggaggcgtatcgccgcagacaccacaacagcagccttaacttcttcaactggttctctgaccacaacttcgcaggatctaacaagattgctgagtcccctgacagatcctatgtaaggacctgtggcgcaatcccctgcaatactacaagaggatgaagccacctgaagagggaacagagacgtcaggggactcccagttgttgagttgaatatgatggagcatcagattttacctaatacagcagaactcctaaaaagttacagccatatgcaggacggcagtactcagcatggtcttatgcacaggaactaaaggaaaaagagatcgagtcacaaaaattcaggaagagggggtaaatgtggattgtatggaatgaaaaataaacattctcaagg

SEQ ID NO: 190263 - DNA, 1143 bp, Homo sapiens
  Payload ID: 17579
  Gene Symbol: TSPY4
  Gene Name: testis specific protein, Y-linked 4
  ENST ID: ENST00000383008
  CDS Start-End: 1-903
atgcgccctgagggctcgctgacctaccgggtgccagagaggctgcggcagggtttctgtggcgtgggtcgggcagcacaggccttggtgtgtgcgagtgccaaggagggcaccgccttcaggatggaggctgtacaggagggggcggccggggtggagagtgagcaggcggctttgggggaggaggcggtgctgctgttggatgacataatggcggaggtggaggtggtggcggaggtggaggtggtggcggaggaggagggcctcgtggagcggcgggaggaggcccagcgggcacagcaggctgtgcctggccctgggcccatgaccccagagtctgcactggaggagctgctggccgttcaggtggagctggagccggttaatgcccaagccaggaaggccttttctcggcagcgggaaaagatggagcggaggcgcaagccccacctagaccgcagaggcgccgtcatccagagcgtccctggcttctgggccaatgttattgcaaaccacccccagatgtcagccctgatcactgacgaagatgaagacatgctgagctacatggtcagcctggaggtggaagaagagaagcatcctgttcatctctgcaagatcatgttgttctttcggagtaacccctacttccagaataaagtgattaccaaggaatatctggtgaacatcacagaatacagggcttctcattccactccaattgagtggtatccggattatgaagtggaggcctatcgccgcagacaccacaacagcagccttaacttcttcaactggttctctgaccacaacttcgcaggatctaacaagattgctgagtcccctgacagatcctatgtaaggacctgtggcgcaatcccctgcaatactacaagaggatgaagccacctgaagagggaacagagacgtcaggggactcccagttgttgagttgaatatgatggagcatcagattttacctaatacagcagaactcctaaaaagttacagccatatgcaggacggcagtactcagcatggtcttatgcacaggaactaaaggaaaaagagatcgagtcacaaaaattcaggaagagggggtaaatgtggattgtatggaatgaaaaataaacattctcaagg

SEQ ID NO: 190264 - DNA, 1179 bp, Homo sapiens
  Payload ID: 17579
  Gene Symbol: TSPY4
  Gene Name: testis specific protein, Y-linked 4
  Uniprot ID: P0CV99
  ENST ID: ENST00000426950
  CDS Start-End: 47-991
ggcccttcgcgcgcagtcccttagggggcgcctggaagcccggcgcatgcgccctgagggctcgctgacctaccgggtgccagagaggctgcggcagggtttctgtggcgtgggtcgggcagcacaggccttggtgtgtgcgagtgccaaggagggcaccgccttcaggatggaggctgtacaggagggggcggccggggtggagagtgagcaggcggctttgggggaggaggcggtgctgctgttggatgacataatggcggaggtggaggtggtggcggaggtggaggtggtggcggaggaggagggcctcgtggagcggcgggaggaggcccagcgggcacagcaggctgtgcctggccctgggcccatgaccccagagtctgcactggaggagctgctggccgttcaggtggagctggagccggttaatgcccaagccaggaaggccttttctcggcagcgggaaaagatggagcggaggcgcaagccccacctagaccgcagaggcgccgtcatccagagcgtccctggcttctgggccaatgttattgcaaaccacccccagatgtcagccctgatcactgacgaagatgaagacatgctgagctacatggtcagcctggaggtggaagaagagaagcatcctgttcatctctgcaagatcatgttgttctttcggagtaacccctacttccagaataaagtgattaccaaggaatatctggtgaacatcacagaatacagggcttctcattccactccaattgagtggtatccggattatgaagtggaggcctatcgccgcagacaccacaacagcagccttaacttcttcaactggttctctgaccacaacttcgcaggatctaacaagattgctgagatcctatgtaaggacctgtggcgcaatcccctgcaatactacaagaggatgaagccacctgaagagggaacagagacgtcaggggactcccagttgttgagttgaatatgatggagcatcagattttacctaatacagcagaactcctaaaaagttacagccatatgcaggacggcagtactcagcatggtcttatgcacaggaactaaaggaaaaagagatcgagtcacaaaaattcaggaagagggggtaaatgtggattgtatggaatgaaaaataaacattctcaagga

SEQ ID NO: 190265 - DNA, 1161 bp, Homo sapiens
  Payload ID: 17580
  Gene Symbol: TSPY8
  Gene Name: testis specific protein, Y-linked 8
  Uniprot ID: P0CW00
  ENST ID: ENST00000287721
  CDS Start-End: 47-973
ggcccttcgcgcgcagtcccttagggggcgcctggaagcccggcgcatgcgccctgagggctcgctgacctactgggtgccagagaggctgcggcagggtttctgtggcgtgggtcgggcagcacaggccttggtgtgtgcgagtgccaaggagggcaccgccttcaggatggaggctgtacaggagggggcggccggggtggagagtgagcaggcggctttgggggaggaggcggtgctgctgttggatgacataatggcggaggtggaggtggtggcggaggaggagggcctcgtggagcggcgggaggaggcccagcgggcacagcaggctgtgcctggccctgggcccatgaccccagagtctgcactggaggagctgctggccgttcaggtggagctggagccggttaatgcccaagccaggaaggccttttctcggcagcgggaaaagatggagcggaggcgcaagccccacctagaccgcagaggcgccgtcatccagagcgtccctggcttctgggccaatgttattgcaaaccacccccagatgtcagccctgatcactgacgaagatgaagacatgctgagctacatggtcagcctggaggtggaagaagagaagcatcctgttcatctctgcaagatcatgttgttctttcggagtaacccctacttccagaataaagtgattaccaaggaatatctggtgaacatcacagaatacagggcttctcattccactccaattgagtggtatctggattatgaagtggaggcctatcgccgcagacaccacaacagcagccttaacttcttcaactggttctctgaccacaacttcgcaggatctaacaagattgctgagatcctatgtaaggacctgtggcgcaatcccctgcaatactacaagaggatgaagccacctgaagagggaacagagacgtcaggggactcccagttgttgagttgaatatgatggagcatcagattttacctaatacagcagaactcctaaaaagttacagccatatgcaggacggcagtactcagcatggtcttatgcacaggaactaaaggaaaaagagatcgagtcacaaaaattcaggaagagggggtaaatgtggattgtatggaatgaaaaataaacattctcaagga

SEQ ID NO: 190266 - DNA, 1125 bp, Homo sapiens
  Payload ID: 17580
  Gene Symbol: TSPY8
  Gene Name: testis specific protein, Y-linked 8
  ENST ID: ENST00000383000
  CDS Start-End: 1-885
atgcgccctgagggctcgctgacctactgggtgccagagaggctgcggcagggtttctgtggcgtgggtcgggcagcacaggccttggtgtgtgcgagtgccaaggagggcaccgccttcaggatggaggctgtacaggagggggcggccggggtggagagtgagcaggcggctttgggggaggaggcggtgctgctgttggatgacataatggcggaggtggaggtggtggcggaggaggagggcctcgtggagcggcgggaggaggcccagcgggcacagcaggctgtgcctggccctgggcccatgaccccagagtctgcactggaggagctgctggccgttcaggtggagctggagccggttaatgcccaagccaggaaggccttttctcggcagcgggaaaagatggagcggaggcgcaagccccacctagaccgcagaggcgccgtcatccagagcgtccctggcttctgggccaatgttattgcaaaccacccccagatgtcagccctgatcactgacgaagatgaagacatgctgagctacatggtcagcctggaggtggaagaagagaagcatcctgttcatctctgcaagatcatgttgttctttcggagtaacccctacttccagaataaagtgattaccaaggaatatctggtgaacatcacagaatacagggcttctcattccactccaattgagtggtatctggattatgaagtggaggcctatcgccgcagacaccacaacagcagccttaacttcttcaactggttctctgaccacaacttcgcaggatctaacaagattgctgagtcccctgacagatcctatgtaaggacctgtggcgcaatcccctgcaatactacaagaggatgaagccacctgaagagggaacagagacgtcaggggactcccagttgttgagttgaatatgatggagcatcagattttacctaatacagcagaactcctaaaaagttacagccatatgcaggacggcagtactcagcatggtcttatgcacaggaactaaaggaaaaagagatcgagtcacaaaaattcaggaagagggggtaaatgtggattgtatggaatgaaaaataaacattctcaagg

SEQ ID NO: 190267 - DNA, 1160 bp, Homo sapiens
  Payload ID: 17580
  Gene Name: testis specific protein, Y-linked 8
  ENST ID: ENST00000383005
  CDS Start-End: 47-973
ggcccttcgcgcgcagtcccttagggggcgcctggaagcccggcgcatgcgccctgagggctcgctgacctactgggtgccagagaggctgcggcagggtttctgtggcgtgggtcgggcagcacaggccttggtgtgtgcgagtgccaaggagggcaccgccttcaggatggaggctgtacaggagggggcggccggggtggagagtgagcaggcggctttgggggaggaggcggtgctgctgttggatgacataatggcggaggtggaggtggtggcggaggaggagggcctcgtggagcggcgggaggaggcccagcgggcacagcaggctgtgcctggccctgggcccatgaccccagagtctgcactggaggagctgctggccgttcaggtggagctggagccggttaatgcccaagccaggaaggccttttctcggcagcgggaaaagatggagcggaggcgcaagccccacctagaccgcagaggcgccgtcatccagagcgtccctggcttctgggccaatgttattgcaaaccacccccagatgtcagccctgatcactgacgaagatgaagacatgctgagctacatggtcagcctggaggtggaagaagagaagcatcctgttcatctctgcaagatcatgttgttctttcggagtaacccctacttccagaataaagtgattaccaaggaatatctggtgaacatcacagaatacagggcttctcattccactccaattgagtggtatccggattatgaagtggaggcctatcgccgcagacaccacaacagcagccttaacttcttcaactggttctctgaccacaacttcgcaggatctaacaagattgctgagatcctatgtaaggacctgtggcgcaatcccctgcaatactacaagaggatgaagccacctgaagagggaacagagacgtcaggggactcccagttgttgagttgaatatgatggagcatcagattttacctaatacagcagaactcctaaaaagttacagccatatgcaggacggcagtactcagcatggtcttatgcacaggaactaaaggaaaaagagatcgagtcacaaaaattcaggaagagggggtaaatgtggattgtatggaatgaaaaataaacattctcaagg

SEQ ID NO: 190268 - DNA, 1160 bp, Homo sapiens
  Payload ID: 17581
  Gene Name: testis specific protein, Y-linked 9, pseudogene
  ENST ID: ENST00000440215
  CDS Start-End: 28-972
cttagggggcgcctggaagcccggcgcatgcgccctgagggctcgctgacctaccgggtgccagagaggctgcggcagggtttctgtggcgtgggtcgggcagcacaggccttggtgtgtgcgagtgccaaggagggcaccgccttcaggatggaggctgtacaggagggggcggccggggtggagagtgagcaggcggctttgggggaggaggcggtgctgctgttggatgacataatggcggaggtggaggtggtggcggaggtggaggtggtggcggaggaggagggcctcgtggagcggcgggaggaggcccagcgggcacagcaggctgtgcctggccctgggcccatgaccccagagtctgcactggaggagctgctggccgttcaggtggagctggagccggttaatgcccaagccaggaaggccttttctcggcagcgggaaaagatggagcggaggcgcaagccccagctagaccgcagaggcgccgtcatccagagcgtccctggcttctgggccaatgttattgcaaaccacccccagatgtcagccctgatcactgacgaagatgaagacatgctgagctacatggtcagcctggaggtggaagaagagaagcatcctgttcatctctgcaagatcatgttgttctttcggagtaacccctacttccagaataaagtgattaccaaggaatatctggtgaacatcacagaatacagggcttctcattccactccaattgagtggtatccggattatgaagtggaggcctatcgccgcagacaccacaacagcagccttaacttcttcaactggttctctgaccacaacttcgcaggatctaacaagattgctgagatcctatgtaaggacctgtggcgcaatcccctgcaatactacaagaggatgaagccacctgaagagggaacagagacgtcaggggactcccagttgttgagttgaatatgatggagcatcagattttacctaatacagcagaactcctaaaaagttacagccatatgcaggacggcagtactcagcatggtcttatgcacaggaactaaaggaaaaagagatcgagtcacaaaaattcaggaagagggggtaaatgtggattgtatggaatgaaaaataaacattctcaagga

SEQ ID NO: 190269 - DNA, 3037 bp, Homo sapiens
  Payload ID: 17582
  Gene Name: testis specific, 10
  Uniprot ID: Q9BZW7
  ENST ID: ENST00000355053
  CDS Start-End: 630-2726
gggcgtgcgcctgcgcggcgcggatgggccaggaaggggtccctcctaggtgccctgtaaggcaggcaggtagacgtacgcgtcgctccgtgcgtaggagcgcgcgcacggcttgtagaccccgcgagaaggaaggtcgagccaggttaccaccaaagaatatgattttggtctaggggctccagtttctgaagctgaaaactaccagaatactctccagctagaacaagaagtgagaaaccaagatagattcatctcgacactgaaattacagattgaagatctcaaacagacaaatcatggcttggaagaatatgttaggaaactcttggatagtaaggaggtggtaagcagtcaagtagatgatttaaccagccacaatgagcatctttgtaaagaattgattaaaattgaccaactagcagagcaactcgaaaaagagaaaaattttgtggtggattccgccaacaaggaacttgaagaagccaagattgatctcatttgccagcaaaataatattatagtattggaagatacaataaaaaggcttaaatctacttgattcctttgtcaagactttggaagcagacaaagatcactataagagtgaagctcaacatttgagaaagatgatgcgaagtaggtctaaaagtccaagacgcccatcaccaactgcccggggtgcaaactgtgatgtagaacttttgaagacaacaacaagagatcgtgaagaacttaaatgcatgctggaaaaatatgagcgccatttggcagaaattcagggtaatgtcaaggttcttaaatctgagagagacaagatcttccttctttatgaacaggcacaggaagaaattacccgacttcgacgagaaatgatgaaaagctgtaagagtcctaaatcaacaacggcacatgctattctccggcgagtggagactgaaagagatgtagcctttactgatttacgaagaatgaccacagaacgagatagtctaagggagaggctaaagattgctcaagagacagcatttaatgagaaggctcacctggaacaaaggatagaggagctggagtgtacagttcataatcttgatgatgaacgtatggagcaaatgtcaaatatgactttgatgaaggaaaccataagcactgtggaaaaagaaatgaaatcactagcaagaaaggcaatggataccgaaagtgaacttggcagacaaaaagcagagaataattctttgagacttttgtatgaaaacacagaaaaagatctttctgatactcagcgacaccttgctaagaaaaaatatgagctacagcttactcaggagaaaattatgtgcttggatgaaaaaattgataactttacaaggcaaaatattgcacagcgagaagaaatcagcattcttggtggaaccctcaatgatctggctaaagaaaaggaatgcctgcaagcatgtttggataaaaaatctgagaatattgcatcccttggagagagtttggcaatgaaagaaaagaccatttcaggcatgaagaatatcattgctgagatggaacaggcatcaagacagtgtactgaggccctaattgtgtgtgaacaagacgtttccagaatgcgtcggcaattggatgagacaaatgatgagctggcccagatcgccagggaaagagatatcttggctcatgacaatgacaatctccaggaacagtttgctaaagctaaacaagaaaaccaggcactgtccaaaaaattgaatgacactcataatgaacttaatgacataaaacagaaggttcaagatactaatttggaggttaacaagctgaagaatatattaaagtctgaagaatctgagaaccggcaaatgatggaacaacttcgaaaagccaatgaagatgctgaaaactgggaaaataaagcccgtcaatcagaggcagataacaataccctcaaactggaacttatcactgctgaggcagagggtaacagattaaaagaaaaagtagattccctcaacagagaggttgagcaacacttaaatgcagaaaggtcttacaagtcccagatttctaccttacataaatctgttgtaaaaatggaagaggagcttcagaaggttcagtttgaaaaagtgtccgctcttgcagatttgtcttctactagggaactctgtattaaacttgactcaagcaaagaacttcttaatcgacagctggttgctaaagatcaagaaatagaaatgagggagaatgagttagattctgctcattctgaaattgaactcctgaggagtcagatggcaaatgagagaatctccatgcagaatctagaagctttgctggtggccaatcgagacaaagaatatcagtctcagatagcacttcaagaaaaagaatctgaaattcagcttcttaaagaacacctttgtttggcagaaaataaaatggccatccagagtagagatgtggcccagttcagaaatgttgtcacacaattggaagctgatttagacattaccaaaagacaactaggaacagagcgctttgaaagggagagggccgtacaagaacttcgccgccaaaattattcaagtaatgcttatcatatgagttctacaatgaagccaaatacaaaatgtcattcaccagaacgtgctcaccatcgatctcctgaccgaggcctagatcgatcattagaagagaatctttgctacagagatttctgacacctgaaatgattcttcacatccctgagaaaggtcaaagttacaaactgatttttttttttttgctacatgagtgcatttatcttttaaatgcttggcaatgttaaatgtatttattaactttgtgtctctgaatctctgttctaatgtgccatgttgcagtgatctgagatgacttataaaaacaaaaatgtatatggctctttctatccatgcagtgatagtgagtgtaaaatctgcttacttcactattgaacactattctgttcactatctggagtaaataaagaagcttattaaaacagggaaaa

SEQ ID NO: 190270 - DNA, 2460 bp, Homo sapiens
  Payload ID: 17582
  Gene Name: testis specific, 10
  ENST ID: ENST00000393482
  CDS Start-End: 389-2460
gcgcaccgggcctgggggcgagcgggacggaagcaaagctggggcgccggggaggtggaagacgagccccactccggttaccaccaaagaatatgattttggtctaggggctccagtttctgaagctgaaaactaccagaatactctccagctagaacaagaagtgagaaaccaagatagattcatctcgacactgaaattacagattgatctcatttgccagcaaaataatattatagtattggaagatacaataaaaaggcttaaatctataattttagatactgaaaaagcacaaaataaatctccttctagacttgattcctttgtcaagactttggaagcagacaaagatcactataagagtgaagctcaacatttgagaaagatgatgcgaagtaggtctaaaagtccaagacgcccatcaccaactgcccggggtgcaaactgtgatgtagaacttttgaagacaacaacaagagatcgtgaagaacttaaatgcatgctggaaaaatatgagcgccatttggcagaaattcagggtaatgtcaaggttcttaaatctgagagagacaagatcttccttctttatgaacaggcacaggaagaaattacccgacttcgacgagaaatgatgaaaagctgtaagagtcctaaatcaacaacggcacatgctattctccggcgagtggagactgaaagagatgtagcctttactgatttacgaagaatgaccacagaacgagatagtctaagggagaggctaaagattgctcaagagacagcatttaatgagaaggctcacctggaacaaaggatagaggagctggagtgtacagttcataatcttgatgatgaacgtatggagcaaatgtcaaatatgactttgatgaaggaaaccataagcactgtggaaaaagaaatgaaatcactagcaagaaaggcaatggataccgaaagtgaacttggcagacaaaaagcagagaataattctttgagacttttgtatgaaaacacagaaaaagatctttctgatactcagcgacaccttgctaagaaaaaatatgagctacagcttactcaggagaaaattatgtgcttggatgaaaaaattgataactttacaaggcaaaatattgcacagcgagaagaaatcagcattcttggtggaaccctcaatgatctggctaaagaaaaggaatgcctgcaagcatgtttggataaaaaatctgagaatattgcatcccttggagagagtttggcaatgaaagaaaagaccatttcaggcatgaagaatatcattgctgagatggaacaggcatcaagacagtgtactgaggccctaattgtgtgtgaacaagacgtttccagaatgcgtcggcaattggatgagacaaatgatgagctggcccagatcgccagggaaagagatatcttggctcatgacaatgacaatctccaggaacagtttgctaaagctaaacaagaaaaccaggcactgtccaaaaaattgaatgacactcataatgaacttaatgacataaaacagaaggttcaagatactaatttggaggttaacaagctgaagaatatattaaagtctgaagaatctgagaaccggcaaatgatggaacaacttcgaaaagccaatgaagatgctgaaaactgggaaaataaagcccgtcaatcagaggcagataacaataccctcaaactggaacttatcactgctgaggcagagggtaacagattaaaagaaaaagtagattccctcaacagagaggttgagcaacacttaaatgcagaaaggtcttacaagtcccagatttctaccttacataaatctgttgtaaaaatggaagaggagcttcagaaggttcagtttgaaaaagtgtccgctcttgcagatttgtcttctactagggaactctgtattaaacttgactcaagcaaagaacttcttaatcgacagctggttgctaaagatcaagaaatagaaatgagggagaatgagttagattctgctcattctgaaattgaactcctgaggagtcagatggcaaatgagagaatctccatgcagaatctagaagctttgctggtggccaatcgagacaaagaatatcagtctcagatagcacttcaagaaaaagaatctgaaattcagcttcttaaagaacacctttgtttggcagaaaataaaatggccatccagagtagagatgtggcccagttcagaaatgttgtcacacaattggaagctgatttagacattaccaaaagacaactaggaacagagcgctttgaaagggagagggccgtacaagaacttcgccgccaaaattattcaagtaatgcttatcatatgagttctacaatgaagccaaatacaaaatgtcattcaccagaacgtgctcaccatcgatctcctgaccgaggcctagatcgatcattagaaga

SEQ ID NO: 190271 - DNA, 3878 bp, Homo sapiens
  Payload ID: 17582
  Gene Name: testis specific, 10
  Uniprot ID: Q9BZW7
  ENST ID: ENST00000393483
  CDS Start-End: 846-2942
agaaggaggggcgcgcagggatcgcgcctagtctctccgcctgcggagccgtggggtcccggcagcccgcaggagtgctaagtaagggtccttcagggcgggaaccaggttccaggcagggacgcaggctacgttcgaataaaagtaccgaaggtcataaggccccagttcagatgggacttccccgcgtgacagcacagagataacggccagccctgggcgaaggttaccaccaaagaatatgattttggtctaggggctccagtttctgaagctgaaaactaccagaatactctccagctagaacaagaagtgagaaaccaagatagattcatctcgacactgaaattacaggcatttggatacctttgtgatagaaaaggcccttttcttcatccattgatggtttgatagtgggctgggaaggaaagctgtgttcctccacattaggcagcaaatacttgattgatttgatatttagcttagtcaaattgaagatctcaaacagacaaatcatggcttggaagaatatgttaggaaactcttggatagtaaggaggtggtaagcagtcaagtagatgatttaaccagccacaatgagcatctttgtaaagaattgattaaaattgaccaactagcagagcaactcgaaaaagagaaaaattttgtggtggattccgccaacaaggaacttgaagaagccaagattgatctcatttgccagcaaaataatattatagtattggaagatacaataaaaaggcttaaatctacttgattcctttgtcaagactttggaagcagacaaagatcactataagagtgaagctcaacatttgagaaagatgatgcgaagtaggtctaaaagtccaagacgcccatcaccaactgcccggggtgcaaactgtgatgtagaacttttgaagacaacaacaagagatcgtgaagaacttaaatgcatgctggaaaaatatgagcgccatttggcagaaattcagggtaatgtcaaggttcttaaatctgagagagacaagatcttccttctttatgaacaggcacaggaagaaattacccgacttcgacgagaaatgatgaaaagctgtaagagtcctaaatcaacaacggcacatgctattctccggcgagtggagactgaaagagatgtagcctttactgatttacgaagaatgaccacagaacgagatagtctaagggagaggctaaagattgctcaagagacagcatttaatgagaaggctcacctggaacaaaggatagaggagctggagtgtacagttcataatcttgatgatgaacgtatggagcaaatgtcaaatatgactttgatgaaggaaaccataagcactgtggaaaaagaaatgaaatcactagcaagaaaggcaatggataccgaaagtgaacttggcagacaaaaagcagagaataattctttgagacttttgtatgaaaacacagaaaaagatctttctgatactcagcgacaccttgctaagaaaaaatatgagctacagcttactcaggagaaaattatgtgcttggatgaaaaaattgataactttacaaggcaaaatattgcacagcgagaagaaatcagcattcttggtggaaccctcaatgatctggctaaagaaaaggaatgcctgcaagcatgtttggataaaaaatctgagaatattgcatcccttggagagagtttggcaatgaaagaaaagaccatttcaggcatgaagaatatcattgctgagatggaacaggcatcaagacagtgtactgaggccctaattgtgtgtgaacaagacgtttccagaatgcgtcggcaattggatgagacaaatgatgagctggcccagatcgccagggaaagagatatcttggctcatgacaatgacaatctccaggaacagtttgctaaagctaaacaagaaaaccaggcactgtccaaaaaattgaatgacactcataatgaacttaatgacataaaacagaaggttcaagatactaatttggaggttaacaagctgaagaatatattaaagtctgaagaatctgagaaccggcaaatgatggaacaacttcgaaaagccaatgaagatgctgaaaactgggaaaataaagcccgtcaatcagaggcagataacaataccctcaaactggaacttatcactgctgaggcagagggtaacagattaaaagaaaaagtagattccctcaacagagaggttgagcaacacttaaatgcagaaaggtcttacaagtcccagatttctaccttacataaatctgttgtaaaaatggaagaggagcttcagaaggttcagtttgaaaaagtgtccgctcttgcagatttgtcttctactagggaactctgtattaaacttgactcaagcaaagaacttcttaatcgacagctggttgctaaagatcaagaaatagaaatgagggagaatgagttagattctgctcattctgaaattgaactcctgaggagtcagatggcaaatgagagaatctccatgcagaatctagaagctttgctggtggccaatcgagacaaagaatatcagtctcagatagcacttcaagaaaaagaatctgaaattcagcttcttaaagaacacctttgtttggcagaaaataaaatggccatccagagtagagatgtggcccagttcagaaatgttgtcacacaattggaagctgatttagacattaccaaaagacaactaggaacagagcgctttgaaagggagagggccgtacaagaacttcgccgccaaaattattcaagtaatgcttatcatatgagttctacaatgaagccaaatacaaaatgtcattcaccagaacgtgctcaccatcgatctcctgaccgaggcctagatcgatcattagaagagaatctttgctacagagatttctgacacctgaaatgattcttcacatccctgagaaaggtcaaagttacaaactgatttttttttttttgctacatgagtgcatttatcttttaaatgcttggcaatgttaaatgtatttattaactttgtgtctctgaatctctgttctaatgtgccatgttgcagtgatctgagatgacttataaaaacaaaaatgtatatggctctttctatccatgcagtgatagtgagtgtaaaatctgcttacttcactattgaacactattctgttcactatctggagtaaataaagaagcttattaaaacagggaaaagtgtttttacaaaactgctttcctttcctttcttggtatctcaaataattggttggttaattttttttctttgtgatttgtgttttcatggctggaaaatctgtgccaaaatgggtacaacttactgatactggtctgggatctgatattccattttggaaccaaccttacatgaattccatgccataatctgatattgaagcagcagaaagtaggagtgttgtcagggttttaaaacctatagtattgtaccactcaaagactaagtaacatacatattctacaattgtgtttactactactgcttttagaaaggtaggtgatggtatatctgtcaagaatgtaagattttattaaaaatctttatttttaataagttttctttcaagtactgcaatcaacttaattgcgattttattttattgtctgtggcagctgtctgtaatctggagtaataagataagtgatgtttccttcctcccccaatttcctaaatctcttaccttatctatccataggctttgatgtaatgttcatattagagcctgaatgctactgtattttactgatataaactatttgtattcttgccattttaataaaaaaaggcttgtcattaatagta

SEQ ID NO: 190272 - DNA, 2390 bp, Homo sapiens
  Payload ID: 17582
  Gene Name: testis specific, 10
  ENST ID: ENST00000409564
  CDS Start-End: 529-2390
gttaccaccaaagaatatgattttggtctaggggctccagtttctgaagctgaaaactaccagaatactctccagctagaacaagaagtgagaaaccaagatagattcatctcgacactgaaattacagattgaagatctcaaacagacaaatcatggcttggaagaatatgttaggaaactcttggatagtaaggaggtggtaagcagtcaagtagatgatttaaccagccacaatgagcatctttgtaaagaattgattaaaattgaccaactagcagagcaactcgaaaaagagaaaaattttgtggtggattccgccaacaaggaacttgaagaagccaagattgatctcatttgccagcaaaataatattatagtattggaagatacaataaaaaggcttaaatctataattttagatactgaaaaagcacaaaataaatctccttctagacttgattcctttgtcaagactttggaagcagacaaagatcactataagagtgaagctcaacatttgagaaagatgatgcgaagtaggtctaaaagtccaagacgcccatcaccaactgcccggggtgcaaactgtgatgtagaacttttgaagacaacaacaagagatcgtgaagaacttaaatgcatgctggaaaaatatgagcgccatttggcagaaattcagggtaatgtcaaggttcttaaatctgagagagacaagatcttccttctttatgaacaggcacaggaagaaattacccgacttcgacgagaaatgatgaaaagctgtaagagtcctaaatcaacaacggcacatgctattctccggcgagtggagactgaaagagatgtagcctttactgatttacgaagaatgaccacagaacgagatagtctaagggagaggctaaagattgctcaagagacagcatttaatgagaaggctcacctggaacaaaggatagaggagctggagtgtacagttcataatcttgatgatgaacgtatggagcaaatgtcaaatatgactttgatgaaggaaaccataagcactgtggaaaaagaaatgaaatcactagcaagaaaggcaatggataccgaaagtgaacttggcagacaaaaagcagagaataattctttgagacttttgtatgaaaacacagaaaaagatctttctgatactcagcgacaccttgctaagaaaaaatatgagctacagcttactcaggagaaaattatgtgcttggatgaaaaaattgataactttacaaggcaaaatattgcacagcgagaagaaatcagcattcttggtggaaccctcaatgatctggctaaagaaaaggaatgcctgcaagcatgtttggataaaaaatctgagaatattgcatcccttggagagagtttggcaatgaaagaaaagaccatttcaggcatgaagaatatcattgctgagatggaacaggcatcaagacagtgtactgaggccctaattgtgtgtgaacaagacgtttccagaatgcgtcggcaattggatgagacaaatgatgagctggcccagatcgccagggaaagagatatcttggctcatgacaatgacaatctccaggaacagtttgctaaagctaaacaagaaaaccaggcactgtccaaaaaattgaatgacactcataatgaacttaatgacataaaacagaaggttcaagatactaatttggaggttaacaagctgaagaatatattaaagtctgaagaatctgagaaccggcaaatgatggaacaacttcgaaaagccaatgaagatgctgaaaactgggaaaataaagcccgtcaatcagaggcagataacaataccctcaaactggaacttatcactgctgaggcagagggtaacagattaaaagaaaaagtagattccctcaacagagaggttgagcaaagggagaatgagttagattctgctcattctgaaattgaactcctgaggagtcagatggcaaatgagagaatctccatgcagaatctagaagctttgctggtggccaatcgagacaaagaatatcagtctcagatagcacttcaagaaaaagaatctgaaattcagcttcttaaagaacacctttgtttggcagaaaataaaatggccatccagagtagagatgtggcccagttcagaaatgttgtcacacaattggaagctgatttagacattaccaaaagacaactaggaacagagcgctttgaaagggagagggccgtacaagaacttcgccgccaaaattattcaagtaatgcttatcatatgagttctacaatgaagccaaatacaaaatgtcattcaccagaacgtgctcaccatcgatctcctgaccgaggcctagatcgatcattagaaga

SEQ ID NO: 190273 - DNA, 3036 bp, Homo sapiens
  Payload ID: 17582
  Gene Name: testis specific, 10
  Uniprot ID: Q9BZW7
  ENST ID: ENST00000410001
  CDS Start-End: 629-2725
caggtatctaacctatctttgtatttttggaatttaatatagttcctgacataatcattgttcaatgggtctaattttttttttcctttaaaggcatttggatacctttgtgatagaaaaggcccttttcttcatccattgatggtttgatagtgggctgggaaggaaagctgtgttcctccacattaggcagcaaatacttgattgatttgatatttagcttagtcaaattgaagatctcaaacagacaaatcatggcttggaagaatatgttaggaaactcttggatagtaaggaggtggtaagcagtcaagtagatgatttaaccagccacaatgagcatctttgtaaagaattgattaaaattgaccaactagcagagcaactcgaaaaagagaaaaattttgtggtggattccgccaacaaggaacttgaagaagccaagattgatctcatttgccagcaaaataatattatagtattggaagatacaataaaaaggcttaaatctataattttagatactgaaaaagcacaaaataaatctccttctagacttgattcctttgtcaagactttggaagcagacaaagatcactataagagtgaagctcaacatttgagaaagatgatgcgaagtaggtctaaaagtccaagacgcccatcaccaactgcccggggtgcaaactgtgatgtagaacttttgaagacaacaacaagagatcgtgaagaacttaaatgcatgctggaaaaatatgagcgccatttggcagaaattcagggtaatgtcaaggttcttaaatctgagagagacaagatcttccttctttatgaacaggcacaggaagaaattacccgacttcgacgagaaatgatgaaaagctgtaagagtcctaaatcaacaacggcacatgctattctccggcgagtggagactgaaagagatgtagcctttactgatttacgaagaatgaccacagaacgagatagtctaagggagaggctaaagattgctcaagagacagcatttaatgagaaggctcacctggaacaaaggatagaggagctggagtgtacagttcataatcttgatgatgaacgtatggagcaaatgtcaaatatgactttgatgaaggaaaccataagcactgtggaaaaagaaatgaaatcactagcaagaaaggcaatggataccgaaagtgaacttggcagacaaaaagcagagaataattctttgagacttttgtatgaaaacacagaaaaagatctttctgatactcagcgacaccttgctaagaaaaaatatgagctacagcttactcaggagaaaattatgtgcttggatgaaaaaattgataactttacaaggcaaaatattgcacagcgagaagaaatcagcattcttggtggaaccctcaatgatctggctaaagaaaaggaatgcctgcaagcatgtttggataaaaaatctgagaatattgcatcccttggagagagtttggcaatgaaagaaaagaccatttcaggcatgaagaatatcattgctgagatggaacaggcatcaagacagtgtactgaggccctaattgtgtgtgaacaagacgtttccagaatgcgtcggcaattggatgagacaaatgatgagctggcccagatcgccagggaaagagatatcttggctcatgacaatgacaatctccaggaacagtttgctaaagctaaacaagaaaaccaggcactgtccaaaaaattgaatgacactcataatgaacttaatgacataaaacagaaggttcaagatactaatttggaggttaacaagctgaagaatatattaaagtctgaagaatctgagaaccggcaaatgatggaacaacttcgaaaagccaatgaagatgctgaaaactgggaaaataaagcccgtcaatcagaggcagataacaataccctcaaactggaacttatcactgctgaggcagagggtaacagattaaaagaaaaagtagattccctcaacagagaggttgagcaacacttaaatgcagaaaggtcttacaagtcccagatttctaccttacataaatctgttgtaaaaatggaagaggagcttcagaaggttcagtttgaaaaagtgtccgctcttgcagatttgtcttctactagggaactctgtattaaacttgactcaagcaaagaacttcttaatcgacagctggttgctaaagatcaagaaatagaaatgagggagaatgagttagattctgctcattctgaaattgaactcctgaggagtcagatggcaaatgagagaatctccatgcagaatctagaagctttgctggtggccaatcgagacaaagaatatcagtctcagatagcacttcaagaaaaagaatctgaaattcagcttcttaaagaacacctttgtttggcagaaaataaaatggccatccagagtagagatgtggcccagttcagaaatgttgtcacacaattggaagctgatttagacattaccaaaagacaactaggaacagagcgctttgaaagggagagggccgtacaagaacttcgccgccaaaattattcaagtaatgcttatcatatgagttctacaatgaagccaaatacaaaatgtcattcaccagaacgtgctcaccatcgatctcctgaccgaggcctagatcgatcattagaagagaatctttgctacagagatttctgacacctgaaatgattcttcacatccctgagaaaggtcaaagttacaaactgatttttttttttttgctacatgagtgcatttatcttttaaatgcttggcaatgttaaatgtatttattaactttgtgtctctgaatctctgttctaatgtgccatgttgcagtgatctgagatgacttataaaaacaaaaatgtatatggctctttctatccatgcagtgatagtgagtgtaaaatctgcttacttcactattgaacactattctgttcactatctggagtaaataaagaagcttattaaaacagggaaaa

SEQ ID NO: 190274 - DNA, 1589 bp, Homo sapiens
  Payload ID: 17583
  Gene Name: testis specific, 10 interacting protein
  Uniprot ID: Q3SY00
  ENST ID: ENST00000608857
  CDS Start-End: 33-1244
agttctacggtgcggatgggggatggggcaggatggggcaggacaccgatatgctaaatacctaccaacagttggttaggaccccgtcggtgcgaccagggcaggacgtgcggctccaggctccaggaaccagaacggggctgctcaagctgctgtcgaccgtctctcaggacaagcagggctgcctggggagtggtgatggtgtgccaaatcaagacctgcagcagaggtctcagagctcaaggcagacagcaaagaaggaccgcaagcccaggggccagagcaagaaaggacagggctctgaagagtctgaagatcacttcccgcttcttcctcggaaaccctccttccccttccagtgggcctgggagagcatcgccacagatgtccgggctgtgcttcagccaagctccccaacccctggccaccaagccctgcccatgccctcctcgttctcccagcgtcagtccaggcgcaagtccacggccaacctcccagaggcccatggctgctgctggaagacagaggcgcaaaacctgaaggcgagacagcagctgggagcctggggcggtgtctccatccctactggcaaaggggagctaggatcagagccccccagtggtctccagctgcctgggaggaggccaggatcaggatcggcgtccgacaagcaggtccagctgcaaagcctgggtgctgaggaggccgagaggggtctgagttctggggtgctgccccagcgccccaggagggggtcgatctcagaggaggagcaattttcagaggccacagaggaggctgaggagggagagcacaggactccctgcagaaggagggctggttgtcagagaaaggggcagatttctggagaggaagcctccgatgagggagaagtgcagggccagagccaggggagcagccccagcttcaacaacctccgaaggcgacaatggaggaagacaagggccaaggagctgcaggggccatgggacctggagaagctgcacaggcagctacagagagacctggactgtggaagccaccaggagcctgctgcaggcctgggagcggcagcggcaggaggagcggcagcaggccgagctgcggcgggcccggacacagcatgtacagcggcaggtggcccactgcctggcagcctacgcacccagagggagccggggccctggggcggcccagcgcaagctggaggagctgaggcgccaggagcgacagcgctttgctgagtaccaggcggagctgcaaggcatccagcacagggtgcaggcccggcccttcctgttccagcaggctatgcaggccaatgcccggctcaccgtcactcggcgcttctcccaggtgctgtcagcactggggctggatgaggagcagctgctgtctgaggcaggaaaggtggacagagagggcacccccaggaaacccaggagccacaggtcaatgggggtgagaatggagcactctcctcagaggcccccaaggacagaacccaccggcagccagcctgacaggcactacaaccccagcctggacccggagtgcagtccctgagataaaattaaaggctttatggc

SEQ ID NO: 190275 - DNA, 722 bp, Homo sapiens
  Payload ID: 17583
  Gene Name: testis specific, 10 interacting protein
  ENST ID: ENST00000534740
  CDS Start-End: 33-377
agttctacggtgcggatgggggatggggcaggatggggcaggacaccgatatgctaaatacctaccaacagttggttaggaccccgtcggtgcgaccagggcaggacgtgcggctccaggctccaggaaccagaacggggctgctcaagctgctgtcgaccgtctctcaggacaagcaggagcctgctgcaggcctgggagcggcagcggcaggaggagcggcagcaggccgagctgcggcgggcccggacacagcatgtacagcggcaggtggcccactgcctggcagcctacgcacccagagggagccggggccctggggcggcccagcgcaagctggaggagctgaggcgccaggagcgacagcgctttgctgagtaccaggcggagctgcaaggcatccagcacagggtgcaggcccggcccttcctgttccagcaggctatgcaggccaatgcccggctcaccgtcactcggcgcttctcccaggtgctgtcagcactggggctggatgaggagcagctgctgtctgaggcaggaaaggtggacagagagggcacccccaggaaacccaggagccacaggtcaatgggggtgagaatggagcactctcctcagaggcccccaaggacagaacccaccggcagccagcctgacaggcactacaaccccagcctggacccggagtgcagtccctgagataaaattaaaggctttatggc

SEQ ID NO: 190276 - DNA, 563 bp, Homo sapiens
  Payload ID: 17583
  Gene Name: testis specific, 10 interacting protein
  ENST ID: ENST00000528291
  CDS Start-End: 1-150
gatatgctaaatacctaccaacagttggttaggaccccgtcggtgcgaccagggcaggacgtgcggctccaggctccaggaaccagaacggggctgctcaagctgctgtcgaccgtctctcaggacaagcaggtgagggaggcccagtgaggacacttccagctgcctagagccagggctgcctggggagtggtgatggtgtgccaaatcaagacctgcagcagaggtctcagagctcaaggcagacagcaaagaaggaccgcaagcccaggggccagagcaagaaaggacagggctctgaagagtctgaagatcacttcccgcttcttcctcggaaaccctccttccccttccagtgggcctgggagagcatcgccacagatgtccgggctgtgcttcagccaagctccccaacccctggccaccaagccctgcccatgccctcctcgttctcccagcgtcagtccaggcgcaagtccacggccaacctcccagaggcccatggctgctgctggaagacagaggcgcaaaacctgaaggcgagacagcagctgggagcctgg

SEQ ID NO: 190277 - DNA, 1925 bp, Homo sapiens
  Payload ID: 17583
  Gene Name: testis specific, 10 interacting protein
  Uniprot ID: Q3SY00
  ENST ID: ENST00000532620
  CDS Start-End: 232-1902
acacggggagcctgtggatgaggcagaggcaggacttgggcctgggtctctgcgctaaatgactcctgggcatcctgctgaactctctcccagaaggagattggcctcacataccccactgaccccttcctagcatgctttttgccagacccattgagactggctgaggactggttgccatagagatggcctgttaggcagttctacggtgcggatgggggatggggcaggatggggcaggacaccgatatgctaaatacctaccaacagttggttaggaccccgtcggtgcgaccagggcaggacgtgcggctccaggctccaggaaccagaacggggctgctcaagctgctgtcgaccgtctctcaggacaagcagggctgcctggggagtggtgatggtgtgccaaatcaagacctgcagcagaggtctcagagctcaaggcagacagcaaagaaggaccgcaagcccaggggccagagcaagaaaggacagggctctgaagagtctgaagatcacttcccgcttcttcctcggaaaccctccttccccttccagtgggcctgggagagcatcgccacagatgtccgggctgtgcttcagccaagctccccaacccctggccaccaagccctgcccatgccctcctcgttctcccagcgtcagtccaggcgcaagtccacggccaacctcccagaggcccatggctgctgctggaagacagaggcgcaaaacctgaaggcgagacagcagctgggagcctggggcggtgtctccatccctactggcaaaggggagctaggatcagagccccccagtggtctccagctgcctgggaggaggccaggatcaggatcggcgtccgacaagcaggtccagctgcaaagcctgggtgctgaggaggccgagaggggtctgagttctggggtgctgccccagcgccccaggagggggtcgatctcagaggaggagcaattttcagaggccacagaggaggctgaggagggagagcacaggactccctgcagaaggagggctggttgtcagagaaaggggcagatttctggagaggaagcctccgatgagggagaagtgcagggccagagccaggggagcagccccagcttcaacaacctccgaaggcgacaatggaggaagacaagggccaaggagctgcaggggccatgggacctggagaagctgcacaggcagctacagagagacctggactgtggcccccaaaagctgccctggaagactttgagggctgccttccaggcctccaagcggaatggaaaggcctatgcctcgggatacgatgaaactttcgtgtctgccaacctccctaatcgcaccttccacaaacgacaggaagccaccaggagcctgctgcaggcctgggagcggcagcggcaggaggagcggcagcaggccgagctgcggcgggcccggacacagcatgtacagcggcaggtggcccactgcctggcagcctacgcacccagagggagccggggccctggggcggcccagcgcaagctggaggagctgaggcgccaggagcgacagcgctttgctgagtaccaggcggagctgcaaggcatccagcacagggtgcaggcccggcccttcctgttccagcaggctatgcaggccaatgcccggctcaccgtcactcggcgcttctcccaggtgctgtcagcactggggctggatgaggagcagctgctgtctgaggcaggaaaggtggacagagagggcacccccaggaaacccaggagccacaggtcaatgggggtgagaatggagcactctcctcagaggcccccaaggacagaacccaccggcagccagcctgacaggcactacaaccccagcctggacccggagtgcagtccctgagataaaattaaaggctttatggc

SEQ ID NO: 190278 - DNA, 1372 bp, Homo sapiens
  Payload ID: 17584
  Gene Name: testis specific, 13
  Uniprot ID: Q96PP4
  ENST ID: ENST00000356588
  CDS Start-End: 458-1285
cacaaattccctctgtctcctccagaatccagaaaagaataattacgatattttcaaaatggaaagttcccatgccaaagactttgccttcttcaccaaactatgatttcgtgatgttcttaaaggtagtgtacaccaggtttttacattcttattttgaatgtagttttagtgtttgtgtgatttgtttttcagcctggcctgcagactagcaacccaagacttatactgcccaatttgacagctcatttttattttagtttcaccatatacatgaattggacttacaattccagaaaaattaaaggctcaagaatggggcatgagtacacactgtgtgctaaggaaagaatatttggattgaattgaacccctgcagaacgtggactatttagagacctgaatttggccttgggtgaatacctgccttgggttggccaactagcagtcaacagcaatgagccaaaagagacaaaccaagtttcaaaatggcaaatcaaagacttcagaaaatagctcagctaaacgtgagaaaggaatggttgtcaatagcaaagagatttctgatgcagtcgggcaatcaaaatttgttctagagaaccttcggcattacacagtccatccaaatttggcccagtactataagcctttgaaggccactgccctgcagaaattcctggctcaaaacaggaaaaacaccagcttcatgttaaaagtaacacagtatgaccaggataagacgttactgattatgaccaacaacccacctccctgctcaatcacccagcaagacaaggagagtgcatcaaaatatttttccaaggagttactgctcaaggtcatggaaagtcatcatcagcacaaacccactgagaacctctggctgccccgcatgcctcagaaaaaaaagttaagatctaagctgaaaccaatcttccctttgatactgtcggatgatcccacatccaagcgagaacaatggtttaggttttccactgacaatgatttcaagagcgaagggaagtattcaaaagtctacgctttgaggacacagaagaaaatgtaccctcagctcacctttgctccagtccatgagagagatatgaggaaagatgcttccaagaagtcagcgagtgaaaggccaatttccaaagtgattcgggaaccactgacactcgcatcgctcttggaagacatgcccaccagaaccgcgcccggggagagcgccttccgcaacgggagggccccgcagtggattatcaaaaaggccacggtcatcgggtgaacacagacccctcagtcctcccgcctcgctctcttgagactgaggggtccgcagaagtcgccacccaaataaaaccacattcctgct

SEQ ID NO: 190279 - DNA, 2046 bp, Homo sapiens
  Payload ID: 17584
  Gene Name: testis specific, 13
  Uniprot ID: Q96PP4
  ENST ID: ENST00000456951
  CDS Start-End: 853-1680
gaatgcataagatacaaagcactgggaggggggcacaaatatgtttaaaatttacatttccacttttaagggactcacagcttaagaggcagacaagacccgcacataagaaaagtgaaaacagaactacaagacactatacaatgacatgcacaaaacccagtgactatagtctagagtttgggattgcattaatctagaaaatcttctctttaaaggaatgacctgagtagtaacataaagaaagaagattcagggctgggcatggtggctcacgcctgtaatcccagcactttgggaggctgaggtgggtggatcacaaggtcaagagatcgagaccatcctggccaacatggtgaaaccccgtctctactaaaaatacaaaaattagctgggcatggtggcaggcgcctgtagtcccagctactctggaggctgaggcaggaaaatcacttgaaccagggagacagaggttgcagtgaactgagactgtgccactgcactccagccttgtgacagtgtgaggctccgtcagaagaaagagaaggagaaggagaaggagaagattcaaatggctgaagagattggggacagcattttaaaatccagaaaagaataattacgatattttcaaaatggaaagttcccatgccaaagactttgccttcttcaccaaactatgatttcgtgatgttcttaaaggctcaagaatggggcatgagtacacactgtgtgctaaggaaagaatatttggattgaattgaacccctgcagaacgtggactatttagagacctgaatttggccttgggtgaatacctgccttgggttggccaactagcagtcaacagcaatgagccaaaagagacaaaccaagtttcaaaatggcaaatcaaagacttcagaaaatagctcagctaaacgtgagaaaggaatggttgtcaatagcaaagagatttctgatgcagtcgggcaatcaaaatttgttctagagaaccttcggcattacacagtccatccaaatttggcccagtactataagcctttgaaggccactgccctgcagaaattcctggctcaaaacaggaaaaacaccagcttcatgttaaaagtaacacagtatgaccaggataagacgttactgattatgaccaacaacccacctccctgctcaatcacccagcaagacaaggagagtgcatcaaaatatttttccaaggagttactgctcaaggtcatggaaagtcatcatcagcacaaacccactgagaacctctggctgccccgcatgcctcagaaaaaaaagttaagatctaagctgaaaccaatcttccctttgatactgtcggatgatcccacatccaagcgagaacaatggtttaggttttccactgacaatgatttcaagagcgaagggaagtattcaaaagtctacgctttgaggacacagaagaaaatgtaccctcagctcacctttgctccagtccatgagagagatatgaggaaagatgcttccaagaagtcagcgagtgaaaggccaatttccaaagtgattcgggaaccactgacactcgcatcgctcttggaagacatgcccaccagaaccgcgcccggggagagcgccttccgcaacgggagggccccgcagtggattatcaaaaaggccacggtcatcgggtgaacacagacccctcagtcctcccgcctcgctctcttgagactgaggggtccgcagaagtcgccacccaaataaaaccacattcctgctgctgcgggcgtgggctcccgggtcgcaagccgggagggtcgagccgaagtctccggcgggccgcaagaggagaagggggcgtggctgcgtcccgggggccgagggcggccggggagggcgggccttggccccgagtgaaggcgcggcggcccaaccggcgtgagagcgcggggccggccttcctgcagcctcttccgctcgccggctgcggcgcctgggacggttgcggtgggtctgggcgctgggaagtcgtccaagatgattaaaaaattcgacaag

SEQ ID NO: 190280 - DNA, 567 bp, Homo sapiens
  Payload ID: 17584
  Gene Name: testis specific, 13
  ENST ID: ENST00000438346
  CDS Start-End: 394-567
attcatcacaaattccctctgtctcctccagaatccagaaaagaataattacgatattttcaaaatggaaagttcccatgccaaagactttgccttcttcaccaaactatgatttcgtgatgttcttaaagcctggcctgcagactagcaacccaagacttatactgcccaatttgacagctcatttttattttagtttcaccatatacatgaattggacttacaattccagaaaaattaaaggctcaagaatggggcatgagtacacactgtgtgctaaggaaagaatatttggattgaattgaacccctgcagaacgtggactatttagagacctgaatttggccttgggtgaatacctgccttgggttggccaactagcagtcaacagcaatgagccaaaagagacaaaccaagtttcaaaatggcaaatcaaagacttcagaaaatagctcagctaaacgtgagaaaggaatggttgtcaatagcaaagagatttctgatgcagtcgggcaatcaaaatttgttctagagaaccttcggcattacacagtccatccaaatttg

SEQ ID NO: 190281 - DNA, 548 bp, Homo sapiens
  Payload ID: 17584
  Gene Name: testis specific, 13
  ENST ID: ENST00000443954
  CDS Start-End: 320-548
aaattccctctgtctcctccagaatccagaaaagaataattacgatattttcaaaatggaaagttcccatgccaaagactttgccttcttcaccaaactatgatttcgtgatgttcttaaagtttcaccatatacatgaattggacttacaattccagaaaaattaaaggctcaagaatggggcatgagtacacactgtgtgctaaggaaagaatatttggattgaattgaacccctgcagaacgtggactatttagagacctgaatttggccttgggtgaatacctgccttgggttggccaactagcagtcaacagcaatgagccaaaagagacaaaccaagtttcaaaatggcaaatcaaagacttcagaaaatagctcagctaaacgtgagaaaggaatggttgtcaatagcaaagagatttctgatgcagtcgggcaatcaaaatttgttctagagaaccttcggcattacacagtccatccaaatttggcccagtactataagcctttgaaggccactgccctgcagaaattcctggctcaaa

SEQ ID NO: 190282 - DNA, 1079 bp, Homo sapiens
  Payload ID: 17585
  Gene Name: testis, prostate and placenta expressed
  Uniprot ID: Q6URK8
  ENST ID: ENST00000290871
  CDS Start-End: 38-934
ggttgctaaggagtgggtgcctcagaatcaggctgcaatgggcattgtctgtgcacaatgttcctttattctgctgctgtccataataagggctcgtccacctcccttcctcttctgcccattgagcagtcaaagaactgaaagtccttataagcctgtgcacctgggcctgggccctacagataaggtagctgctattgctatggcccgcatcattgacctggtgccctgggacgatggctccacacatgtgtatgcctccccggccatcctgcttcccatggagcggcagcgcaaccagctggcgggcgtgaagcagcagctctaccacccagccctgcccaccctgcgccacatggacagggacaccgtcaaggcctgccttcctgatgagcactgccagtccaccacctactgccgcaaagatgaatttgacaacgcccattttacactccttggggtccccaacaaacccctgcagtgtttggacatcaccgccacaggccagaagcttcgcaacaggtaccacgagggaaagctggcgcccatcgcgccaggcatcaaccgagtggactggccctgcttcacgcgcgccatcgaggactggtcccacttcgtgtcctcggccggggagttcaagctgccttgcctgaggaagcgagcggagggtctcagcggctacgcggtgcggtacttgaagcccgacgtgacccagacctggcggcaggaagccctgtgtggggcgtgggcagggcgtccgtgctcccccgactcaccgcgcccctatccctgctgcccgcctcagtactgcctcagccagaaccccagcctggaccgctacggacagaagcccctgcctttcgactccctgaacactttccgaagcttcggctccagctacagtcgtgtcaactacctgaccccctggcattaatctctggaaaggaggctgactcccaggctgccggacggtgccacctcaggtcccctggccagacagaggacttatggtggcaccagccatctccccaggagttcagcctaactagaaataaacctaatgctcccttagagacaca

SEQ ID NO: 190283 - DNA, 998 bp, Homo sapiens
  Payload ID: 17585
  Gene Name: testis, prostate and placenta expressed
  Uniprot ID: Q6URK8
  ENST ID: ENST00000441824
  CDS Start-End: 38-853
ggttgctaaggagtgggtgcctcagaatcaggctgcaatgggcattgtctgtgcacaatgttcctttattctgctgctgtccataataagggctcgtccacctcccttcctcttctgcccattgagcagtcaaagaactgaaagtccttataagcctgtgcacctgggcctgggccctacagataaggtagctgctattgctatggcccgcatcattgacctggtgccctgggacgatggctccacacatgtgtatgcctccccggccatcctgcttcccatggagcggcagcgcaaccagctggcgggcgtgaagcagcagctctaccacccagccctgcccaccctgcgccacatggacagggacaccgtcaaggcctgccttcctgatgagcactgccagtccaccacctactgccgcaaagatgaatttgacaacgcccattttacactccttggggtccccaacaaacccctgcagtgtttggacatcaccgccacaggccagaagcttcgcaacaggtaccacgagggaaagctggcgcccatcgcgccaggcatcaaccgagtggactggccctgcttcacgcgcgccatcgaggactggtcccacttcgtgtcctcggccggggagttcaagctgccttgcctgaggaagcgagcggagggtctcagcggctacgcggtgcggtacttgaagcccgacgtgacccagacctggcggtactgcctcagccagaaccccagcctggaccgctacggacagaagcccctgcctttcgactccctgaacactttccgaagcttcggctccagctacagtcgtgtcaactacctgaccccctggcattaatctctggaaaggaggctgactcccaggctgccggacggtgccacctcaggtcccctggccagacagaggacttatggtggcaccagccatctccccaggagttcagcctaactagaaataaacctaatgctcccttagagacaca

SEQ ID NO: 190284 - DNA, 2421 bp, Homo sapiens
  Payload ID: 17586
  Gene Name: testis-specific kinase 1
  Uniprot ID: Q15569
  ENST ID: ENST00000336395
  CDS Start-End: 251-2131
caccgccaccgcccggtccaggcccaagcccaggccctgcgcggagcggagcggcgcggcgtccacccgggcccagccagccggcgcggcgggggcgggtccaggatcttcggcggatcttccattctcagggcgggagccggagtccgggcgcccgggatcgggctgggcccgcgcccatggcaagcgcggcctgcccgggccctggggaccctgccatgtgaggcaggcccgggctgggggcccggccatggccggggaacggcccccactgcggggccctgggcccgggcctggagaggtgccgggggaggggcccccggggccggggggcacgggcggaggcccgggccggggccgcccctcctcctaccgggctctccgcagcgccgtgtctagcctggcgcgtgtggacgattttcactgcgcggagaagatcggggccggcttcttctctgaggtctacaaggttcggcaccgacagtcagggcaagtcatggtgctgaagatgaacaagctccccagtaaccggggcaacacactacgggaagtgcagctgatgaaccggctcaggcaccccaacatcctaaggttcatgggagtctgtgtgcaccagggacagctgcacgctcttacagagtatatgaatggggggacattggaacagctgctcagctcccctgaacccctgtcctggccggtcaggctccacctggccctggacattgcccgaggcctgcggtacctgcactccaaaggtgtatttcaccgcgacctcacatccaagaactgtctagtccgacgggaagatcgaggcttcaccgctgtcgtgggtgacttcgggctggccgaaaagattcctgtgtatagggagggggcaaggaaggagccattggccgtggtgggctccccatactggatggctccagaggtgttacggggtgagctgtatgatgagaaggctgatgtctttgccttcgggattgtcctctgtgagctcatcgcccgagtacctgcagaccctgactacctaccacgcactgaggactttggcctggatgtgcctgctttccgaactctggtgggggatgactgcccactgcctttcttgctcctggccatccactgctgcaacctggaacccagcacccgtgcccccttcaccgaaattacccagcacctggaatggatcctggagcagctgcctgagccagccccactcaccaggaccgccctgacacacaatcagggctctgttgcaagagggggtccctctgccacgcttcccaggccagatccccggctttcccgaagccggtcagacctcttcctgcccccatcaccagaatcaccccccaactggggggacaatctgactcgagtcaaccccttctcactacgggaagacctcaggggtggcaagatcaagctcttagacacacccagcaagccagtcctgcctcttgtgccaccatcaccattcccatccactcagctgcccttggtgaccactccggagaccctggtccagcctgggacacctgcccgccgctgccgctcactaccctcatcccccgagctcccccgccgtatggagacagcactgccaggtcctggccctcccgctgtgggcccctcggctgaagagaagatggagtgcgagggcagcagccctgagccggaacctccagggccagcgccccagctgcctctggctgtggccacagacaacttcatcagcacctgttcctcggcctcccaaccctggtcccctagatcaggacccgtcctcaataacaatcccccagctgtggtggtgaactccccacaaggctgggctggggagccctggaaccgggcccagcatagcctgccccgggcggcagccctggagcggacagaaccctcgccacccccttcagctccccgggagcccgatgaggggctgccctgtcctggctgctgcctcggccccttcagctttggcttcctgtccatgtgcccccgccccacaccagctgttgcccgctaccgcaacctgaactgtgaggcgggcagtctcctctgccaccgagggcaccacgccaagccacccacacccagcctgcagctgcctggggcacgctcttagcagtggagcccgtggtctcaggcctccaactttggccttcaggacaccctgtaagaacagagcacacttgctggacagtgccagttccagatgggctgaccggctcttctccccgtgtaggggagccccagcatggactcaagggacagagcacttccagtcgaccccccggctcgcgttcccgtggggatcactgaaccagacacagcattgctgacacatgagactaacacgtgcaattatttaaaaagatttcaataaaactgcctggctggctccgggccgcccct

SEQ ID NO: 190285 - DNA, 2438 bp, Homo sapiens
  Payload ID: 17586
  Gene Name: testis-specific kinase 1
  Uniprot ID: Q15569
  ENST ID: ENST00000620767
  CDS Start-End: 268-2148
ccgcccgcccgcctccgcccgcggcaagccagcccgccggcgccccggagcgctgccgccaccgtcaccgccaccgcccggtccaggcccaagcccaggccctgcgcggagcggagcggcggatcttcggcggatcttccattctcagggcgggagccggagtccgggcgcccgggatcgggctgggcccgcgcccatggcaagcgcggcctgcccgggccctggggaccctgccatgtgaggcaggcccgggctgggggcccggccatggccggggaacggcccccactgcggggccctgggcccgggcctggagaggtgccgggggaggggcccccggggccggggggcacgggcggaggcccgggccggggccgcccctcctcctaccgggctctccgcagcgccgtgtctagcctggcgcgtgtggacgattttcactgcgcggagaagatcggggccggcttcttctctgaggtctacaaggttcggcaccgacagtcagggcaagtcatggtgctgaagatgaacaagctccccagtaaccggggcaacacactacgggaagtgcagctgatgaaccggctcaggcaccccaacatcctaaggttcatgggagtctgtgtgcaccagggacagctgcacgctcttacagagtatatgaatggggggacattggaacagctgctcagctcccctgaacccctgtcctggccggtcaggctccacctggccctggacattgcccgaggcctgcggtacctgcactccaaaggtgtatttcaccgcgacctcacatccaagaactgtctagtccgacgggaagatcgaggcttcaccgctgtcgtgggtgacttcgggctggccgaaaagattcctgtgtatagggagggggcaaggaaggagccattggccgtggtgggctccccatactggatggctccagaggtgttacggggtgagctgtatgatgagaaggctgatgtctttgccttcgggattgtcctctgtgagctcatcgcccgagtacctgcagaccctgactacctaccacgcactgaggactttggcctggatgtgcctgctttccgaactctggtgggggatgactgcccactgcctttcttgctcctggccatccactgctgcaacctggaacccagcacccgtgcccccttcaccgaaattacccagcacctggaatggatcctggagcagctgcctgagccagccccactcaccaggaccgccctgacacacaatcagggctctgttgcaagagggggtccctctgccacgcttcccaggccagatccccggctttcccgaagccggtcagacctcttcctgcccccatcaccagaatcaccccccaactggggggacaatctgactcgagtcaaccccttctcactacgggaagacctcaggggtggcaagatcaagctcttagacacacccagcaagccagtcctgcctcttgtgccaccatcaccattcccatccactcagctgcccttggtgaccactccggagaccctggtccagcctgggacacctgcccgccgctgccgctcactaccctcatcccccgagctcccccgccgtatggagacagcactgccaggtcctggccctcccgctgtgggcccctcggctgaagagaagatggagtgcgagggcagcagccctgagccggaacctccagggccagcgccccagctgcctctggctgtggccacagacaacttcatcagcacctgttcctcggcctcccaaccctggtcccctagatcaggacccgtcctcaataacaatcccccagctgtggtggtgaactccccacaaggctgggctggggagccctggaaccgggcccagcatagcctgccccgggcggcagccctggagcggacagaaccctcgccacccccttcagctccccgggagcccgatgaggggctgccctgtcctggctgctgcctcggccccttcagctttggcttcctgtccatgtgcccccgccccacaccagctgttgcccgctaccgcaacctgaactgtgaggcgggcagtctcctctgccaccgagggcaccacgccaagccacccacacccagcctgcagctgcctggggcacgctcttagcagtggagcccgtggtctcaggcctccaactttggccttcaggacaccctgtaagaacagagcacacttgctggacagtgccagttccagatgggctgaccggctcttctccccgtgtaggggagccccagcatggactcaagggacagagcacttccagtcgaccccccggctcgcgttcccgtggggatcactgaaccagacacagcattgctgacacatgagactaacacgtgcaattatttaaaaagatttcaataaaactgcctggctggctccgggccgcccct

SEQ ID NO: 190286 - DNA, 2600 bp, Homo sapiens
  Payload ID: 17587
  Gene Name: testis-specific kinase 2
  Uniprot ID: Q96S53
  ENST ID: ENST00000372084
  CDS Start-End: 15-1643
tgattatttagactatggatcggagcaaacggaattcaattgcaggatttcctccacgtgtggagcgtcttgaagagtttgaaggaggtggtggaggagaaggaaatgtgagccaggtgggaagagtttggccatcttcgtatcgagctcttataagtgccttttccagactgacgcgtttggatgatttcacctgtgaaaaaatagggtctggcttcttttctgaagtgttcaaggtacgacaccgagcttctggtcaggtgatggctcttaagatgaacacattgagcagtaaccgggcaaacatgctgaaagaagtacagctcatgaatagactctcccatcccaacatccttaggttcatgggtgtatgtgttcatcaaggacaattgcatgcacttacagagtatatcaactccgggaacctggaacagttgctagacagtaacctgcatttgccttggactgtgagggtaaaactggcctatgacatagcagtgggcctcagctaccttcacttcaaaggcatttttcatcgggacctcacatctaagaactgcctgataaagagggatgagaatggttactctgcagtggtagctgactttggcctggctgagaagatccccgatgtcagcatggggagtgagaagctggccgtggtgggttccccattctggatggcacctgaggttctccgagatgagccctataatgaaaaggcagatgtgttctcttatggtatcatcctctgcgagatcatcgcccgcatccaggccgatccggactatcttccccgcacagagatggatcccaaactgcgcccatcttttgtggagattgggaagaccctggaggaaattctgagccgcctacaggaagaagagcaggagagggataggaagctgcagcccacagccaggggactcttggagaaagcacctggggtgaagcgactaagctcactggatgacaagatcccccacaagtcaccatgcccaagacgtaccatctggctgtctcgaagccagtcagatatcttttcccgtaagcccccacgtacagtgagtgtcttggacccatactaccggccacgagatggtgctgcccgcacccccaaagtcaacccttttagtgctcgccaggacctcatggggggcaagatcaagttttttgacctgcccagcaagtctgtcatctctctggtatttgacctggatgcaccagggcccggaactatgcccctggctgactggcaggagcccctggccccacctattcgccggtggcgttccttgcctggttcgcctgagttcttgcatcaagaggcttgtccatttgtgggccgggaagaatcgctatctgatgggcccccaccacgcctaagtagtctcaagtacagagttaaagagatcccaccattccgggcatctgccctaccagctgctcaagcccatgaggctatggactgctccattctccaggaagaaaatggttttgggtccaggccccaggggaccagtccatgccctgcgggtgcttctgaggagatggaggtagaagaaaggccagcaggctcaactccagccaccttctccacctcaggcataggcctgcaaacccagggaaagcaggatgggtgagggggtttagtccctgcctcaccttggggatggaccttcagctgaaaccatatggccccctaggtgcacagccttgattcttccctggagcctacagagcaggcaggctaggccaagccaggctcaacttctgggctcccagtgcccattggctgtgtatgacgggaggcagcagtgagaggccttcctagttagggccaacagctgataccaagcctctgaaatccagcaaggaggtctgcctcccaccagaccctctccagtgtacttccccagataggaccagaggatgtctagttctaggctgagctggcaggcagctattaccccggttctttccccaccccaggtctgtctcttgccttttcttggggcatataagctactgagtggaacatggagctgatcaagaggccgtaatggtcatggctgtttcccagacctgaatattggggtgcttcttgccagtattctaagacatttgagtaattgctgtttgcacttactgcatggtcagaccacgtcactacatttctatgcaaggggacagcaaggcagcgtggtggtcatggctcttagctaacctattcaaagaccttttcctgttgattaatctattttcatatttataaaggagtcttaatgttctgccccataagactttcaaccttgtggttgggagtggggctggttttgtaggccctagggcctgcttctatgtatttatcaacatgtgatacattcaattggttaaatggtttatacagggactgatttgcttcccttcctgccatggctggagctttgggaacagtctgtccttacagagctgcaataagaaataaccaaagatgaagctggtcaaatattttcataacttgcttctgttgatttttttttttgtaaaactttcccaagacattttcagacttaaaaataaagtcagtgttacaggtg

SEQ ID NO: 190287 - DNA, 3074 bp, Homo sapiens
  Payload ID: 17587
  Gene Name: testis-specific kinase 2
  Uniprot ID: Q96S53
  ENST ID: ENST00000372086
  CDS Start-End: 402-2117
agtctttcgcggcccgggagctcagcagagctaccagctgccctgttggcttcgctggtcggatcgtcctcctggccccgccaaacaggcggggggagcggccccgactgtggggccatggcagtagtctcctcgttcgccgccgccgctagcctagctgagtcgccggcttctgcgctaggggctcccaccgcctccgcaggctaaggagccgctgccaccaacgagctgtgagggttactatgctccctctttgccgccgtctcctcctcttgcccgcgcaggcacccctctggctgctcagtcctgcctcagtgtcaaaccagaagagaagtaaaattcaacaaaaatttatgtgtggagttccttcttaaaagaagaaaaaagtgattatttagactatggatcggagcaaacggaattcaattgcaggatttcctccacgtgtggagcgtcttgaagagtttgaaggaggtggtggaggagaaggaaatgtgagccaggtgggaagagtttggccatcttcgtatcgagctcttataagtgccttttccagactgacgcgtttggatgatttcacctgtgaaaaaatagggtctggcttcttttctgaagtgttcaaggtacgacaccgagcttctggtcaggtgatggctcttaagatgaacacattgagcagtaaccgggcaaacatgctgaaagaagtacagctcatgaatagactctcccatcccaacatccttaggttcatgggtgtatgtgttcatcaaggacaattgcatgcacttacagagtatatcaactccgggaacctggaacagttgctagacagtaacctgcatttgccttggactgtgagggtaaaactggcctatgacatagcagtgggcctcagctaccttcacttcaaaggcatttttcatcgggacctcacatctaagaactgcctgataaagagggatgagaatggttactctgcagtggtagctgactttggcctggctgagaagatccccgatgtcagcatggggagtgagaagctggccgtggtgggttccccattctggatggcacctgaggttctccgagatgagccctataatgaaaaggcagatgtgttctcttatggtatcatcctctgcgagatcatcgcccgcatccaggccgatccggactatcttccccgcacagagaatttcgggctggactatgatgctttccagcacatggtgggagactgtcccccagattttctgcaacttactttcaactgctgtaacatggatcccaaactgcgcccatcttttgtggagattgggaagaccctggaggaaattctgagccgcctacaggaagaagagcaggagagggataggaagctgcagcccacagccaggggactcttggagaaagcacctggggtgaagcgactaagctcactggatgacaagatcccccacaagtcaccatgcccaagacgtaccatctggctgtctcgaagccagtcagatatcttttcccgtaagcccccacgtacagtgagtgtcttggacccatactaccggccacgagatggtgctgcccgcacccccaaagtcaacccttttagtgctcgccaggacctcatggggggcaagatcaagttttttgacctgcccagcaagtctgtcatctctctggtatttgacctggatgcaccagggcccggaactatgcccctggctgactggcaggagcccctggccccacctattcgccggtggcgttccttgcctggttcgcctgagttcttgcatcaagaggcttgtccatttgtgggccgggaagaatcgctatctgatgggcccccaccacgcctaagtagtctcaagtacagagttaaagagatcccaccattccgggcatctgccctaccagctgctcaagcccatgaggctatggactgctccattctccaggaagaaaatggttttgggtccaggccccaggggaccagtccatgccctgcgggtgcttctgaggagatggaggtagaagaaaggccagcaggctcaactccagccaccttctccacctcaggcataggcctgcaaacccagggaaagcaggatgggtgagggggtttagtccctgcctcaccttggggatggaccttcagctgaaaccatatggccccctaggtgcacagccttgattcttccctggagcctacagagcaggcaggctaggccaagccaggctcaacttctgggctcccagtgcccattggctgtgtatgacgggaggcagcagtgagaggccttcctagttagggccaacagctgataccaagcctctgaaatccagcaaggaggtctgcctcccaccagaccctctccagtgtacttccccagataggaccagaggatgtctagttctaggctgagctggcaggcagctattaccccggttctttccccaccccaggtctgtctcttgccttttcttggggcatataagctactgagtggaacatggagctgatcaagaggccgtaatggtcatggctgtttcccagacctgaatattggggtgcttcttgccagtattctaagacatttgagtaattgctgtttgcacttactgcatggtcagaccacgtcactacatttctatgcaaggggacagcaaggcagcgtggtggtcatggctcttagctaacctattcaaagaccttttcctgttgattaatctattttcatatttataaaggagtcttaatgttctgccccataagactttcaaccttgtggttgggagtggggctggttttgtaggccctagggcctgcttctatgtatttatcaacatgtgatacattcaattggttaaatggtttatacagggactgatttgcttcccttcctgccatggctggagctttgggaacagtctgtccttacagagctgcaataagaaataaccaaagatgaagctggtcaaatattttcataacttgcttctgttgatttttttttttgtaaaactttcccaagacattttcagacttaaaaataaagtcagtgttacaggtg

SEQ ID NO: 190288 - DNA, 2478 bp, Homo sapiens
  Payload ID: 17588
  Gene Name: testis-specific serine kinase 1B
  Uniprot ID: Q9BXA7
  ENST ID: ENST00000390666
  CDS Start-End: 193-1296
ttcactcgctgaagtcatctgggagacagtgccaaatgttccactccagagtcttggcctctaggaggcaggaacagcaggcctggccagcccaaaggactctctatccaggatgtaaatgagcacactgctggcccatgcgcctcggggctgtagagggcagcctcagaggcactgggcattcctggcaccatggatgacgctgctgtcctcaagcgacgaggctacctcctggggataaatttaggagagggctcctatgcaaaagtaaaatctgcttactctgagcgcctgaagttcaatgtggcgatcaagatcatcgaccgcaagaaggcccccgcagacttcttggagaaattccttccccgggaaattgagattctggccatgttaaaccactgctccatcattaagacctacgagatctttgagacatcacatggcaaggtctacatcgtcatggagctcgcggtccagggcgacctcctcgagttaatcaaaacccggggagccctgcatgaggacgaagctcgcaagaagttccaccagctttccttggccatcaagtactgccacgacctggacgtcgtccaccgggacctcaagtgtgacaaccttctccttgacaaggacttcaacatcaagctgtccgacttcagcttctccaagcgctgcctgcgggatgacagtggtcgaatggcattaagcaagaccttctgtgggtcaccagcgtatgcggccccagaggtgctgcagggcattccctaccagcccaaggtgtacgacatctggagcctaggcgtgatcctctacatcatggtctgcggctccatgccctacgacgactccaacatcaagaagatgctgcgtatccagaaggagcaccgcgtcaacttcccacgctccaagcacctgacaggcgagtgcaaggacctcatctaccacatgctgcagcccgacgtcaaccggcggctccacatcgacgagatcctcagccactgctggatgcagcccaaggcacggggatctccctctgtggccatcaacaaggagggggagagttcccggggaactgaacccttgtggacccccgaacctggctctgacaagaagtctgccaccaagctggagcctgagggagaggcacagccccaggcacagcctgagacaaaacccgaggggacagcaatgcaaatgtccaggcagtcggagatcctgggtttccccagcaagccgtcgactatggagacagaggaagggcccccccaacagcctccagagacgcgggcccagtgagcttcttgcggcccagggaatgagatggagctcacggcttaaagcccaagctctgaagaagtcaagggtggagccagagaaggaaggcagtcccagatgagcctctattttcatcagcttcttctctctccccttgaacttggtaacccacatggttctcccgtggcccctaggtggatgaggccaaagtcaaatccaaggctgagacagtcgtgcgactcctactcccccagagcgtgacccggagcaggtgctggacacagagcctgtctcagcagagggtccccactggccgcaacggctcagtgacagcaagagcaggaagagcagcaggaaggcaccgctgtccaccttgggcaccatttatcctcctttcatcgtccccggggcagttgcgtgaccctgctgggaggccagaccgggccagactgagggtcaggggaccaggctgggttgggggttgggtggggctggacggggacgaggcgcggagaggcggcgggaaagagcttcggctgggccacgggctcgcgggcactctcggcggcagcctcgggggctccgactccagctctgggcaagatccataaacttttaaagaagcctcaaaacatacttttaaagcattaagctttaaagtgctagaaatcttgtgccccatatgtgcttctttcagtattatcctagatcctcaggagtagcatggcaactggagaaaatgggaggaaagacaagaagaaatagaagctgatttaacatcaagtttattcagttttgatttttcttatctctactggctttctcctgttcaaaccttgcagcgataatatttggaaaagagcacttggaaattatattcctgtttttaactctttatatttaatcattctccttgtaattgattttgtagctaatttactccccagcacccccagaagaaaattttacaaaggaaaatgttttatttttattttttccttatcaactttttatttaaatgctaatatccaattaatggacaaacgaatcagctaatactggaaacaatgtaacaatagtgaaaagcatgaacttttgatttctatagaccgaatttgactctgctactaaatgatcttgggcaagttggttaatctatatgtctcagtttctttatctataaaatgagaataatacaacttc

SEQ ID NO: 190289 - DNA, 1816 bp, Homo sapiens
  Payload ID: 17589
  Gene Name: testis-specific serine kinase 2
  Uniprot ID: Q96PF2
  ENST ID: ENST00000399635
  CDS Start-End: 593-1669
tcaatggtaaggcagtgctgtggaaatctgtctgtgtaactggggtgctatgcaggcctgtctgggtgactgtcagggacaactgtcctaccacaccaaggacacagccctgggggtgcttttcttcatagccaaagaagctgcaggaaacccaccctagtgggacaaagaccaatgcagggtcagtccccacagccaggtgatgcaaacaggctggacgtgggccgcctcccctccagcttgacttgtgacagggaaaccaatgcagcagcagcagggccaccagagtcctgtcctggggacaggcttccttccagcgggcggggagtgggtgctcctgccagaccagcctggcttccacggttccagagaccctgttctccctcagcccagtccccgcccccactccttggctttatgagttcattggctgaagtcacccggagacaatgctgagtgttccacccctgagtcgaagcccagcccagggcagcccagccagacgcctccggtagtgtaaatgaggacaatgcctgctggcccacatgacggggggatgtagacggcagcggcgccagtcgctcctggcaccatggacgatgccacagtcctaaggaagaagggttacatcgtaggcatcaatcttggcaagggttcctacgcaaaagtcaaatctgcctactctgagcgcctcaagttcaatgtggctgtcaagatcatcgaccgcaagaaaacacctactgactttgtggagagattccttcctcgggagatggacatcctggcaactgtcaaccacggctccatcatcaagacttacgagatctttgagacctctgacggacggatctacatcatcatggagcttggcgtccagggcgacctcctcgagttcatcaagtgccagggagccctgcatgaggacgtggcacgcaagatgttccgacagctctcctccgccgtcaagtactgccacgacctggacatcgtccaccgggacctcaagtgcgagaaccttctcctcgacaaggacttcaacatcaagctgtctgactttggcttctccaagcgctgcctgcgggacagcaatgggcgcatcatcctcagcaagaccttctgcgggtcggcagcatatgcagcccccgaggtgctgcagagcatcccctaccagcccaaggtgtatgacatctggagcctgggcgtgatcctgtacatcatggtctgcggctccatgccctatgacgactccgacatcaggaagatgctgcgtatccagaaggagcaccgtgtggacttcccgcgctccaagaacctgacctgcgagtgcaaggacctcatctaccgcatgctgcagcccgacgtcagccagcggctccacatcgatgagatcctcagccactcgtggctgcagccccccaagcccaaagccacgtcttctgcctccttcaagagggagggggagggcaagtaccgcgctgagtgcaaactggacaccaagacaggcttgaggcccgaccaccggcccgaccacaagcttggagccaaaacccagcaccggctgctggtggtgcccgagaacgagaacaggatggaggacaggctggccgagacctccagggccaaagaccatcacatctccggagctgaggtggggaaagcaagcacctagcatgacaatggccccgttgtgtgtggtgggggtcggggttggggggcatggtgcagtcggccttcacgtaaactaagtaggcaggtaggatctgaagaaggcacaggtgcaagtaaaattcgtcaattaaaccactattttgattac

SEQ ID NO: 190290 - DNA, 1368 bp, Homo sapiens
  Payload ID: 17590
  Gene Name: testis-specific serine kinase 3
  Uniprot ID: Q96PN8
  ENST ID: ENST00000373534
  CDS Start-End: 506-1312
cggggactggaggcctctggccatggcgcctggagacggggtcgcgcagaccccggacacccgaggggggcgcagcaggccagggcaacccgccgcgaggcggcgtccacgccgaggagccgcgcattcccggtccacacagacgcggcggagcgccctcccaggcgggactacaactcaatgcctggcacgggggcgggctcggcggtgacttaatccgggctgagtttggtggtggtagtgagggcaggtaggggcactgcccattttggccaagggtcacacagcatctacatcacaattgcaccggagtttaaaaatgtctggccctgtccctccccaccacccgccgctgtgtccagacagagaatgttctaacgctgggggcggctgcggatgaagtccttggggagaaaaggagcaggccaagggcgatggtggagtagagctgcctctcagaggcagcatgagctgagagggtgataggaaggcggcgctagacagcatggaggactttctgctctccaatgggtaccagctgggcaagaccattggggaagggacctactcaaaagtcaaagaagcattttccaaaaaacaccaaagaaaagtggcaattaaagttatagacaagatgggagggccagaagagtttatccagagattcctccctcgggagctccaaatcgtccgtaccctggaccacaagaacatcatccaggtgtatgagatgctggagtctgccgacgggaaaatctgcctggtgatggagctcgctgagggaggggatgtctttgactgcgtgctgaatggggggccactgcctgaaagccgggccaaggccctcttccgtcagatggttgaggccatccgctactgccatggctgtggtgtggcccaccgggacctcaaatgtgagaacgccttgttgcagggcttcaacctgaagctgactgactttggctttgccaaggtgttgcccaagtcacaccgggagctgagccagaccttctgcggcagtacagcctatgctgcccccgaggtgctgcagggcattccccacgatagcaaaaaaggtgatgtctggagcatgggtgtggtcctgtatgtcatgctctgtgccagcctaccttttgacgacacagacatccccaagatgctgtggcagcagcagaagggggtgtccttccccactcatctgagcatctcggccgattgccaggacctgctcaagaggctcctggaacccgatatgatcctccggccttcaattgaagaagttagttggcatccatggctagcaagcacttgataaaagcaatggcaagtgctctccaataaagtagggggagaaagcaaacccaaaaa

SEQ ID NO: 190291 - DNA, 273 bp, Homo sapiens
  Payload ID: 17590
  Gene Name: testis-specific serine kinase 3
  ENST ID: ENST00000574315
  CDS Start-End: 169-273
agaagaggaaactgaggttcacaatcgggcagtgaaaagccaaaagtaaaacctaggctttctacaactctgcctgctcctacaaaagagtttatccagagattcctccctcgggagctccaaatcgtccgtaccctggaccacaagaacatcatccaggtgtatgagatgctggagtctgccgacgggaaaatctgcctggtgatggagctcgctgagggaggggatgtctttgactgcgtgctgaatggggggccactgcctgaaagccgg

SEQ ID NO: 190292 - DNA, 1257 bp, Homo sapiens
  Payload ID: 17591
  Gene Name: testis-specific serine kinase 4
  Uniprot ID: Q6SA08
  ENST ID: ENST00000287913
  CDS Start-End: 169-1155
tcctagtggagggctgagtccagcatcccagactcgtgtgactatataggcaagcatttggggacctacttcactttgataccctagccttcagcagctcaaggtgttggcctttggataggaggcttccaagtagtaaagctccctgctctcagcaagcccaacaccatggggaagggagatgtcttagaggcagcaccaaccaccacagcctaccattccctcatggatgaatatggttatgaggtgggcaaggccattggccatggctcctatgggtcggtatatgaggctttctacacaaagcagaaggttatggtggcagtcaagatcatctcaaagaagaaggcctctgatgactatcttaacaagttcctgccccgtgaaatacaggtaatgaaagtcttgcggcacaagtacctcatcaacttctatcgggccattgagagcacatctcgagtatacatcattctggaactggctcagggtggtgatgtccttgaatggatccagcgctacggggcctgctctgagccccttgctggcaagtggttctcccagctgaccctgggcattgcctacctgcacagcaagagcatcgtgcaccgggacttaaagttggagaacctgttgctggacaagtgggagaatgtgaagatatcagactttggctttgccaagatggtgccttctaaccagcctgtgggttgtagcccttcttaccgccaagtgaactgcttttcccacctcagccagacttactgtggcagctttgcttacgcttgcccagagatcttacgaggcttgccctacaaccctttcctgtctgacacctggagcatgggcgtcatcctttacactctagtggtcgcccatctgccctttgatgacaccaatctcaaaaagctgctaagagagactcagaaggaggtcactttcccagctaaccataccatctcccaggagtgcaagaacctgatcctccagatgctacgccaagccactaagcgtgccaccattctggacatcatcaaggattcctgggtgctcaagttccagcctgagcaacccacccatgagatcaggctgcttgaggccatgtgccagctccacaacaccactaaacagcaccaatccttgcaaattacgacctgaaaatggctgagggagggggctaagagaggagcaaagcaggaggtcttgggctaaaaatcttttttaccaaaaataaatctaagtctgatttagtttcatcaa

SEQ ID NO: 190293 - DNA, 1321 bp, Homo sapiens
  Payload ID: 17591
  Gene Name: testis-specific serine kinase 4
  Uniprot ID: Q6SA08
  ENST ID: ENST00000339917
  CDS Start-End: 205-1221
aaaaagaactgcttctctttctttccccctccaagttcctagtggagggctgagtccagcatcccagactcgtgtgactatataggcaagcatttggggacctacttcactttgataccctagccttcagcagctcaaggtgttggcctttggataggaggcttccaagtagtaaagctccctgctctcagcaagcccaacaccatggggaagggagatgtcttagaggcagcaccaaccaccacagcctaccattccctcatggatgaatatggttatgaggtgggcaaggccattggccatggctcctatgggtcggtatatgaggctttctacacaaagcagaaggttatggtggcagtcaagatcatctcaaagaagaaggcctctgatgactatcttaacaagttcctgccccgtgaaatacaggtaatgaaagtcttgcggcacaagtacctcatcaacttctatcgggccattgagagcacatctcgagtatacatcattctggaactggctcagggtggtgatgtccttgaatggatccagcgctacggggcctgctctgagccccttgctggcaagtggttctcccagctgaccctgggcattgcctacctgcacagcaagagcatcgtgcaccgcctgatgcccagcctttctgctgctggtagggacttaaagttggagaacctgttgctggacaagtgggagaatgtgaagatatcagactttggctttgccaagatggtgccttctaaccagcctgtgggttgtagcccttcttaccgccaagtgaactgcttttcccacctcagccagacttactgtggcagctttgcttacgcttgcccagagatcttacgaggcttgccctacaaccctttcctgtctgacacctggagcatgggcgtcatcctttacactctagtggtcgcccatctgccctttgatgacaccaatctcaaaaagctgctaagagagactcagaaggaggtcactttcccagctaaccataccatctcccaggagtgcaagaacctgatcctccagatgctacgccaagccactaagcgtgccaccattctggacatcatcaaggattcctgggtgctcaagttccagcctgagcaacccacccatgagatcaggctgcttgaggccatgtgccagctccacaacaccactaaacagcaccaatccttgcaaattacgacctgaaaatggctgagggagggggctaagagaggagcaaagcaggaggtcttgggctaaaaatcttttttaccaaaaataaatctaagtctgatttagtttcatc

SEQ ID NO: 190294 - DNA, 576 bp, Homo sapiens
  Payload ID: 17591
  Gene Name: testis-specific serine kinase 4
  ENST ID: ENST00000428351
  CDS Start-End: 67-474
ggtgttggcctttggataggaggcttccaagtagtaaagctccctgctctcagcaagcccaacaccatggggaagggagatgtcttagaggcagcaccaaccaccacagcctaccattccctcatggatgaatatggttatgaggtgggcaaggccattggccatggctcctatgggtcggtatatgaggctttctacacaaagcagaaggttatggtggcagtcaagatcatctcaaagaagaaggcctctgatgactatcttaacaagttcctgccccgtgaaatacagaacctgatcctccagatgctacgccaagccactaagcgtgccaccattctggacatcatcaaggattcctgggtgctcaagttccagcctgagcaacccacccatgagatcaggctgcttgaggccatgtgccagctccacaacaccactaaacagcaccaatccttgcaaattacgacctgaaaatggctgagggagggggctaagagaggagcaaagcaggaggtcttgggctaaaaatcttttttaccaaaaataaatctaagtctgatttagtttcatcaa

SEQ ID NO: 190295 - DNA, 725 bp, Homo sapiens
  Payload ID: 17591
  Gene Name: testis-specific serine kinase 4
  ENST ID: ENST00000553766
  CDS Start-End: 1-326
cttaccgccaagtgaactgcttttcccacctcagccagacttactgtggcagctttgcttacgcttgcccagagatcttacgaggcttgccctacaaccctttcctgtctgacacctggagcatgggcgtcatcctttacactctagtggtcgcccatctgccctttgatgacaccaatctcaaaaagctgctaagagagactcagaaggaggtcactttcccagctaaccataccatctcccaggagtgcaaggtccaactgctcattgcctgtgtggcacaatggagaaaaactcaggcaagacctctctctcccctgctctagaacctgatcctccagatgctacgccaagccactaagcgtgccaccattctggacatcatcaaggattcctgggtgctcaagttccagcctgagcaacccacccatgagatcaggctgcttgaggccatgtgccagctccacaacaccactaaacagcaccaatccttgcaaattacgacctgaaaatggctgagggagggggctaagagaggagcaaagcaggaggtcttgggctaaaaatcttttttaccaaaaataaatctaagtctgatttagtttcatcaactagggtcaaagacattcttttctcaaggcaatcttatagcagggaacactgctggagtaagagatagatttctgcccagagcctgtaaccaataatcttgacactgtgttaaa

SEQ ID NO: 190296 - DNA, 708 bp, Homo sapiens
  Payload ID: 17591
  Gene Name: testis-specific serine kinase 4
  ENST ID: ENST00000555092
  CDS Start-End: 1-430
cttagaggcagcaccaaccaccacagcctaccattccctcatggatgaatatggttatgaggtgggcaaggccattggccatggctcctatgggtcggtatatgaggctttctacacaaagcagaaggttatggtggcagtcaagatcatctcaaagaagaaggcctctgatgactatcttaacaagttcctgccccgtgaaatacaggtaatgaaagtcttgcggcacaagtacctcatcaacttctatcgggccattgagagcacatctcgagtatacatcattctggaactggctcagggtggtgatgtccttgaatggatccagcgctacggggcctgctctgagccccttgctggcaagtggttctcccagctgaccctgggcattgcctacctgcacagcaagagcatcgtgcaccgaacctgatcctccagatgctacgccaagccactaagcgtgccaccattctggacatcatcaaggattcctgggtgctcaagttccagcctgagcaacccacccatgagatcaggctgcttgaggccatgtgccagctccacaacaccactaaacagcaccaatccttgcaaattacgacctgaaaatggctgagggagggggctaagagaggagcaaagcaggaggtcttgggctaaaaatcttttttaccaaaaataaatctaagtctgatttagtttcatcaa

SEQ ID NO: 190297 - DNA, 896 bp, Homo sapiens
  Payload ID: 17591
  Gene Name: testis-specific serine kinase 4
  Uniprot ID: Q6SA08
  ENST ID: ENST00000556621
  CDS Start-End: 81-839
ctgcttctctttctttccccctccaagttcctagtggagggctgagtccagcatcccagactcgtgtgactatataggtaatgaaagtcttgcggcacaagtacctcatcaacttctatcgggccattgagagcacatctcgagtatacatcattctggaactggctcagggtggtgatgtccttgaatggatccagcgctacggggcctgctctgagccccttgctggcaagtggttctcccagctgaccctgggcattgcctacctgcacagcaagagcatcgtgcaccgggacttaaagttggagaacctgttgctggacaagtgggagaatgtgaagatatcagactttggctttgccaagatggtgccttctaaccagcctgtgggttgtagcccttcttaccgccaagtgaactgcttttcccacctcagccagacttactgtggcagctttgcttacgcttgcccagagatcttacgaggcttgccctacaaccctttcctgtctgacacctggagcatgggcgtcatcctttacactctagtggtcgcccatctgccctttgatgacaccaatctcaaaaagctgctaagagagactcagaaggaggtcactttcccagctaaccataccatctcccaggagtgcaagaacctgatcctccagatgctacgccaagccactaagcgtgccaccattctggacatcatcaaggattcctgggtgctcaagttccagcctgagcaacccacccatgagatcaggctgcttgaggccatgtgccagctccacaacaccactaaacagcaccaatccttgcaaattacgacctgaaaatggctgagggagggggctaagagaggagcaaagcaggaggtcttgggctaaaaa

SEQ ID NO: 190298 - DNA, 1519 bp, Homo sapiens
  Payload ID: 17592
  Gene Name: testis-specific serine kinase 6
  Uniprot ID: Q9BXA6
  ENST ID: ENST00000587522
  CDS Start-End: 122-943
agtgggcacatgggggtgcgggggtgtaggtgccaagcgccatggcttagacccgagattggagtccggccgccccccgacagcagccgcctcctgccccccgtgcgccctaggcgccaccatgtcgggagacaaacttctgagcgaactcggttataagctgggccgcacaattggagagggcagctactccaaggtgaaggtggccacatccaagaagtacaagggtaccgtggccatcaaggtggtggaccggcggcgagcgcccccggacttcgtcaacaagttcctgccgcgagagctgtccatcctgcggggcgtgcgacacccgcacatcgtgcacgtcttcgagttcatcgaggtgtgcaacgggaaactgtacatcgtgatggaagcggccgccaccgacctgctgcaagccgtgcagcgcaacgggcgcatccccggagttcaggcgcgcgacctctttgcgcagatcgccggcgccgtgcgctacctgcacgatcatcacctggtgcaccgcgacctcaagtgcgaaaacgtgctgctgagcccggacgagcgccgcgtcaagctcaccgacttcggcttcggccgccaggcccatggctacccagacctgagcaccacctactgcggctcagccgcctacgcgtcacccgaggtgctcctgggcatcccctacgaccccaagaagtacgatgtgtggagcatgggcgtcgtgctctacgtcatggtcaccgggtgcatgcccttcgacgactcggacatcgccggcctgccccggcgccagaaacgcggcgtgctctatcccgaaggcctcgagctgtccgagcgctgcaaggccctgatcgccgagctgctgcagttcagcccgtccgccaggccctccgcgggccaggtagcgcgcaactgctggctgcgcgccggggactccggctagaagccgggtggttccagccattcctgcagccaagggcactgggccagggcggcgcacgcgcaagaggcgcgcttcgagggaatatgcgaagctgccgcgtgctgctgcacatgcgctttttcccttccgcttccctccctttcttcccacgggggagtccgcagttgcccttgttcggaatccacgttccccgcgatcccgggagctggaggcgcatgcgcatccgcgattccctgcgaccaggccccgagagggcgagaccagaggggacggaagcattgcgcctgcgcggaactctcagcctctgcgcggagggcgtcccttcccaaccagccgtgggtgccaggttcccggttggaacctgcaataaactcgctgttcctcgcacctggctctaacggtggcccccatttgcggactagtggagaagcgatcgctccatccggggaagtcatgcatttcttgagcacctactgtctgccaggccccagagctcatggcgaagagacttgggcccatccctgccgaaaacgagacaattgaaaagtcaagtaaaataaaagaatgacatggaaa

SEQ ID NO: 190299 - DNA, 1467 bp, Homo sapiens
  Payload ID: 17592
  Gene Name: testis-specific serine kinase 6
  Uniprot ID: Q9BXA6
  ENST ID: ENST00000585580
  CDS Start-End: 259-1080
acaaagcagggaggctagggtggccccggggcggggtcccggacccccaccctaaggcggagtgacgcccgcagtcacttcacaaggcaaaaattgttacggggcaataaaaggcacaacagcggccaatgtctggcagtgggcacatgggggtgcgggggtgtaggtgccaagcgccatggcttagacccgagattggagtccggccgccccccgacagcagccgcctcctgccccccgtgcgccctaggcgccaccatgtcgggagacaaacttctgagcgaactcggttataagctgggccgcacaattggagagggcagctactccaaggtgaaggtggccacatccaagaagtacaagggtaccgtggccatcaaggtggtggaccggcggcgagcgcccccggacttcgtcaacaagttcctgccgcgagagctgtccatcctgcggggcgtgcgacacccgcacatcgtgcacgtcttcgagttcatcgaggtgtgcaacgggaaactgtacatcgtgatggaagcggccgccaccgacctgctgcaagccgtgcagcgcaacgggcgcatccccggagttcaggcgcgcgacctctttgcgcagatcgccggcgccgtgcgctacctgcacgatcatcacctggtgcaccgcgacctcaagtgcgaaaacgtgctgctgagcccggacgagcgccgcgtcaagctcaccgacttcggcttcggccgccaggcccatggctacccagacctgagcaccacctactgcggctcagccgcctacgcgtcacccgaggtgctcctgggcatcccctacgaccccaagaagtacgatgtgtggagcatgggcgtcgtgctctacgtcatggtcaccgggtgcatgcccttcgacgactcggacatcgccggcctgccccggcgccagaaacgcggcgtgctctatcccgaaggcctcgagctgtccgagcgctgcaaggccctgatcgccgagctgctgcagttcagcccgtccgccaggccctccgcgggccaggtagcgcgcaactgctggctgcgcgccggggactccggctagaagccgggtggttccagccattcctgcagccaagggcactgggccagggcggcgcacgcgcaagaggcgcgcttcgagggaatatgcgaagctgccgcgtgctgctgcacatgcgctttttcccttccgcttccctccctttcttcccacgggggagtccgcagttgcccttgttcggaatccacgttccccgcgatcccgggagctggaggcgcatgcgcatccgcgattccctgcgaccaggccccgagagggcgagaccagaggggacggaagcattgcgcctgcgcggaactctcagcctctgcgcggagggcgtcccttcccaaccagccgtgggtgccaggttcccggttggaacctgcaataaactcgctgttcctcgca

SEQ ID NO: 190300 - DNA, 878 bp, Homo sapiens
  Payload ID: 17592
  Gene Name: testis-specific serine kinase 6
  ENST ID: ENST00000602623
  CDS Start-End: 1-330
ccagacctgagcaccacctactgcggctcagccgcctacgcgtcacccgaggtgctcctgggcatcccctacgaccccaagaagtacgatgtgtggagcatgggcgtcgtgctctacgtcatggtcaccgggtgcatgcccttcgacgactcggacatcgccggcctgccccggcgccagaaacgcggcgtgctctatcccgaaggcctcgagctgtccgagcgctgcaaggccctgatcgccgagctgctgcagttcagcccgtccgccaggccctccgcgggccaggtagcgcgcaactgctggctgcgcgccggggactccggctagaagccgggtggttccagccattcctgcagccaagggcactgggccagggcggcgcacgcgcaagaggcgcgcttcgagggaatatgcgaagctgccgcgtgctgctgcacatgcgctttttcccttccgcttccctccctttcttcccacgggggagtccgcagttgcccttgttcggaatccacgttccccgcgatcccgggagctggaggcgcatgcgcatccgcgattccctgcgaccaggccccgagagggcgagaccagaggggacggaagcattgcgcctgcgcggaactctcagcctctgcgcggagggcgtcccttcccaaccagccgtgggtgccaggttcccggttggaacctgcaataaactcgctgttcctcgcacctggctctaacggtggcccccatttgcggactagtggagaagcgatcgctccatccggggaaggcaggcgcggtcatgcatttcttgagcacctactgtctgccaggccccagagctcatggcgaagagacttgggcccatccctgccgaaaacgagaca

SEQ ID NO: 190301 - DNA, 1883 bp, Homo sapiens
  Payload ID: 17593
  Gene Name: testis-specific serine kinase substrate
  Uniprot ID: Q9UJT2
  ENST ID: ENST00000246801
  CDS Start-End: 84-1862
agtggatcctgagggtctgtggtcacagtaggtaggaagtctcagaggaaggagcccctccctgggagccagacccccacaccatggcgagcgtggtggtgaagacgatctggcagtccaaagagatccatgaggccggggacacccccacgggggtggagagctgctcccagctagtcccagaggctccccggagggtgaccagccgggccaaggggatcccgaagaaaaagaaggccgtgtcgttccacggggtggagccccagatgtcccatcagcccatgcactggtgcctgaacctcaaacggtcctcggcctgcaccaacgtgtcactgctcaacctggccgccatggagcccactgactccacggggacagactccacagtggaagacctcagcggccaactcacactggctgggccccctgcctcccctaccctaccctgggatccggatgacgcagacatcacggaaatcctgagtggggtcaacagtggattggtccgcgccaaagactccatcaccagcttgaaggaaaagaccaaccgggttaaccagcacgtgcagtctctgcagagcgagtgttctgtgctgagcgagaatctggagagaaggcggcaagaggcagaagagttggaggggtactgcattcaactcaaggagaactgctggaaggtgacccggtctgtggaagatgctgaaatcaaaaccaacgtcttgaagcagaattctgccctgctggaggagaagctgcgctacctccagcagcagctgcaggatgagacgccgcgacggcaggaggccgagctgcaggagccggaggagaagcaggagccggaggagaagcaggagccggaggagaagcagaagccggaggctggcctctcctggaacagcctgggccccgccgccacgtcccagggctgccccggcccgccagggagtcccgacaaaccctcgcggccacacggcctggtccccgcaggctggggaatggggcctcgggctggcgagggcccctacgtgagcgagcaggaattgcagaagctgttcaccggcatcgaagagctgaggagagaggtgtcctcactgaccgcccggtggcatcaggaggagggggcggtgcaggaagccctgcggctgctcgggggcctgggcggcagggtcgacggcttcctaggccagtgggagcgggcacagcgcgaacaggcacagacggcgcgggacttgcaggagctgcgaggtcgggcggatgagctgtgcaccatggtggagcggtcagcagtgtctgtggcttcactgaggagcgaactggaggggctgggcccactgaaacccattctggaggagttcgggcggcaatttcagaactctcgaagagggcctgacctctccatgaacctggatcggtcccaccaaggcaactgtgcccgctgtgccagccaggggtcgcagttgtctacggagtccctgcagcagctgctggaccgagcactgacctcactagtggacgaggtgaagcagaggggcctgactcctgcctgtcccagctgtcagaggctacacaagaagattctggagctggagcgccaggccttagccaaacacgtcagggcagaggccctgagctccacccttcggctggcccaagacgaggccctgcgggccaagaacctactgctgacagacaagatgaagccagaggagaagatggccactctggaccatctacacttgaagatgtgctccctccacgatcatctcagcaacctgccacttgaggggtccacgggaacaatggggggaggcagcagtgcaggaacccccccaaaacaggggggctcagcccctgaacaataaatggcctctcatgctagcatg

SEQ ID NO: 190302 - DNA, 1367 bp, Homo sapiens
  Payload ID: 17593
  Gene Name: testis-specific serine kinase substrate
  ENST ID: ENST00000358830
  CDS Start-End: 170-1348
gggggcagtcccaggatttgtgggaggaggtcagatgcacgagggactcaagatacacttttaggtggaactccctgccccgacaccaccaccacactgcaccttcgtgcacatagtcatccttagaactcgctgataagagggattcaaatgaggctccaacacccagatgggggactcttgccctgcagtcacattcaggtcccagaaagagaatcgagctggacttcaggagaagctgcgctacctccagcagcagctgcaggatgagacgccgcgacggcaggaggccgagctgcaggagccggaggagaagcaggagccggaggagaagcaggagccggaggagaagcagaagccggaggctggcctctcctggaacagcctgggccccgccgccacgtcccagggctgccccggcccgccagggagtcccgacaaaccctcgcggccacacggcctggtccccgcaggctggggaatggggcctcgggctggcgagggcccctacgtgagcgagcaggaattgcagaagctgttcaccggcatcgaagagctgaggagagaggtgtcctcactgaccgcccggtggcatcaggaggagggggcggtgcaggaagccctgcggctgctcgggggcctgggcggcagggtcgacggcttcctaggccagtgggagcgggcacagcgcgaacaggcacagacggcgcgggacttgcaggagctgcgaggtcgggcggatgagctgtgcaccatggtggagcggtcagcagtgtctgtggcttcactgaggagcgaactggaggggctgggcccactgaaacccattctggaggagttcgggcggcaatttcagaactctcgaagagggcctgacctctccatgaacctggatcggtcccaccaaggcaactgtgcccgctgtgccagccaggggtcgcagttgtctacggagtccctgcagcagctgctggaccgagcactgacctcactagtggacgaggtgaagcagaggggcctgactcctgcctgtcccagctgtcagaggctacacaagaagattctggagctggagcgccaggccttagccaaacacgtcagggcagaggccctgagctccacccttcggctggcccaagacgaggccctgcgggccaagaacctactgctgacagacaagatgaagccagaggagaagatggccactctggaccatctacacttgaagatgtgctccctccacgatcatctcagcaacctgccacttgaggggtccacgggaacaatggggggaggcagcagtgcaggaacccccccaaaacaggggggctcagcccctgaacaataaatggcctctcatgctagca

SEQ ID NO: 190303 - DNA, 9288 bp, Homo sapiens
  Payload ID: 17594
  Gene Name: tet methylcytosine dioxygenase 1
  Uniprot ID: Q8NFU7
  ENST ID: ENST00000373644
  CDS Start-End: 210-6620
ggcgcgagttggaaagtttgcccgagggctggtgcaggcttggagctgggggccgtgcgctgccctgggaatgtgacccggccagcgaccaaaaccttgtgtgactgagctgaagagcagtgcatccagattctcctcagaagtgagactttccaaaggaccaatgactctgtttcctgcgccctttcattttttcctactctgtagctatgtctcgatcccgccatgcaaggccttccagattagtcaggaaggaagatgtaaacaaaaaaaagaaaaacagccaactacgaaagacaaccaagggagccaacaaaaatgtggcatcagtcaagactttaagccctggaaaattaaagcaattaattcaagaaagagatgttaagaaaaaaacagaacctaaaccacccgtgccagtcagaagccttctgacaagagctggagcagcacgcatgaatttggataggactgaggttctttttcagaacccagagtccttaacctgcaatgggtttacaatggcgctacgaagcacctctcttagcaggcgactctcccaacccccactggtcgtagccaaatccaaaaaggttccactttctaagggtttagaaaagcaacatgattgtgattataagatactccctgctttgggagtaaagcactcagaaaatgattcggttccaatgcaagacacccaagtccttcctgatatagagactctaattggtgtacaaaatccctctttacttaaaggtaagagccaagagacaactcagttttggtcccaaagagttgaggattccaagatcaatatccctacccacagtggccctgcagctgagatccttcctgggccactggaagggacacgctgtggtgaaggactattctctgaagagacattgaatgataccagtggttccccaaaaatgtttgctcaggacacagtgtgtgctccttttccccaaagagcaacccccaaagttacctctcaaggaaaccccagcattcagttagaagagttgggttcacgagtagaatctcttaagttatctgattcttacctggatcccattaaaagtgaacatgattgctaccccacctccagtcttaataaggttatacctgacttgaaccttagaaactgcttggctcttggtgggtctacgtctcctacctctgtaataaaattcctcttggcaggctcaaaacaagcgacccttggtgctaaaccagatcatcaagaggccttcgaagctactgcaaatcaacaggaagtttctgataccacctctttcctaggacaggcctttggtgctatcccacatcaatgggaacttcctggtgctgacccagttcatggtgaggccctgggtgagaccccagatctaccagagattcctggtgctattccagtccaaggagaggtctttggtactattttagaccaacaagaaactcttggtatgagtgggagtgttgtcccagacttgcctgtcttccttcctgttcctccaaatccaattgctacctttaatgctccttccaaatggcctgagccccaaagcactgtctcatatggacttgcagtccagggtgctatacagattttgcctttgggctcaggacacactcctcaatcatcatcaaactcagagaaaaattcattacctccagtaatggctataagcaatgtagaaaatgagaagcaggttcatataagcttcctgccagctaacactcaggggttcccattagcccctgagagaggactcttccatgcttcactgggtatagcccaactctctcaggctggtcctagcaaatcagacagagggagctcccaggtcagtgtaaccagcacagttcatgttgtcaacaccacagtggtgactatgccagtgccaatggtcagtacctcctcttcttcctataccactttgctaccgactttggaaaagaagaaaagaaagcgatgtggggtctgtgaaccctgccagcagaagaccaactgtggtgaatgcacttactgcaagaacagaaagaacagccatcagatctgtaagaaaagaaaatgtgaggagctgaaaaagaaaccatctgttgttgtgcctctggaggttataaaggaaaacaagaggccccagagggaaaagaagcccaaagttttaaaggcagattttgacaacaaaccagtaaatggccccaagtcagaatccatggactacagtagatgtggtcatggggaagaacaaaaattggaattgaacccacatactgttgaaaatgtaactaaaaatgaagacagcatgacaggcatcgaggtggagaagtggacacaaaacaagaaatcacagttaactgatcacgtgaaaggagattttagtgctaatgtcccagaagctgaaaaatcgaaaaactctgaagttgacaagaaacgaaccaaatctccaaaattgtttgtacaaaccgtaagaaatggcattaaacatgtacactgtttaccagctgaaacaaatgtttcatttaaaaaattcaatattgaagaattcggcaagacattggaaaacaattcttataaattcctaaaagacactgcaaaccataaaaacgctatgagctctgttgctactgatatgagttgtgatcatctcaaggggagaagtaacgttttagtattccagcagcctggctttaactgcagttccattccacattcttcacactccatcataaatcatcatgctagtatacacaatgaaggtgatcaaccaaaaactcctgagaatataccaagtaaagaaccaaaagatggatctcccgttcaaccaagtctcttatcgttaatgaaagataggagattaacattggagcaagtggtagccatagaggccctgactcaactctcagaagccccatcagagaattcctccccatcaaagtcagagaaggatgaggaatcagagcagagaacagccagtttgcttaatagctgcaaagctatcctctacactgtaagaaaagacctccaagacccaaacttacagggagagccaccaaaacttaatcactgtccatctttggaaaaacaaagttcatgcaacacggtggttttcaatgggcaaactactaccctttccaactcacatatcaactcagctactaaccaagcatccacaaagtcacatgaatattcaaaagtcacaaattcattatctctttttataccaaaatcaaattcatccaagattgacaccaataaaagtattgctcaagggataattactcttgacaattgttccaatgatttgcatcagttgccaccaagaaataatgaagtggagtattgcaaccagttactggacagcagcaaaaaattggactcagatgatctatcatgtcaggatgcaacccatacccaaattgaggaagatgttgcaacacagttgacacaacttgcttcgataattaagatcaattatataaaaccagaggacaaaaaagttgaaagtacaccaacaagccttgtcacatgtaatgtacagcaaaaatacaatcaggagaagggcacaatacaacagaaaccaccttcaagtgtacacaataatcatggttcatcattaacaaaacaaaagaacccaacccagaaaaagacaaaatccaccccatcaagagatcggcggaaaaagaagcccacagttgtaagttatcaagaaaatgatcggcagaagtgggaaaagttgtcctatatgtatggcacaatatgcgacatttggatagcatcgaaatttcaaaattttgggcaattttgtccacatgattttcctactgtatttgggaaaatttcttcctcgaccaaaatatggaaaccactggctcaaacgaggtccattatgcaacccaaaacagtatttccaccactcactcagataaaattacagagatatcctgaatcagcagaggaaaaggtgaaggttgaaccattggattcactcagcttatttcatcttaaaacggaatccaacgggaaggcattcactgataaagcttataattctcaggtacagttaacggtgaatgccaatcagaaagcccatcctttgacccagccctcctctccacctaaccagtgtgctaacgtgatggcaggcgatgaccaaatacggtttcagcaggttgttaaggagcaactcatgcatcagagactgccaacattgcctggtatctctcatgaaacacccttaccggagtcagcactaactctcaggaatgtaaatgtagtgtgttcaggtggaattacagtggtttctaccaaaagtgaagaggaagtctgttcatccagttttggaacatcagaattttccacagtggacagtgcacagaaaaattttaatgattatgccatgaacttctttactaaccctacaaaaaacctagtgtctataactaaagattctgaactgcccacctgcagctgtcttgatcgagttatacaaaaagacaaaggcccatattatacacaccttggggcaggaccaagtgttgctgctgtcagggaaatcatggagaataggtatggtcaaaaaggaaacgcaataaggatagaaatagtagtgtacaccggtaaagaagggaaaagctctcatgggtgtccaattgctaagtgggttttaagaagaagcagtgatgaagaaaaagttctttgtttggtccggcagcgtacaggccaccactgtccaactgctgtgatggtggtgctcatcatggtgtgggatggcatccctcttccaatggccgaccggctatacacagagctcacagagaatctaaagtcatacaatgggcaccctaccgacagaagatgcaccctcaatgaaaatcgtacctgtacatgtcaaggaattgatccagagacttgtggagcttcattctcttttggctgttcatggagtatgtactttaatggctgtaagtttggtagaagcccaagccccagaagatttagaattgatccaagctctcccttacatgaaaaaaaccttgaagataacttacagagtttggctacacgattagctccaatttataagcagtatgctccagtagcttaccaaaatcaggtggaatatgaaaatgttgcccgagaatgtcggcttggcagcaaggaaggtcgtcccttctctggggtcactgcttgcctggacttctgtgctcatccccacagggacattcacaacatgaataatggaagcactgtggtttgtaccttaactcgagaagataaccgctctttgggtgttattcctcaagatgagcagctccatgtgctacctctttataagctttcagacacagatgagtttggctccaaggaaggaatggaagccaagatcaaatctggggccatcgaggtcctggcaccccgccgcaaaaaaagaacgtgtttcactcagcctgttccccgttctggaaagaagagggctgcgatgatgacagaggttcttgcacataagataagggcagtggaaaagaaacctattccccgaatcaagcggaagaataactcaacaacaacaaacaacagtaagccttcgtcactgccaaccttagggagtaacactgagaccgtgcaacctgaagtaaaaagtgaaaccgaaccccattttatcttaaaaagttcagacaacactaaaacttattcgctgatgccatccgctcctcacccagtgaaagaggcatctccaggcttctcctggtccccgaagactgcttcagccacaccagctccactgaagaatgacgcaacagcctcatgcgggttttcagaaagaagcagcactccccactgtacgatgccttcgggaagactcagtggtgccaatgcagctgctgctgatggccctggcatttcacagcttggcgaagtggctcctctccccaccctgtctgctcctgtgatggagcccctcattaattctgagccttccactggtgtgactgagccgctaacgcctcatcagccaaaccaccagccctccttcctcacctctcctcaagaccttgcctcttctccaatggaagaagatgagcagcattctgaagcagatgagcctccatcagacgaacccctatctgatgaccccctgtcacctgctgaggagaaattgccccacattgatgagtattggtcagacagtgagcacatctttttggatgcaaatattggtggggtggccatcgcacctgctcacggctcggttttgattgagtgtgcccggcgagagctgcacgctaccactcctgttgagcaccccaaccgtaatcatccaacccgcctctcccttgtcttttaccagcacaaaaacctaaataagccccaacatggttttgaactaaacaagattaagtttgaggctaaagaagctaagaataagaaaatgaaggcctcagagcaaaaagaccaggcagctaatgaaggtccagaacagtcctctgaagtaaatgaattgaaccaaattccttctcataaagcattaacattaacccatgacaatgttgtcaccgtgtccccttatgctctcacacacgttgcggggccctataaccattgggtctgaaggcttttctccccctcttaatgcctttgctagtgcagtgtattttttcaaggtgctgttaaaagaaagtcatgttgtcgtttactatcttcatctcacccatttcaagtctgaggtaaaaaaataataatgataacaaaacggggtgggtattcttaactgtgactatattttgacaattggtagaaggtgcacattttaagcaaaaataaaagttttatagttttaaatacataaagaaatgtttcagttaggcattaaccttgatagaatcactcagtttggtgctttaaattaagtctgtttactatgaaacaagagtcatttttagaggattttaacaggttcatgttctatgatgtaaaatcaagacacacagtgttaactctacacagcttctggtgcttaaccacatccacacagttaaaaataagctgaattattatttcatggtgccattgttccaacatcttccaatcattgctagaaaattggcatattcctttgaaataaacttatgaaatgttttctctcttaaaatatttctcctgtgtaaaataaatcattgttgttagtaatggttggaggctgttcataaattgtaaatatatattttaaaagcactttctatttttaaaagtaacttgaaataatatagtataagaatcctattgtctattgtttgtgcatatttgcatacaagagaaatcatttatccttgctgtgtagagttccatcttgttaactgcagtatgtattctaatcatgtatatggtttgtgttcttttactgtgtcctctcacattcaagtattagcaacttgcagtatataaaatagttagataatgagaagttgttaattatctctaaaattggaattaggaagcatatcaccaatactgattaacattctctttggaactaggtaagagtggtctcttcttattgaacaacctcaatttagtttcatcccacctttctcagtataatccatgagaggtgtttccaaaaggagatgagggaacaggataggtttcagaagagtcaaatgcttctaatgtctcaaggtgataaaatacaaaaactaagtagacagatatttgtactgaagtctgatacagaattagaaaaaaaaaattcttgttgaaatattttgaaaacaaattccctactatcatcacatgcctccccaaccccaagtcaaaaacaagaggaatggtactacaaacatggctttgtccattaagagctaattcatttgtttatcttagcatactagatttgggaaaatgataactcatcttttctgataattgcctatgttctaggtaacaggaaaacaggcattaagtttattttagtcttcccattttcttcctattactttattgactcattttattgcaaaacaaaaaggattacccaaacaacatgtttcgaacaaggagaattttcaatgaaatacttgattctgttaaaatgcagaggtgctataacattcaaagtgtcagattccttgggagtatggaaaacctaatggtgcttctcccttggaaatgccataggaagcccacaaccgctaacacttacaattttggtgcaaaagcaaacagttccagcaggctctctaaagaaaaactcattgtaacttattaaaataatatctggtgcaaagtatctgttttgagcttttgactaatccaagtaaaggaatatgaagggattgtaaaaaacaaaatgtccattgatagaccatcgtgtacaagtagatttctgcttgttgaatatgtaaaatagggtaattcattgacttgttttagtattttgtgtgccttagatttccgttttaagacatgtatatttttgtgagcctaaggtttcttatatacatataagtatataaataagtgattgtttattgcttcagctgcttcaacaagatatttactagtattagactatcaggaatacacccttgcgagattatgttttagattttaggccttagctcccactagaaattatttcttcaccagatttaatggataaagttttatggctctttatgcatccactcatctactcattcttcgagtctacacttattgaatgcctgcaaaatctaagtatcacttttatttttctttggatcaccacctatgacatagtaaacttgaagaataaaaactaccctcagaaatatttttaaaagaagtagcaaattatcttcagtataatccatggtaatgtatgcagtaattcaaattgatctctctctcaataggtttcttaacaatctaaacttgaaacatcaatgttaatttttggaactattgggatttgtgacgcttgttgcagtttaccaaaacaagtatttgaaaatatatagtatcaactgaaatgtttccattccgttgttgtagttaacatcatgaatggacttcttaagctgattaccccactgtgggaaccaaattggattcctactttgttggactctctttcctgattttaacaatttaccatcccattctctgccctgtgattttttttaaaagcttattcaatgttctgcagcattgtgattgtatgctggctacactgcttttagaatgctctttctcatgaagcaaggaaataaatttgtttgaaatgacattttctctca

SEQ ID NO: 190304 - DNA, 9588 bp, Homo sapiens
  Payload ID: 17595
  Gene Name: tet methylcytosine dioxygenase 2
  Uniprot ID: Q6N021
  ENST ID: ENST00000265149
  CDS Start-End: 387-3971
gcggccgccccgagacgccggccccgctgagtgatgagaacagacgtcaaactgccttatgaatattgatgcggaggctaggctgctttcgtagagaagcagaaggaagcaagatggctgccctttaggatttgttagaaaggagacccgactgcaactgctggattgctgcaaggctgagggacgagaacgaggctggcaaacattcagcagcacaccctctcaagattgtttacttgcctttgctcctgttgagttacaacgcttggaagcaggagatgggctcagcagcagccaataggacatgatccaggaagagcagtaagggactgagctgctgaattcaactagagggcagccttgtggatggccccgaagcaagcctgatggaacaggatagaaccaaccatgttgagggcaacagactaagtccattcctgataccatcacctcccatttgccagacagaacctctggctacaaagctccagaatggaagcccactgcctgagagagctcatccagaagtaaatggagacaccaagtggcactctttcaaaagttattatggaataccctgtatgaagggaagccagaatagtcgtgtgagtcctgactttacacaagaaagtagagggtattccaagtgtttgcaaaatggaggaataaaacgcacagttagtgaaccttctctctctgggctccttcagatcaagaaattgaaacaagaccaaaaggctaatggagaaagacgtaacttcggggtaagccaagaaagaaatccaggtgaaagcagtcaaccaaatgtctccgatttgagtgataagaaagaatctgtgagttctgtagcccaagaaaatgcagttaaagatttcaccagtttttcaacacataactgcagtgggcctgaaaatccagagcttcagattctgaatgagcaggaggggaaaagtgctaattaccatgacaagaacattgtattacttaaaaacaaggcagtgctaatgcctaatggtgctacagtttctgcctcttccgtggaacacacacatggtgaactcctggaaaaaacactgtctcaatattatccagattgtgtttccattgcggtgcagaaaaccacatctcacataaatgccattaacagtcaggctactaatgagttgtcctgtgagatcactcacccatcgcatacctcagggcagatcaattccgcacagacctctaactctgagctgcctccaaagccagctgcagtggtgagtgaggcctgtgatgctgatgatgctgataatgccagtaaactagctgcaatgctaaatacctgttcctttcagaaaccagaacaactacaacaacaaaaatcagtttttgagatatgcccatctcctgcagaaaataacatccagggaaccacaaagctagcgtctggtgaagaattctgttcaggttccagcagcaatttgcaagctcctggtggcagctctgaacggtatttaaaacaaaatgaaatgaatggtgcttacttcaagcaaagctcagtgttcactaaggattccttttctgccactaccacaccaccaccaccatcacaattgcttctttctccccctcctcctcttccacaggttcctcagcttccttcagaaggaaaaagcactctgaatggtggagttttagaagaacaccaccactaccccaaccaaagtaacacaacacttttaagggaagtgaaaatagagggtaaacctgaggcaccaccttcccagagtcctaatccatctacacatgtatgcagcccttctccgatgctttctgaaaggcctcagaataattgtgtgaacaggaatgacatacagactgcagggacaatgactgttccattgtgttctgagaaaacaagaccaatgtcagaacacctcaagcataacccaccaatttttggtagcagtggagagctacaggacaactgccagcagttgatgagaaacaaagagcaagagattctgaagggtcgagacaaggagcaaacacgagatcttgtgcccccaacacagcactatctgaaaccaggatggattgaattgaaggcccctcgttttcaccaagcggaatcccatctaaaacgtaatgaggcatcactgccatcaattcttcagtatcaacccaatctctccaatcaaatgacctccaaacaatacactggaaattccaacatgcctggggggctcccaaggcaagcttacacccagaaaacaacacagctggagcacaagtcacaaatgtaccaagttgaaatgaatcaagggcagtcccaaggtacagtggaccaacatctccagttccaaaaaccctcacaccaggtgcacttctccaaaacagaccatttaccaaaagctcatgtgcagtcactgtgtggcactagatttcattttcaacaaagagcagattcccaaactgaaaaacttatgtccccagtgttgaaacagcacttgaatcaacaggcttcagagactgagccattttcaaactcacaccttttgcaacataagcctcataaacaggcagcacaaacacaaccatcccagagttcacatctccctcaaaaccagcaacagcagcaaaaattacaaataaagaataaagaggaaatactccagacttttcctcacccccaaagcaacaatgatcagcaaagagaaggatcattctttggccagactaaagtggaagaatgttttcatggtgaaaatcagtattcaaaatcaagcgagttcgagactcataatgtccaaatgggactggaggaagtacagaatataaatcgtagaaattccccttatagtcagaccatgaaatcaagtgcatgcaaaatacaggtttcttgttcaaacaatacacacctagtttcagagaataaagaacagactacacatcctgaactttttgcaggaaacaagacccaaaacttgcatcacatgcaatattttccaaataatgtgatcccaaagcaagatcttcttcacaggtgctttcaagaacaggagcagaagtcacaacaagcttcagttctacagggatataaaaatagaaaccaagatatgtctggtcaacaagctgcgcaacttgctcagcaaaggtacttgatacataaccatgcaaatgtttttcctgtgcctgaccagggaggaagtcacactcagacccctccccagaaggacactcaaaagcatgctgctctaaggtggcatctcttacagaagcaagaacagcagcaaacacagcaaccccaaactgagtcttgccatagtcagatgcacaggccaattaaggtggaacctggatgcaagccacatgcctgtatgcacacagcaccaccagaaaacaaaacatggaaaaaggtaactaagcaagagaatccacctgcaagctgtgataatgtgcagcaaaagagcatcattgagaccatggagcagcatctgaagcagtttcacgccaagtcgttatttgaccataaggctcttactctcaaatcacagaagcaagtaaaagttgaaatgtcagggccagtcacagttttgactagacaaaccactgctgcagaacttgatagccacaccccagctttagagcagcaaacaacttcttcagaaaagacaccaaccaaaagaacagctgcttctgttctcaataattttatagagtcaccttccaaattactagatactcctataaaaaatttattggatacacctgtcaagactcaatatgatttcccatcttgcagatgtgtaggtttggacagaagggtaaagctattaggattgaaagagtcatctatactggtaaagaaggcaaaagttctcagggatgtcctattgctaagtgggtggttcgcagaagcagcagtgaagagaagctactgtgtttggtgcgggagcgagctggccacacctgtgaggctgcagtgattgtgattctcatcctggtgtgggaaggaatcccgctgtctctggctgacaaactctactcggagcttaccgagacgctgaggaaatacggcacgctcaccaatcgccggtgtgccttgaatgaagagagaacttgcgcctgtcaggggctggatccagaaacctgtggtgcctccttctcttttggttgttcatggagcatgtactacaatggatgtaagtttgccagaagcaagatcccaaggaagtttaagctgcttggggatgacccaaaagaggaagagaaactggagtctcatttgcaaaacctgtccactcttatggcaccaacatataagaaacttgcacctgatgcatataataatcagattgaatatgaacacagagcaccagagtgccgtctgggtctgaaggaaggccgtccattctcaggggtcactgcatgtttggacttctgtgctcatgcccacagagacttgcacaacatgcagaatggcagcacattggtatgcactctcactagagaagacaatcgagaatttggaggaaaacctgaggatgagcagcttcacgttctgcctttatacaaagtctctgacgtggatgagtttgggagtgtggaagctcaggaggagaaaaaacggagtggtgccattcaggtactgagttcttttcggcgaaaagtcaggatgttagcagagccagtcaagacttgccgacaaaggaaactagaagccaagaaagctgcagctgaaaagctttcctccctggagaacagctcaaataaaaatgaaaaggaaaagtcagccccatcacgtacaaaacaaactgaaaacgcaagccaggctaaacagttggcagaacttttgcgactttcaggaccagtcatgcagcagtcccagcagccccagcctctacagaagcagccaccacagccccagcagcagcagagaccccagcagcagcagccacatcaccctcagacagagtctgtcaactcttattctgcttctggatccaccaatccatacatgagacggcccaatccagttagtccttatccaaactcttcacacacttcagatatctatggaagcaccagccctatgaacttctattccacctcatctcaagctgcaggttcatatttgaattcttctaatcccatgaacccttaccctgggcttttgaatcagaatacccaatatccatcatatcaatgcaatggaaacctatcagtggacaactgctccccatatctgggttcctattctccccagtctcagccgatggatctgtataggtatccaagccaagaccctctgtctaagctcagtctaccacccatccatacactttaccagccaaggtttggaaatagccagagttttacatctaaatacttaggttatggaaaccaaaatatgcagggagatggtttcagcagttgtaccattagaccaaatgtacatcatgtagggaaattgcctccttatcccactcatgagatggatggccacttcatgggagccacctctagattaccacccaatctgagcaatccaaacatggactataaaaatggtgaacatcattcaccttctcacataatccataactacagtgcagctccgggcatgttcaacagctctcttcatgccctgcatctccaaaacaaggagaatgacatgctttcccacacagctaatgggttatcaaagatgcttccagctcttaaccatgatagaactgcttgtgtccaaggaggcttacacaaattaagtgatgctaatggtcaggaaaagcagccattggcactagtccagggtgtggcttctggtgcagaggacaacgatgaggtctggtcagacagcgagcagagctttctggatcctgacattgggggagtggccgtggctccaactcatgggtcaattctcattgagtgtgcaaagcgtgagctgcatgccacaacccctttaaagaatcccaataggaatcaccccaccaggatctccctcgtcttttaccagcataagagcatgaatgagccaaaacatggcttggctctttgggaagccaaaatggctgaaaaagcccgtgagaaagaggaagagtgtgaaaagtatggcccagactatgtgcctcagaaatcccatggcaaaaaagtgaaacgggagcctgctgagccacatgaaacttcagagcccacttacctgcgtttcatcaagtctcttgccgaaaggaccatgtccgtgaccacagactccacagtaactacatctccatatgccttcactcgggtcacagggccttacaacagatatatatgatatcacccccttttgttggttacctcacttgaaaagaccacaaccaacctgtcagtagtatagttctcatgacgtgggcagtggggaaaggtcacagtattcatgacaaatgtggtgggaaaaacctcagctcaccagcaacaaaagaggttatcttaccatagcacttaattttcactggctcccaagtggtcacagatggcatctaggaaaagaccaaagcattctatgcaaaaagaaggtggggaagaaagtgttccgcaatttacatttttaaacactggttctattattggacgagatgatatgtaaatgtgatcccccccccccgcttacaactctacacatctgtgaccacttttaataatatcaagtttgcatagtcatggaacacaaatcaaacaagtactgtagtattacagtgacaggaatcttaaaataccatctggtgctgaatatatgatgtactgaaatactggaattatggctttttgaaatgcagtttttactgtaatcttaacttttatttatcaaaatagctacaggaaacatgaatagcaggaaaacactgaatttgtttggatgttctaagaaatggtgctaagaaaatggtgtctttaatagctaaaaatttaatgcctttatatcatcaagatgctatcagtgtactccagtgcccttgaataataggggtaccttttcattcaagtttttatcataattacctattcttacacaagcttagtttttaaaatgtggacattttaaaggcctctggattttgctcatccagtgaagtccttgtaggacaataaacgtatatatgtacatatatacacaaacatgtatatgtgcacacacatgtatatgtataaatattttaaatggtgttttagaagcactttgtctacctaagctttgacaacttgaacaatgctaaggtactgagatgtttaaaaaacaagtttactttcattttagaatgcaaagttgatttttttaaggaaacaaagaaagcttttaaaatatttttgcttttagccatgcatctgctgatgagcaattgtgtccatttttaacacagccagttaaatccaccatggggcttactggattcaagggaatacgttagtccacaaaacatgttttctggtgctcatctcacatgctatactgtaaaacagttttatacaaaattgtatgacaagttcattgctcaaaaatgtacagttttaagaattttctattaactgcaggtaataattagctgcatgctgcagactcaacaaagctagttcactgaagcctatgctattttatggatcataggctcttcagagaactgaatggcagtctgcctttgtgttgataattatgtacattgtgacgttgtcatttcttagcttaagtgtcctctttaacaagaggattgagcagactgatgcctgcataagatgaataaacagggttagttccatgtgaatctgtcagttaaaaagaaacaaaaacaggcagctggtttgctgtggtggttttaaatcattaatttgtataaagaagtgaaagagttgtatagtaaattaaattgtaaacaaaacttttttaatgcaatgctttagtattttagtactgtaaaaaaattaaatatatacatatatatatatatatatatatatatatatatgagtttgaagcagaattcacatcatgatggtgctactcagcctgctacaaatatatcataatgtgagctaagaattcattaaatgtttgagtgatgttcctacttgtcatatacctcaacactagtttggcaataggatattgaactgagagtgaaagcattgtgtaccatcatttttttccaagtccttttttttattgttaaaaaaaaaagcataccttttttcaatacttgatttcttagcaagtataacttgaacttcaacctttttgttctaaaaattcagggatatttcagctcatgctctccctatgccaacatgtcacctgtgtttatgtaaaattgttgtaggttaataaatatattctttgtcagggatttaacccttttattttgaatcccttctattttacttgtacatgtgctgatgtaactaaaactaattttgtaaatctgttggctctttttattgtaaagaaaagcattttaaaagtttgaggaatcttttgactgtttcaagcaggaaaaaaaaattacatgaaaatagaatgcactgagttgataaagggaaaaattgtaaggcaggagtttggcaagtggctgttggccagagacttacttgtaactctctaaatgaagtttttttgatcctgtaatcactgaaggtacatactccatgtggacttcccttaaacaggcaaacacctacaggtatggtgtgcaacagattgtacaattacattttggcctaaatacatttttgcttactagtatttaaaataaattcttaatcagaggaggcctttgggttttattggtcaaatctttgtaagctggcttttgtctttttaaaaaatttcttgaatttgtggttgtgtccaatttgcaaacatttccaaaaatgtttgctttgcttacaaaccacatgattttaatgttttttgtataccataatatctagccccaaacatttgattactacatgtgcattggtgattttgatcatccattcttaatatttgatttctgtgtcacctactgtcatttgttaaactgctggccaacaagaacaggaagtatagtttggggggttggggagagtttacataaggaagagaagaaattgagtggcatattgtaaatatcagatctataattgtaaatataaaacctgcctcagttagaatgaatggaaagcagatctacaatttgctaatataggaatatcaggttgactatatagccatacttgaaaatgcttctgagtggtgtcaactttacttgaatgaatttttcatcttgattgacgcacagtgatgtacagttcacttctgaagctagtggttaacttgtgtaggaaacttttgcagtttgacactaagataacttctgtgtgcatttttctatgcttttttaaaaactagtttcatttcattttcatgagatgtttggtttataagatctgaggatggttataaatactgtaagtattgtaatgttatgaatgcaggttatttgaaagctgtttattattatatcattcctgataatgctatgtgagtgtttttaataaaatttatatttatttaatgcactctaa

SEQ ID NO: 190305 - DNA, 9233 bp, Homo sapiens
  Payload ID: 17595
  Gene Name: tet methylcytosine dioxygenase 2
  Uniprot ID: Q6N021
  ENST ID: ENST00000305737
  CDS Start-End: 405-3902
aaacagaaggtgggccggggcggggagaaacagaactcggtcaatttcccagtttgtcgggtctttaaaaatacaggcccctaaagcactaagggcatgccctcggtgaaacaggggagcgcttctgctgaatgagattaaagcgacagaaaagggaaaggagagcgcgggcaacgggatctaaagggagatagagacgcgggcctctgagggctggcaaacattcagcagcacaccctctcaagattgtttacttgcctttgctcctgttgagttacaacgcttggaagcaggagatgggctcagcagcagccaataggacatgatccaggaagagcagtaagggactgagctgctgaattcaactagagggcagccttgtggatggccccgaagcaagcctgatggaacaggatagaaccaaccatgttgagggcaacagactaagtccattcctgataccatcacctcccatttgccagacagaacctctggctacaaagctccagaatggaagcccactgcctgagagagctcatccagaagtaaatggagacaccaagtggcactctttcaaaagttattatggaataccctgtatgaagggaagccagaatagtcgtgtgagtcctgactttacacaagaaagtagagggtattccaagtgtttgcaaaatggaggaataaaacgcacagttagtgaaccttctctctctgggctccttcagatcaagaaattgaaacaagaccaaaaggctaatggagaaagacgtaacttcggggtaagccaagaaagaaatccaggtgaaagcagtcaaccaaatgtctccgatttgagtgataagaaagaatctgtgagttctgtagcccaagaaaatgcagttaaagatttcaccagtttttcaacacataactgcagtgggcctgaaaatccagagcttcagattctgaatgagcaggaggggaaaagtgctaattaccatgacaagaacattgtattacttaaaaacaaggcagtgctaatgcctaatggtgctacagtttctgcctcttccgtggaacacacacatggtgaactcctggaaaaaacactgtctcaatattatccagattgtgtttccattgcggtgcagaaaaccacatctcacataaatgccattaacagtcaggctactaatgagttgtcctgtgagatcactcacccatcgcatacctcagggcagatcaattccgcacagacctctaactctgagctgcctccaaagccagctgcagtggtgagtgaggcctgtgatgctgatgatgctgataatgccagtaaactagctgcaatgctaaatacctgttcctttcagaaaccagaacaactacaacaacaaaaatcagtttttgagatatgcccatctcctgcagaaaataacatccagggaaccacaaagctagcgtctggtgaagaattctgttcaggttccagcagcaatttgcaagctcctggtggcagctctgaacggtatttaaaacaaaatgaaatgaatggtgcttacttcaagcaaagctcagtgttcactaaggattccttttctgccactaccacaccaccaccaccatcacaattgcttctttctccccctcctcctcttccacaggttcctcagcttccttcagaaggaaaaagcactctgaatggtggagttttagaagaacaccaccactaccccaaccaaagtaacacaacacttttaagggaagtgaaaatagagggtaaacctgaggcaccaccttcccagagtcctaatccatctacacatgtatgcagcccttctccgatgctttctgaaaggcctcagaataattgtgtgaacaggaatgacatacagactgcagggacaatgactgttccattgtgttctgagaaaacaagaccaatgtcagaacacctcaagcataacccaccaatttttggtagcagtggagagctacaggacaactgccagcagttgatgagaaacaaagagcaagagattctgaagggtcgagacaaggagcaaacacgagatcttgtgcccccaacacagcactatctgaaaccaggatggattgaattgaaggcccctcgttttcaccaagcggaatcccatctaaaacgtaatgaggcatcactgccatcaattcttcagtatcaacccaatctctccaatcaaatgacctccaaacaatacactggaaattccaacatgcctggggggctcccaaggcaagcttacacccagaaaacaacacagctggagcacaagtcacaaatgtaccaagttgaaatgaatcaagggcagtcccaaggtacagtggaccaacatctccagttccaaaaaccctcacaccaggtgcacttctccaaaacagaccatttaccaaaagctcatgtgcagtcactgtgtggcactagatttcattttcaacaaagagcagattcccaaactgaaaaacttatgtccccagtgttgaaacagcacttgaatcaacaggcttcagagactgagccattttcaaactcacaccttttgcaacataagcctcataaacaggcagcacaaacacaaccatcccagagttcacatctccctcaaaaccagcaacagcagcaaaaattacaaataaagaataaagaggaaatactccagacttttcctcacccccaaagcaacaatgatcagcaaagagaaggatcattctttggccagactaaagtggaagaatgttttcatggtgaaaatcagtattcaaaatcaagcgagttcgagactcataatgtccaaatgggactggaggaagtacagaatataaatcgtagaaattccccttatagtcagaccatgaaatcaagtgcatgcaaaatacaggtttcttgttcaaacaatacacacctagtttcagagaataaagaacagactacacatcctgaactttttgcaggaaacaagacccaaaacttgcatcacatgcaatattttccaaataatgtgatcccaaagcaagatcttcttcacaggtgctttcaagaacaggagcagaagtcacaacaagcttcagttctacagggatataaaaatagaaaccaagatatgtctggtcaacaagctgcgcaacttgctcagcaaaggtacttgatacataaccatgcaaatgtttttcctgtgcctgaccagggaggaagtcacactcagacccctccccagaaggacactcaaaagcatgctgctctaaggtggcatctcttacagaagcaagaacagcagcaaacacagcaaccccaaactgagtcttgccatagtcagatgcacaggccaattaaggtggaacctggatgcaagccacatgcctgtatgcacacagcaccaccagaaaacaaaacatggaaaaaggtaactaagcaagagaatccacctgcaagctgtgataatgtgcagcaaaagagcatcattgagaccatggagcagcatctgaagcagtttcacgccaagtcgttatttgaccataaggctcttactctcaaatcacagaagcaagtaaaagttgaaatgtcagggccagtcacagttttgactagacaaaccactgctgcagaacttgatagccacaccccagctttagagcagcaaacaacttcttcagaaaagacaccaaccaaaagaacagctgcttctgttctcaataattttatagagtcaccttccaaattactagatactcctataaaaaatttattggatacacctgtcaagactcaatatgatttcccatcttgcagatgtgtaggtaagtgccagaaatgtactgagacacatggcgtttatccagaattagcaaatttatcttcagatatgggattttccttctttttttaaatcttgagtctggcagcaatttgtaaaggctcataaaaatctgaagcttacattttttgtcaagttaccgatgcttgtgtcttgtgaaagagaacttcacttacatgcagtttttccaaaagaattaaataatcgtgcatgtttatttttccctctcttcagatcctgtaaaatttgaatgtatctgttttagatcaattcgcctatttagctctttgtatattatctcctggagagacagctaggcagcaaaaaaacaatctattaaaatgagaaaataacgaccataggcagtctaatgtacgaactttaaatattttttaattcaaggtaaaatatattagtttcacaagatttctggctaatagggaaattattatcttcagtcttcatgagttgggggaaatgataatgctgacactcttagtgctcctaaagtttccttttctccatttatacatttggaatgttgtgatttatattcattttgattcccttttctctaaaatttcatctttttgattaaaaaatatgatacaggcatacctcagagatattgtgggtttggctccataccacaataaaatgaatattacaataaagcaagttgtaaggactttttggtttctcactgtatgtaaaagttatttatatactatactgtaacatactaagtgtgcaatagcattgtgtctaaaaaatatatactttaaaaataatttattgttaaaaaaatgccaacaattatctgggcctttagtgagtgctaatctttttgctggtggagggtcgtgcttcagtattgatcgctgtggactgatcatggtggtagttgctgaaggttgctgggatggctgtgtgtgtggcaatttcttaaaataagacaacagtgaagtgctgtatcaattgatttttccattcacaaaagatttctctgtagcatgcaatgctgtttgatagcatttaacccacagcagaatttctttgaaaattggactcagtcctctcaaactgtgctgctgctttatcaactaagtttttgtaattttctgaatcctttgttgtcatttcagcagtttacagcatcttcattggaagtatattccatctcaaacattctttgttcatccataagaagcaacttcttatcaagttttttcatgacattgcagtaactcagccccatcttcaggctctacttctaattctggttctcttgctacatctccctcatctgcagtgacctctccacggaagtcttgaactcctcaaagtaatccatgagggttggaatcaacttctaaactcctgttaatgttgatatattgaccccctcccatgaattatgaatgttcttaataacttctaaatggtgatacctttccagaaggctttcaatgtactttgcccggatccatcagaagactatcttggcagctgtagactaacaatatatttcttaaatgataagacttgaaagtcaaaagtactccttaatccataggctgcagaatcaatgttgtattaacaggcacgaaaacagcattaatcttgtgcatctccatcggagctcttgggtgactaggtgccttgagcagtaatattttgaaaggaggttttggttttgttttttgttttttttttttgttttttagcagtaagtctcaacactgggcttaaaatattcagtaaactatgttgtaaaaagatgtgttatcatccagactttgttgttccattactctacacaagcagggtacacttagcataattcttaagggccttggaattttcagaatggtaaatgagtatgggcttcaacttaaaatcatcaactgcattagcctgtaacaagagagtcagcctgtcctttgaagcaaggcattgacttctatctatgaaagtcttagatggcaccttgtttcaatagtaggctgtttagtacagccaccttcatcagtgatcttagctagatcttctgcataacttgctgcagcttctacatcagcacttgctgcctcaccttgtccttttatgttatagagacagctgcgcttcttaaactttataaaccaacttctgctagcttccaacttctcttctgcagcttcctcattctcttcatagaactgaagggagtcaaggccttgctctggattaagctttggcttaaggaatgttgtggctgacgtgatcttctatccagaccactaaagcgctctccatatcagcaataaggccgttttgctttcttacctttcatgtgttcactggagtaatttccttcaagaatttttcctttacattcacaacttggctaactggcatgcaaggcctagctttcagcctgtcttggcttttgacatgccttcctcacttagctcgtcatatctagcttttgatttaaagtggcaggcatacaactcttcctttcacttgaacacttagaggccactgtagggttattaattggcctaatttcaatattgttgtgttttagggaatagagaggcccagggagagggagagagcccaaacggctggttgatagagcaggcagaatgcacacaacatttatcagattatgtttgcaccatttaccagattatgggtacggtttgtggcaccccccaaaaattagaatagtaacatcaaagatcactgatcacagatcgccataacataaataataataaactttaaaatactgtgagaattaccaaaatgtgatacagagacatgaagtgagcacatgctgttgaaaaaaatgacactgatagacatacttaacacgtgggattgccacaaaccttcagtttgtaaaagtcacagtaactgtgactcacaaaagaacaaagcacaataaaacgaggtatgcctgtatttttaaaaaaagctttttgttaaaattcaggatatgtaataggtctgtaggaatagtgaaatatttttgctgatggatgtagatatatacgtggatagagatgaagatcttaattatagctatgcagcatagatttagtcaaagacatttgaaaagacaaatgttaaattagtgtggctaatgacctacccgtgccatgttttccctcttgcaatgagataccccacactgtgtagaaggatggagggaggactcctactgtccctctttgcgtgtggttattaagttgcctcactgggctaaaacaccacacatctcatagataatatttggtaagttgtaatcgtcttcactcttctcttatcacccacccctatcttcccacttttccatctttgttggtttgcaacagccccttctttttgcctgactctccaggattttctctcatcataaattgttctaaagtacatactaatatgggtctggattgactattcttatttgcaaaacagcaattaaatgttatagggaagtaggaagaaaaaggggtatccttgacaataaaccaagcaatattctgggggtgggatagagcaggaaattttatttttaatcttttaaaatccaagtaataggtaggcttccagttagctttaaatgttttttttttccagctcaaaaaattggattgtagttgatactacatataatacattctaattccctcactgtattctttgtttagtttcatttatttggtttaaaataattttttatcccatatctgaaatgtaatatatttttatccaacaaccagcatgtacatatacttaattatgtggcacattttctaatagatcagtccatcaatctactcattttaaagaaaaaaaaattttaaagtcacttttagagcccttaatgtgtagttgggggttaagctttgtggatgtagcctttatatttagtataattgaggtctaaaataataatcttctattatctcaacagagcaaattattgaaaaagatgaaggtcctttttatacccatctaggagcaggtcctaatgtggcagctattagagaaatcatggaagaaaggtaattaacgcaaaggcacagggcagattaacgtttatccttttgtatatgtcagaatttttccagccttcacacacaaagcagtaaacaattgtaaattgagtaattattagtaggcttagctattctagggttgccaacactacacactgtgctattcaccagagagtcacaatatttgacaggactaatagtctgctagctggcacaggctgcccactttgcgatggatgccagaaaacccaggcatgaacaggaatcggccagccaggctgccagccacaaggtactggcacaggctccaacgagaggtcccactctggctttcccacctgataataaagtgtcaaagcagaaagactggtaaagtgtggtataagaaaagaaccactgaattaaattcacctagtgttgcaaatgagtacttatctctaagttttcttttaccataaaaagagagcaagtgtgatatgttgaatagaaagagaaacatactatttacagctgcctttttttttttttttcgctatcaatcacaggtatacaagtacttgcctttactcctgcatgtagaagactcttatgagcgagataatgcagagaaggcctttcatataaatttatacagctctgagctgttcttcttctagggtgccttttcattaagaggtaggcagtattattattaaagtacttaggatacattggggcagctaggacatattcagtatcattcttgctccatttccaaattattcatttctaaattagcatgtagaagttcactaaataatcatctagtggcctggcagaaatagtgaatttccctaagtgccttttttttgttgtttttttgttttgttttttaaacaagcagtaggtggtgctttggtcataagggaagatatagtctatttctaggactattccatattttccatgtggctggatactaactatttgccagcctccttttctaaattgtgagacattcttggaggaacagttctaactaaaatctattatgactccccaagttttaaaatagctaaatttagtaagggaaaaaatagtttatgttttagaagactgaacttagcaaactaacctgaattttgtgctttgtgaaattttatatcgaaatgagctttcccattttcacccacatgtaatttacaaaatagttcattacaattatctgtacattttgatattgaggaaaaacaaggcttaaaaaccattatccagtttgcttggcgtagacctgtttaaaaaataataaaccgttcatttctcaggatgtggtcatagaataaagttatgctcaaatgttcaaatattt

SEQ ID NO: 190306 - DNA, 9679 bp, Homo sapiens
  Payload ID: 17595
  Gene Name: tet methylcytosine dioxygenase 2
  Uniprot ID: Q6N021
  ENST ID: ENST00000380013
  CDS Start-End: 387-6395
gcggccgccccgagacgccggccccgctgagtgatgagaacagacgtcaaactgccttatgaatattgatgcggaggctaggctgctttcgtagagaagcagaaggaagcaagatggctgccctttaggatttgttagaaaggagacccgactgcaactgctggattgctgcaaggctgagggacgagaacgaggctggcaaacattcagcagcacaccctctcaagattgtttacttgcctttgctcctgttgagttacaacgcttggaagcaggagatgggctcagcagcagccaataggacatgatccaggaagagcagtaagggactgagctgctgaattcaactagagggcagccttgtggatggccccgaagcaagcctgatggaacaggatagaaccaaccatgttgagggcaacagactaagtccattcctgataccatcacctcccatttgccagacagaacctctggctacaaagctccagaatggaagcccactgcctgagagagctcatccagaagtaaatggagacaccaagtggcactctttcaaaagttattatggaataccctgtatgaagggaagccagaatagtcgtgtgagtcctgactttacacaagaaagtagagggtattccaagtgtttgcaaaatggaggaataaaacgcacagttagtgaaccttctctctctgggctccttcagatcaagaaattgaaacaagaccaaaaggctaatggagaaagacgtaacttcggggtaagccaagaaagaaatccaggtgaaagcagtcaaccaaatgtctccgatttgagtgataagaaagaatctgtgagttctgtagcccaagaaaatgcagttaaagatttcaccagtttttcaacacataactgcagtgggcctgaaaatccagagcttcagattctgaatgagcaggaggggaaaagtgctaattaccatgacaagaacattgtattacttaaaaacaaggcagtgctaatgcctaatggtgctacagtttctgcctcttccgtggaacacacacatggtgaactcctggaaaaaacactgtctcaatattatccagattgtgtttccattgcggtgcagaaaaccacatctcacataaatgccattaacagtcaggctactaatgagttgtcctgtgagatcactcacccatcgcatacctcagggcagatcaattccgcacagacctctaactctgagctgcctccaaagccagctgcagtggtgagtgaggcctgtgatgctgatgatgctgataatgccagtaaactagctgcaatgctaaatacctgttcctttcagaaaccagaacaactacaacaacaaaaatcagtttttgagatatgcccatctcctgcagaaaataacatccagggaaccacaaagctagcgtctggtgaagaattctgttcaggttccagcagcaatttgcaagctcctggtggcagctctgaacggtatttaaaacaaaatgaaatgaatggtgcttacttcaagcaaagctcagtgttcactaaggattccttttctgccactaccacaccaccaccaccatcacaattgcttctttctccccctcctcctcttccacaggttcctcagcttccttcagaaggaaaaagcactctgaatggtggagttttagaagaacaccaccactaccccaaccaaagtaacacaacacttttaagggaagtgaaaatagagggtaaacctgaggcaccaccttcccagagtcctaatccatctacacatgtatgcagcccttctccgatgctttctgaaaggcctcagaataattgtgtgaacaggaatgacatacagactgcagggacaatgactgttccattgtgttctgagaaaacaagaccaatgtcagaacacctcaagcataacccaccaatttttggtagcagtggagagctacaggacaactgccagcagttgatgagaaacaaagagcaagagattctgaagggtcgagacaaggagcaaacacgagatcttgtgcccccaacacagcactatctgaaaccaggatggattgaattgaaggcccctcgttttcaccaagcggaatcccatctaaaacgtaatgaggcatcactgccatcaattcttcagtatcaacccaatctctccaatcaaatgacctccaaacaatacactggaaattccaacatgcctggggggctcccaaggcaagcttacacccagaaaacaacacagctggagcacaagtcacaaatgtaccaagttgaaatgaatcaagggcagtcccaaggtacagtggaccaacatctccagttccaaaaaccctcacaccaggtgcacttctccaaaacagaccatttaccaaaagctcatgtgcagtcactgtgtggcactagatttcattttcaacaaagagcagattcccaaactgaaaaacttatgtccccagtgttgaaacagcacttgaatcaacaggcttcagagactgagccattttcaaactcacaccttttgcaacataagcctcataaacaggcagcacaaacacaaccatcccagagttcacatctccctcaaaaccagcaacagcagcaaaaattacaaataaagaataaagaggaaatactccagacttttcctcacccccaaagcaacaatgatcagcaaagagaaggatcattctttggccagactaaagtggaagaatgttttcatggtgaaaatcagtattcaaaatcaagcgagttcgagactcataatgtccaaatgggactggaggaagtacagaatataaatcgtagaaattccccttatagtcagaccatgaaatcaagtgcatgcaaaatacaggtttcttgttcaaacaatacacacctagtttcagagaataaagaacagactacacatcctgaactttttgcaggaaacaagacccaaaacttgcatcacatgcaatattttccaaataatgtgatcccaaagcaagatcttcttcacaggtgctttcaagaacaggagcagaagtcacaacaagcttcagttctacagggatataaaaatagaaaccaagatatgtctggtcaacaagctgcgcaacttgctcagcaaaggtacttgatacataaccatgcaaatgtttttcctgtgcctgaccagggaggaagtcacactcagacccctccccagaaggacactcaaaagcatgctgctctaaggtggcatctcttacagaagcaagaacagcagcaaacacagcaaccccaaactgagtcttgccatagtcagatgcacaggccaattaaggtggaacctggatgcaagccacatgcctgtatgcacacagcaccaccagaaaacaaaacatggaaaaaggtaactaagcaagagaatccacctgcaagctgtgataatgtgcagcaaaagagcatcattgagaccatggagcagcatctgaagcagtttcacgccaagtcgttatttgaccataaggctcttactctcaaatcacagaagcaagtaaaagttgaaatgtcagggccagtcacagttttgactagacaaaccactgctgcagaacttgatagccacaccccagctttagagcagcaaacaacttcttcagaaaagacaccaaccaaaagaacagctgcttctgttctcaataattttatagagtcaccttccaaattactagatactcctataaaaaatttattggatacacctgtcaagactcaatatgatttcccatcttgcagatgtgtagagcaaattattgaaaaagatgaaggtcctttttatacccatctaggagcaggtcctaatgtggcagctattagagaaatcatggaagaaaggtttggacagaagggtaaagctattaggattgaaagagtcatctatactggtaaagaaggcaaaagttctcagggatgtcctattgctaagtgggtggttcgcagaagcagcagtgaagagaagctactgtgtttggtgcgggagcgagctggccacacctgtgaggctgcagtgattgtgattctcatcctggtgtgggaaggaatcccgctgtctctggctgacaaactctactcggagcttaccgagacgctgaggaaatacggcacgctcaccaatcgccggtgtgccttgaatgaagagagaacttgcgcctgtcaggggctggatccagaaacctgtggtgcctccttctcttttggttgttcatggagcatgtactacaatggatgtaagtttgccagaagcaagatcccaaggaagtttaagctgcttggggatgacccaaaagaggaagagaaactggagtctcatttgcaaaacctgtccactcttatggcaccaacatataagaaacttgcacctgatgcatataataatcagattgaatatgaacacagagcaccagagtgccgtctgggtctgaaggaaggccgtccattctcaggggtcactgcatgtttggacttctgtgctcatgcccacagagacttgcacaacatgcagaatggcagcacattggtatgcactctcactagagaagacaatcgagaatttggaggaaaacctgaggatgagcagcttcacgttctgcctttatacaaagtctctgacgtggatgagtttgggagtgtggaagctcaggaggagaaaaaacggagtggtgccattcaggtactgagttcttttcggcgaaaagtcaggatgttagcagagccagtcaagacttgccgacaaaggaaactagaagccaagaaagctgcagctgaaaagctttcctccctggagaacagctcaaataaaaatgaaaaggaaaagtcagccccatcacgtacaaaacaaactgaaaacgcaagccaggctaaacagttggcagaacttttgcgactttcaggaccagtcatgcagcagtcccagcagccccagcctctacagaagcagccaccacagccccagcagcagcagagaccccagcagcagcagccacatcaccctcagacagagtctgtcaactcttattctgcttctggatccaccaatccatacatgagacggcccaatccagttagtccttatccaaactcttcacacacttcagatatctatggaagcaccagccctatgaacttctattccacctcatctcaagctgcaggttcatatttgaattcttctaatcccatgaacccttaccctgggcttttgaatcagaatacccaatatccatcatatcaatgcaatggaaacctatcagtggacaactgctccccatatctgggttcctattctccccagtctcagccgatggatctgtataggtatccaagccaagaccctctgtctaagctcagtctaccacccatccatacactttaccagccaaggtttggaaatagccagagttttacatctaaatacttaggttatggaaaccaaaatatgcagggagatggtttcagcagttgtaccattagaccaaatgtacatcatgtagggaaattgcctccttatcccactcatgagatggatggccacttcatgggagccacctctagattaccacccaatctgagcaatccaaacatggactataaaaatggtgaacatcattcaccttctcacataatccataactacagtgcagctccgggcatgttcaacagctctcttcatgccctgcatctccaaaacaaggagaatgacatgctttcccacacagctaatgggttatcaaagatgcttccagctcttaaccatgatagaactgcttgtgtccaaggaggcttacacaaattaagtgatgctaatggtcaggaaaagcagccattggcactagtccagggtgtggcttctggtgcagaggacaacgatgaggtctggtcagacagcgagcagagctttctggatcctgacattgggggagtggccgtggctccaactcatgggtcaattctcattgagtgtgcaaagcgtgagctgcatgccacaacccctttaaagaatcccaataggaatcaccccaccaggatctccctcgtcttttaccagcataagagcatgaatgagccaaaacatggcttggctctttgggaagccaaaatggctgaaaaagcccgtgagaaagaggaagagtgtgaaaagtatggcccagactatgtgcctcagaaatcccatggcaaaaaagtgaaacgggagcctgctgagccacatgaaacttcagagcccacttacctgcgtttcatcaagtctcttgccgaaaggaccatgtccgtgaccacagactccacagtaactacatctccatatgccttcactcgggtcacagggccttacaacagatatatatgatatcacccccttttgttggttacctcacttgaaaagaccacaaccaacctgtcagtagtatagttctcatgacgtgggcagtggggaaaggtcacagtattcatgacaaatgtggtgggaaaaacctcagctcaccagcaacaaaagaggttatcttaccatagcacttaattttcactggctcccaagtggtcacagatggcatctaggaaaagaccaaagcattctatgcaaaaagaaggtggggaagaaagtgttccgcaatttacatttttaaacactggttctattattggacgagatgatatgtaaatgtgatcccccccccccgcttacaactctacacatctgtgaccacttttaataatatcaagtttgcatagtcatggaacacaaatcaaacaagtactgtagtattacagtgacaggaatcttaaaataccatctggtgctgaatatatgatgtactgaaatactggaattatggctttttgaaatgcagtttttactgtaatcttaacttttatttatcaaaatagctacaggaaacatgaatagcaggaaaacactgaatttgtttggatgttctaagaaatggtgctaagaaaatggtgtctttaatagctaaaaatttaatgcctttatatcatcaagatgctatcagtgtactccagtgcccttgaataataggggtaccttttcattcaagtttttatcataattacctattcttacacaagcttagtttttaaaatgtggacattttaaaggcctctggattttgctcatccagtgaagtccttgtaggacaataaacgtatatatgtacatatatacacaaacatgtatatgtgcacacacatgtatatgtataaatattttaaatggtgttttagaagcactttgtctacctaagctttgacaacttgaacaatgctaaggtactgagatgtttaaaaaacaagtttactttcattttagaatgcaaagttgatttttttaaggaaacaaagaaagcttttaaaatatttttgcttttagccatgcatctgctgatgagcaattgtgtccatttttaacacagccagttaaatccaccatggggcttactggattcaagggaatacgttagtccacaaaacatgttttctggtgctcatctcacatgctatactgtaaaacagttttatacaaaattgtatgacaagttcattgctcaaaaatgtacagttttaagaattttctattaactgcaggtaataattagctgcatgctgcagactcaacaaagctagttcactgaagcctatgctattttatggatcataggctcttcagagaactgaatggcagtctgcctttgtgttgataattatgtacattgtgacgttgtcatttcttagcttaagtgtcctctttaacaagaggattgagcagactgatgcctgcataagatgaataaacagggttagttccatgtgaatctgtcagttaaaaagaaacaaaaacaggcagctggtttgctgtggtggttttaaatcattaatttgtataaagaagtgaaagagttgtatagtaaattaaattgtaaacaaaacttttttaatgcaatgctttagtattttagtactgtaaaaaaattaaatatatacatatatatatatatatatatatatatatatatgagtttgaagcagaattcacatcatgatggtgctactcagcctgctacaaatatatcataatgtgagctaagaattcattaaatgtttgagtgatgttcctacttgtcatatacctcaacactagtttggcaataggatattgaactgagagtgaaagcattgtgtaccatcatttttttccaagtccttttttttattgttaaaaaaaaaagcataccttttttcaatacttgatttcttagcaagtataacttgaacttcaacctttttgttctaaaaattcagggatatttcagctcatgctctccctatgccaacatgtcacctgtgtttatgtaaaattgttgtaggttaataaatatattctttgtcagggatttaacccttttattttgaatcccttctattttacttgtacatgtgctgatgtaactaaaactaattttgtaaatctgttggctctttttattgtaaagaaaagcattttaaaagtttgaggaatcttttgactgtttcaagcaggaaaaaaaaattacatgaaaatagaatgcactgagttgataaagggaaaaattgtaaggcaggagtttggcaagtggctgttggccagagacttacttgtaactctctaaatgaagtttttttgatcctgtaatcactgaaggtacatactccatgtggacttcccttaaacaggcaaacacctacaggtatggtgtgcaacagattgtacaattacattttggcctaaatacatttttgcttactagtatttaaaataaattcttaatcagaggaggcctttgggttttattggtcaaatctttgtaagctggcttttgtctttttaaaaaatttcttgaatttgtggttgtgtccaatttgcaaacatttccaaaaatgtttgctttgcttacaaaccacatgattttaatgttttttgtataccataatatctagccccaaacatttgattactacatgtgcattggtgattttgatcatccattcttaatatttgatttctgtgtcacctactgtcatttgttaaactgctggccaacaagaacaggaagtatagtttggggggttggggagagtttacataaggaagagaagaaattgagtggcatattgtaaatatcagatctataattgtaaatataaaacctgcctcagttagaatgaatggaaagcagatctacaatttgctaatataggaatatcaggttgactatatagccatacttgaaaatgcttctgagtggtgtcaactttacttgaatgaatttttcatcttgattgacgcacagtgatgtacagttcacttctgaagctagtggttaacttgtgtaggaaacttttgcagtttgacactaagataacttctgtgtgcatttttctatgcttttttaaaaactagtttcatttcattttcatgagatgtttggtttataagatctgaggatggttataaatactgtaagtattgtaatgttatgaatgcaggttatttgaaagctgtttattattatatcattcctgataatgctatgtgagtgtttttaataaaatttatatttatttaatgcactctaa

SEQ ID NO: 190307 - DNA, 4935 bp, Homo sapiens
  Payload ID: 17595
  Gene Name: tet methylcytosine dioxygenase 2
  ENST ID: ENST00000394764
  CDS Start-End: 104-2017
gaaaggagacccgactgcaactgctggattgctgcaaggctgagggacgagaacgagaattcaactagagggcagccttgtggatggccccgaagcaagcctgatggaacaggatagaaccaaccatgttgagggcaacagactaagtccattcctgataccatcacctcccatttgccagacagaacctctggctacaaagctccagaatggaagcccactgcctgagagagctcatccagaagtaaatggagacaccaagtggcactctttcaaaagttattatggaataccctgtatgaagggaagccagaatagtcgtgtgagtcctgactttacacaagaaagtagagggtattccaagtgtttgcaaaatggaggaataaaacgcacagttagtgaaccttctctctctgggctccttcagatcaagaaattgaaacaagaccaaaaggctaatggagaaagacgtaacttcggggtaagccaagaaagaaatccaggtgaaagcagtcaaccaaatgtctccgatttgagtgataagaaagaatctgtgagttctgtagcccaagaaaatgcagttaaagatttcaccagtttttcaacacataactgcagtgggcctgaaaatccagagcttcagattctgaatgagcaggaggggaaaagtgctaattaccatgacaagaacattgtattacttaaaaacaaggcagtgctaatgcctaatggtgctacagtttctgcctcttccgtggaacacacacatggtgaactcctggaaaaaacactgtctcaatattatccagattgtgtttccattgcggtgcagaaaaccacatctcacataaatgccattaacagtcaggctactaatgagttgtcctgtgagatcactcacccatcgcatacctcagggcagatcaattccgcacagacctctaactctgagctgcctccaaagccagctgcagtggtgagtgaggcctgtgatgctgatgatgctgataatgccagtaaactagctgcaatgctaaatacctgttcctttcagaaaccagaacaactacaacaacaaaaatcagtttttgagatatgcccatctcctgcagaaaataacatccagggaaccacaaagctagcgtctggtgaagaattctgttcaggttccagcagcaatttgcaagctcctggtggcagctctgaacggtatttaaaacaaaatgaaatgaatggtgcttacttcaagcaaagctcagtgttcactaaggattccttttctgccactaccacaccaccaccaccatcacaattgcttctttctccccctcctcctcttccacaggttcctcagcttccttcagaaggaaaaagcactctgaatggtggagttttagaagaacaccaccactaccccaaccaaagtaacacaacacttttaagggaagtgaaaatagagggtaaacctgaggcaccaccttcccagagtcctaatccatctacacatgtatgcagcccttctccgatgctttctgaaaggcctcagaataattgtgtgaacaggaatgacatacagactgcagggacaatgactgttccattgtgttctgagaaaacaagaccaatgtcagaacacctcaagcataacccaccaatttttggtagcagtggagagctacaggacaactgccagcagttgatgagaaacaaagagcaagagattctgaagggtcgagacaaggagcaaacacgagatcttgtgcccccaacacagcactatctgaaaccaggatggattgaattgaaggcccctcgttttcaccaagcggaatcccatctaaaacgtaatgaggcatcactgccatcaattcttcagtatcaacccaatctctccaatcaaatgacctccaaacaatacactggaaattccaacatgcctggggggctcccaaggcaagcttacacccagaaaacaacacagctgagcacaagtcacaaatgtaccaagttgaaatgaatcaagggcagtcccaaggtacagtggaccaacatctccagttccaaaaaccctcacaccaggtgcacttctccaaaacagaccatttaccaaaagctcatgtgcagtcactgtgtggcactagatttcattttcaacaaagagcagattcccaaactgaaaaacttatgtccccagtgttgaaacagcacttgaatcaacaggcttcagagactgagccattttcaaactcacaccttttgcaacataagcctcataaacaggcagcacaaacacaaccatcccagagttcacatctccctcaaaaccagcaacagcagcaaaaattacaaataaagaataaagaggaaatactccagacttttcctcacccccaaagcaacaatgatcagcaaagagaaggatcattctttggccagactaaagtggaagaatgttttcatggtgaaaatcagtattcaaaatcaagcgagttcgagactcataatgtccaaatgggactggaggaagtacagaatataaatcgtagaaattccccttatagtcagaccatgaaatcaagtgcatgcaaaatacaggtttcttgttcaaacaatacacacctagtttcagagaataaagaacagactacacatcctgaactttttgcaggaaacaagacccaaaacttgcatcacatgcaatattttccaaataatgtgatcccaaagcaagatcttcttcacaggtgctttcaagaacaggagcagaagtcacaacaagcttcagttctacagggatataaaaatagaaaccaagatatgtctggtcaacaagctgcgcaacttgctcagcaaaggtacttgatacataaccatgcaaatgtttttcctgtgcctgaccagggaggaagtcacactcagacccctccccagaaggacactcaaaagcatgctgctctaaggtggcatctcttacagaagcaagaacagcagcaaacacagcaaccccaaactgagtcttgccatagtcagatgcacaggccaattaaggtggaacctggatgcaagccacatgcctgtatgcacacagcaccaccagaaaacaaaacatggaaaaaggtaactaagcaagagaatccacctgcaagctgtgataatgtgcagcaaaagagcatcattgagaccatggagcagcatctgaagcagtttcacgccaagtcgttatttgaccataaggctcttactctcaaatcacagaagcaagtaaaagttgaaatgtcagggccagtcacagttttgactagacaaaccactgctgcagaacttgatagccacaccccagctttagagcagcaaacaacttcttcagaaaagacaccaaccaaaagaacagctgcttctgttctcaataattttatagagtcaccttccaaattactagatactcctataaaaaatttattggatacacctgtcaagactcaatatgatttcccatcttgcagatgtgtagagcaaattattgaaaaagatgaaggtcctttttatacccatctaggagcaggtcctaatgtggcagctattagagaaatcatggaagaaaggtaattaacgcaaaggcacagggcagattaacgtttatccttttgtatatgtcagaatttttccagccttcacacacaaagcagtaaacaattgtaaattgagtaattattagtaggcttagctattctagggttgccaacactacacactgtgctattcaccagagagtcacaatatttgacaggactaatagtctgctagctggcacaggctgcccactttgcgatggatgccagaaaacccaggcatgaacaggaatcggccagccaggctgccagccacaaggtactggcacaggctccaacgagaggtcccactctggctttcccacctgataataaagtgtcaaagcagaaagactggtaaagtgtggtataagaaaagaaccactgaattaaattcacctagtgttgcaaatgagtacttatctctaagttttcttttaccataaaaagagagcaagtgtgatatgttgaatagaaagagaaacatactatttacagctgcctttttttttttttttcgctatcaatcacaggtatacaagtacttgcctttactcctgcatgtagaagactcttatgagcgagataatgcagagaaggcctttcatataaatttatacagctctgagctgttcttcttctagggtgccttttcattaagaggtaggcagtattattattaaagtacttaggatacattggggcagctaggacatattcagtatcattcttgctccatttccaaattattcatttctaaattagcatgtagaagttcactaaataatcatctagtggcctggcagaaatagtgaatttccctaagtgccttttttttgttgtttttttgttttgttttttaaacaagcagtaggtggtgctttggtcataagggaagatatagtctatttctaggactattccatattttccatgtggctggatactaactatttgccagcctccttttctaaattgtgagacattcttggaggaacagttctaactaaaatctattatgactccccaagttttaaaatagctaaatttagtaagggaaaaaatagtttatgttttagaagactgaacttagcaaactaacctgaattttgtgctttgtgaaattttatatcgaaatgagctttcccattttcacccacatgtaatttacaaaatagttcattacaattatctgtacattttgatattgaggaaaaacaaggcttaaaaaccattatccagtttgcttggcgtagacctgtttaaaaaataataaaccgttcatttctcaggatgtggtcatagaataaagttatgctcaaatgtt

SEQ ID NO: 190308 - DNA, 4973 bp, Homo sapiens
  Payload ID: 17595
  Gene Name: tet methylcytosine dioxygenase 2
  ENST ID: ENST00000413648
  CDS Start-End: 141-3644
agaaggaagcaagatggctgccctttaggatttgttagaaaggagacccgactgcaactgctggattgctgcaaggctgagggacgagaacgagaattcaactagagggcagccttgtggatggccccgaagcaagcctgatggaacaggatagaaccaaccatgttgagggcaacagactaagtccattcctgataccatcacctcccatttgccagacagaacctctggctacaaagctccagaatggaagcccactgcctgagagagctcatccagaagtaaatggagacaccaagtggcactctttcaaaagttattatggaataccctgtatgaagggaagccagaatagtcgtgtgagtcctgactttacacaagaaagtagagggtattccaagtgtttgcaaaatggaggaataaaacgcacagttagtgaaccttctctctctgggctccttcagatcaagaaattgaaacaagaccaaaaggctaatggagaaagacgtaacttcggggtaagccaagaaagaaatccaggtgaaagcagtcaaccaaatgtctccgatttgagtgataagaaagaatctgtgagttctgtagcccaagaaaatgcagttaaagatttcaccagtttttcaacacataactgcagtgggcctgaaaatccagagcttcagattctgaatgagcaggaggggaaaagtgctaattaccatgacaagaacattgtattacttaaaaacaaggcagtgctaatgcctaatggtgctacagtttctgcctcttccgtggaacacacacatggtgaactcctggaaaaaacactgtctcaatattatccagattgtgtttccattgcggtgcagaaaaccacatctcacataaatgccattaacagtcaggctactaatgagttgtcctgtgagatcactcacccatcgcatacctcagggcagatcaattccgcacagacctctaactctgagctgcctccaaagccagctgcagtggtgagtgaggcctgtgatgctgatgatgctgataatgccagtaaactagctgcaatgctaaatacctgttcctttcagaaaccagaacaactacaacaacaaaaatcagtttttgagatatgcccatctcctgcagaaaataacatccagggaaccacaaagctagcgtctggtgaagaattctgttcaggttccagcagcaatttgcaagctcctggtggcagctctgaacggtatttaaaacaaaatgaaatgaatggtgcttacttcaagcaaagctcagtgttcactaaggattccttttctgccactaccacaccaccaccaccatcacaattgcttctttctccccctcctcctcttccacaggttcctcagcttccttcagaaggaaaaagcactctgaatggtggagttttagaagaacaccaccactaccccaaccaaagtaacacaacacttttaagggaagtgaaaatagagggtaaacctgaggcaccaccttcccagagtcctaatccatctacacatgtatgcagcccttctccgatgctttctgaaaggcctcagaataattgtgtgaacaggaatgacatacagactgcagggacaatgactgttccattgtgttctgagaaaacaagaccaatgtcagaacacctcaagcataacccaccaatttttggtagcagtggagagctacaggacaactgccagcagttgatgagaaacaaagagcaagagattctgaagggtcgagacaaggagcaaacacgagatcttgtgcccccaacacagcactatctgaaaccaggatggattgaattgaaggcccctcgttttcaccaagcggaatcccatctaaaacgtaatgaggcatcactgccatcaattcttcagtatcaacccaatctctccaatcaaatgacctccaaacaatacactggaaattccaacatgcctggggggctcccaaggcaagcttacacccagaaaacaacacagctggagcacaagtcacaaatgtaccaagttgaaatgaatcaagggcagtcccaaggtacagtggaccaacatctccagttccaaaaaccctcacaccaggtgcacttctccaaaacagaccatttaccaaaagctcatgtgcagtcactgtgtggcactagatttcattttcaacaaagagcagattcccaaactgaaaaacttatgtccccagtgttgaaacagcacttgaatcaacaggcttcagagactgagccattttcaaactcacaccttttgcaacataagcctcataaacaggcagcacaaacacaaccatcccagagttcacatctccctcaaaaccagcaacagcagcaaaaattacaaataaagaataaagaggaaatactccagacttttcctcacccccaaagcaacaatgatcagcaaagagaaggatcattctttggccagactaaagtggaagaatgttttcatggtgaaaatcagtattcaaaatcaagcgagttcgagactcataatgtccaaatgggactggaggaagtacagaatataaatcgtagaaattccccttatagtcagaccatgaaatcaagtgcatgcaaaatacaggtttcttgttcaaacaatacacacctagtttcagagaataaagaacagactacacatcctgaactttttgcaggaaacaagacccaaaacttgcatcacatgcaatattttccaaataatgtgatcccaaagcaagatcttcttcacaggtgctttcaagaacaggagcagaagtcacaacaagcttcagttctacagggatataaaaatagaaaccaagatatgtctggtcaacaagctgcgcaacttgctcagcaaaggtacttgatacataaccatgcaaatgtttttcctgtgcctgaccagggaggaagtcacactcagacccctccccagaaggacactcaaaagcatgctgctctaaggtggcatctcttacagaagcaagaacagcagcaaacacagcaaccccaaactgagtcttgccatagtcagatgcacaggccaattaaggtggaacctggatgcaagccacatgcctgtatgcacacagcaccaccagaaaacaaaacatggaaaaaggtaactaagcaagagaatccacctgcaagctgtgataatgtgcagcaaaagagcatcattgagaccatggagcagcatctgaagcagtttcacgccaagtcgttatttgaccataaggctcttactctcaaatcacagaagcaagtaaaagttgaaatgtcagggccagtcacagttttgactagacaaaccactgctgcagaacttgatagccacaccccagctttagagcagcaaacaacttcttcagaaaagacaccaaccaaaagaacagctgcttctgttctcaataattttatagagtcaccttccaaattactagatactcctataaaaaatttattggatacacctgtcaagactcaatatgatttcccatcttgcagatgtgtagagcaaattattgaaaaagatgaaggtcctttttatacccatctaggagcaggtcctaatgtggcagctattagagaaatcatggaagaaaggtaattaacgcaaaggcacagggcagattaacgtttatccttttgtatatgtcagaatttttccagccttcacacacaaagcagtaaacaattgtaaattgagtaattattagtaggcttagctattctagggttgccaacactacacactgtgctattcaccagagagtcacaatatttgacaggactaatagtctgctagctggcacaggctgcccactttgcgatggatgccagaaaacccaggcatgaacaggaatcggccagccaggctgccagccacaaggtactggcacaggctccaacgagaggtcccactctggctttcccacctgataataaagtgtcaaagcagaaagactggtaaagtgtggtataagaaaagaaccactgaattaaattcacctagtgttgcaaatgagtacttatctctaagttttcttttaccataaaaagagagcaagtgtgatatgttgaatagaaagagaaacatactatttacagctgcctttttttttttttttcgctatcaatcacaggtatacaagtacttgcctttactcctgcatgtagaagactcttatgagcgagataatgcagagaaggcctttcatataaatttatacagctctgagctgttcttcttctagggtgccttttcattaagaggtaggcagtattattattaaagtacttaggatacattggggcagctaggacatattcagtatcattcttgctccatttccaaattattcatttctaaattagcatgtagaagttcactaaataatcatctagtggcctggcagaaatagtgaatttccctaagtgccttttttttgttgtttttttgttttgttttttaaacaagcagtaggtggtgctttggtcataagggaagatatagtctatttctaggactattccatattttccatgtggctggatactaactatttgccagcctccttttctaaattgtgagacattcttggaggaacagttctaactaaaatctattatgactccccaagttttaaaatagctaaatttagtaagggaaaaaatagtttatgttttagaagactgaacttagcaaactaacctgaattttgtgctttgtgaaattttatatcgaaatgagctttcccattttcacccacatgtaatttacaaaatagttcattacaattatctgtacattttgatattgaggaaaaacaaggcttaaaaaccattatccagtttgcttggcgtagacctgtttaaaaaataataaaccgttcatttctcaggatgtggtcatagaataaagttatgctcaaatgtt

SEQ ID NO: 190309 - DNA, 10166 bp, Homo sapiens
  Payload ID: 17595
  Gene Name: tet methylcytosine dioxygenase 2
  ENST ID: ENST00000513237
  CDS Start-End: 798-6869
ccgtgccatcccaacctcccacctcgcccccaaccttcgcgcttgctctgcttcttctcccaggggtggagacccgccgaggtccccggggttcccgagggctgcacccttccccgcgctcgccagccctggcccctactccgcgctggtccgggcgcaccactccccccgcgccactgcacggcgtgagggcagcccaggtctccactgcgcgccccgctgtacggccccaggtgccgccggcctttgtgctggacgcccggtgcggggggctaattccctgggagccggggctgagggccccagggcggcggcgcaggccggggcggagcgggaggaggccggggcggagcaggaggaggcccgggcggaggaggagagccggcggtagcggcagtggcagcggcgagagcttgggcggccgccgccgcctcctcgcgagcgccgcgcgcccgggtcccgctcgcatgcaagtcacgtccgccccctcggcgcggccgccccgagacgccggccccgctgagtgatgagaacagacgtcaaactgccttatgaatattgatgcggaggctaggctgctttcgtagagaagcagaaggaagcaagatggctgccctttaggatttgttagaaaggagacccgactgcaactgctggattgctgcaaggctgagggacgagaacgaggctggcaaacattcagcagcacaccctctcaagattgtttacttgcctttgctcctgttgagttacaacgcttggaagcaggagatgggctcagcagcagccaataggacatgatccaggaagagcaaattcaactagagggcagccttgtggatggccccgaagcaagcctgatggaacaggatagaaccaaccatgttgagggcaacagactaagtccattcctgataccatcacctcccatttgccagacagaacctctggctacaaagctccagaatggaagcccactgcctgagagagctcatccagaagtaaatggagacaccaagtggcactctttcaaaagttattatggaataccctgtatgaagggaagccagaatagtcgtgtgagtcctgactttacacaagaaagtagagggtattccaagtgtttgcaaaatggaggaataaaacgcacagttagtgaaccttctctctctgggctccttcagatcaagaaattgaaacaagaccaaaaggctaatggagaaagacgtaacttcggggtaagccaagaaagaaatccaggtgaaagcagtcaaccaaatgtctccgatttgagtgataagaaagaatctgtgagttctgtagcccaagaaaatgcagttaaagatttcaccagtttttcaacacataactgcagtgggcctgaaaatccagagcttcagattctgaatgagcaggaggggaaaagtgctaattaccatgacaagaacattgtattacttaaaaacaaggcagtgctaatgcctaatggtgctacagtttctgcctcttccgtggaacacacacatggtgaactcctggaaaaaacactgtctcaatattatccagattgtgtttccattgcggtgcagaaaaccacatctcacataaatgccattaacagtcaggctactaatgagttgtcctgtgagatcactcacccatcgcatacctcagggcagatcaattccgcacagacctctaactctgagctgcctccaaagccagctgcagtggtgagtgaggcctgtgatgctgatgatgctgataatgccagtaaactagctgcaatgctaaatacctgttcctttcagaaaccagaacaactacaacaacaaaaatcagtttttgagatatgcccatctcctgcagaaaataacatccagggaaccacaaagctagcgtctggtgaagaattctgttcaggttccagcagcaatttgcaagctcctggtggcagctctgaacggtatttaaaacaaaatgaaatgaatggtgcttacttcaagcaaagctcagtgttcactaaggattccttttctgccactaccacaccaccaccaccatcacaattgcttctttctccccctcctcctcttccacaggttcctcagcttccttcagaaggaaaaagcactctgaatggtggagttttagaagaacaccaccactaccccaaccaaagtaacacaacacttttaagggaagtgaaaatagagggtaaacctgaggcaccaccttcccagagtcctaatccatctacacatgtatgcagcccttctccgatgctttctgaaaggcctcagaataattgtgtgaacaggaatgacatacagactgcagggacaatgactgttccattgtgttctgagaaaacaagaccaatgtcagaacacctcaagcataacccaccaatttttggtagcagtggagagctacaggacaactgccagcagttgatgagaaacaaagagcaagagattctgaagggtcgagacaaggagcaaacacgagatcttgtgcccccaacacagcactatctgaaaccaggatggattgaattgaaggcccctcgttttcaccaagcggaatcccatctaaaacgtaatgaggcatcactgccatcaattcttcagtatcaacccaatctctccaatcaaatgacctccaaacaatacactggaaattccaacatgcctggggggctcccaaggcaagcttacacccagaaaacaacacagctggagcacaagtcacaaatgtaccaagttgaaatgaatcaagggcagtcccaaggtacagtggaccaacatctccagttccaaaaaccctcacaccaggtgcacttctccaaaacagaccatttaccaaaagctcatgtgcagtcactgtgtggcactagatttcattttcaacaaagagcagattcccaaactgaaaaacttatgtccccagtgttgaaacagcacttgaatcaacaggcttcagagactgagccattttcaaactcacaccttttgcaacataagcctcataaacaggcagcacaaacacaaccatcccagagttcacatctccctcaaaaccagcaacagcagcaaaaattacaaataaagaataaagaggaaatactccagacttttcctcacccccaaagcaacaatgatcagcaaagagaaggatcattctttggccagactaaagtggaagaatgttttcatggtgaaaatcagtattcaaaatcaagcgagttcgagactcataatgtccaaatgggactggaggaagtacagaatataaatcgtagaaattccccttatagtcagaccatgaaatcaagtgcatgcaaaatacaggtttcttgttcaaacaatacacacctagtttcagagaataaagaacagactacacatcctgaactttttgcaggaaacaagacccaaaacttgcatcacatgcaatattttccaaataatgtgatcccaaagcaagatcttcttcacaggtgctttcaagaacaggagcagaagtcacaacaagcttcagttctacagggatataaaaatagaaaccaagatatgtctggtcaacaagctgcgcaacttgctcagcaaaggtacttgatacataaccatgcaaatgtttttcctgtgcctgaccagggaggaagtcacactcagacccctccccagaaggacactcaaaagcatgctgctctaaggtggcatctcttacagaagcaagaacagcagcaaacacagcaaccccaaactgagtcttgccatagtcagatgcacaggccaattaaggtggaacctggatgcaagccacatgcctgtatgcacacagcaccaccagaaaacaaaacatggaaaaaggtaactaagcaagagaatccacctgcaagctgtgataatgtgcagcaaaagagcatcattgagaccatggagcagcatctgaagcagtttcacgccaagtcgttatttgaccataaggctcttactctcaaatcacagaagcaagtaaaagttgaaatgtcagggccagtcacagttttgactagacaaaccactgctgcagaacttgatagccacaccccagctttagagcagcaaacaacttcttcagaaaagacaccaaccaaaagaacagctgcttctgttctcaataattttatagagtcaccttccaaattactagatactcctataaaaaatttattggatacacctgtcaagactcaatatgatttcccatcttgcagatgtgtagagcaaattattgaaaaagatgaaggtcctttttatacccatctaggagcaggtcctaatgtggcagctattagagaaatcatggaagaaaggtttggacagaagggtaaagctattaggattgaaagagtcatctatactggtaaagaaggcaaaagttctcagggatgtcctattgctaagtgggtggttcgcagaagcagcagtgaagagaagctactgtgtttggtgcgggagcgagctggccacacctgtgaggctgcagtgattgtgattctcatcctggtgtgggaaggaatcccgctgtctctggctgacaaactctactcggagcttaccgagacgctgaggaaatacggcacgctcaccaatcgccggtgtgccttgaatgaagagagaacttgcgcctgtcaggggctggatccagaaacctgtggtgcctccttctcttttggttgttcatggagcatgtactacaatggatgtaagtttgccagaagcaagatcccaaggaagtttaagctgcttggggatgacccaaaagaggaagagaaactggagtctcatttgcaaaacctgtccactcttatggcaccaacatataagaaacttgcacctgatgcatataataatcagattgaatatgaacacagagcaccagagtgccgtctgggtctgaaggaaggccgtccattctcaggggtcactgcatgtttggacttctgtgctcatgcccacagagacttgcacaacatgcagaatggcagcacattggtatgcactctcactagagaagacaatcgagaatttggaggaaaacctgaggatgagcagcttcacgttctgcctttatacaaagtctctgacgtggatgagtttgggagtgtggaagctcaggaggagaaaaaacggagtggtgccattcaggtactgagttcttttcggcgaaaagtcaggatgttagcagagccagtcaagacttgccgacaaaggaaactagaagccaagaaagctgcagctgaaaagctttcctccctggagaacagctcaaataaaaatgaaaaggaaaagtcagccccatcacgtacaaaacaaactgaaaacgcaagccaggctaaacagttggcagaacttttgcgactttcaggaccagtcatgcagcagtcccagcagccccagcctctacagaagcagccaccacagccccagcagcagcagagaccccagcagcagcagccacatcaccctcagacagagtctgtcaactcttattctgcttctggatccaccaatccatacatgagacggcccaatccagttagtccttatccaaactcttcacacacttcagatatctatggaagcaccagccctatgaacttctattccacctcatctcaagctgcaggttcatatttgaattcttctaatcccatgaacccttaccctgggcttttgaatcagaatacccaatatccatcatatcaatgcaatggaaacctatcagtggacaactgctccccatatctgggttcctattctccccagtctcagccgatggatctgtataggtatccaagccaagaccctctgtctaagctcagtctaccacccatccatacactttaccagccaaggtttggaaatagccagagttttacatctaaatacttaggttatggaaaccaaaatatgcagggagatggtttcagcagttgtaccattagaccaaatgtacatcatgtagggaaattgcctccttatcccactcatgagatggatggccacttcatgggagccacctctagattaccacccaatctgagcaatccaaacatggactataaaaatggtgaacatcattcaccttctcacataatccataactacagtgcagctccgggcatgttcaacagctctcttcatgccctgcatctccaaaacaaggagaatgacatgctttcccacacagctaatgggttatcaaagatgcttccagctcttaaccatgatagaactgcttgtgtccaaggaggcttacacaaattaagtgatgctaatggtcaggaaaagcagccattggcactagtccagggtgtggcttctggtgcagaggacaacgatgaggtctggtcagacagcgagcagagctttctggatcctgacattgggggagtggccgtggctccaactcatgggtcaattctcattgagtgtgcaaagcgtgagctgcatgccacaacccctttaaagaatcccaataggaatcaccccaccaggatctccctcgtcttttaccagcataagagcatgaatgagccaaaacatggcttggctctttgggaagccaaaatggctgaaaaagcccgtgagaaagaggaagagtgtgaaaagtatggcccagactatgtgcctcagaaatcccatggcaaaaaagtgaaacgggagcctgctgagccacatgaaacttcagagcccacttacctgcgtttcatcaagtctcttgccgaaaggaccatgtccgtgaccacagactccacagtaactacatctccatatgccttcactcgggtcacagggccttacaacagatatatatgatatcacccccttttgttggttacctcacttgaaaagaccacaaccaacctgtcagtagtatagttctcatgacgtgggcagtggggaaaggtcacagtattcatgacaaatgtggtgggaaaaacctcagctcaccagcaacaaaagaggttatcttaccatagcacttaattttcactggctcccaagtggtcacagatggcatctaggaaaagaccaaagcattctatgcaaaaagaaggtggggaagaaagtgttccgcaatttacatttttaaacactggttctattattggacgagatgatatgtaaatgtgatcccccccccccgcttacaactctacacatctgtgaccacttttaataatatcaagtttgcatagtcatggaacacaaatcaaacaagtactgtagtattacagtgacaggaatcttaaaataccatctggtgctgaatatatgatgtactgaaatactggaattatggctttttgaaatgcagtttttactgtaatcttaacttttatttatcaaaatagctacaggaaacatgaatagcaggaaaacactgaatttgtttggatgttctaagaaatggtgctaagaaaatggtgtctttaatagctaaaaatttaatgcctttatatcatcaagatgctatcagtgtactccagtgcccttgaataataggggtaccttttcattcaagtttttatcataattacctattcttacacaagcttagtttttaaaatgtggacattttaaaggcctctggattttgctcatccagtgaagtccttgtaggacaataaacgtatatatgtacatatatacacaaacatgtatatgtgcacacacatgtatatgtataaatattttaaatggtgttttagaagcactttgtctacctaagctttgacaacttgaacaatgctaaggtactgagatgtttaaaaaacaagtttactttcattttagaatgcaaagttgatttttttaaggaaacaaagaaagcttttaaaatatttttgcttttagccatgcatctgctgatgagcaattgtgtccatttttaacacagccagttaaatccaccatggggcttactggattcaagggaatacgttagtccacaaaacatgttttctggtgctcatctcacatgctatactgtaaaacagttttatacaaaattgtatgacaagttcattgctcaaaaatgtacagttttaagaattttctattaactgcaggtaataattagctgcatgctgcagactcaacaaagctagttcactgaagcctatgctattttatggatcataggctcttcagagaactgaatggcagtctgcctttgtgttgataattatgtacattgtgacgttgtcatttcttagcttaagtgtcctctttaacaagaggattgagcagactgatgcctgcataagatgaataaacagggttagttccatgtgaatctgtcagttaaaaagaaacaaaaacaggcagctggtttgctgtggtggttttaaatcattaatttgtataaagaagtgaaagagttgtatagtaaattaaattgtaaacaaaacttttttaatgcaatgctttagtattttagtactgtaaaaaaattaaatatatacatatatatatatatatatatatatatatatatgagtttgaagcagaattcacatcatgatggtgctactcagcctgctacaaatatatcataatgtgagctaagaattcattaaatgtttgagtgatgttcctacttgtcatatacctcaacactagtttggcaataggatattgaactgagagtgaaagcattgtgtaccatcatttttttccaagtccttttttttattgttaaaaaaaaaagcataccttttttcaatacttgatttcttagcaagtataacttgaacttcaacctttttgttctaaaaattcagggatatttcagctcatgctctccctatgccaacatgtcacctgtgtttatgtaaaattgttgtaggttaataaatatattctttgtcagggatttaacccttttattttgaatcccttctattttacttgtacatgtgctgatgtaactaaaactaattttgtaaatctgttggctctttttattgtaaagaaaagcattttaaaagtttgaggaatcttttgactgtttcaagcaggaaaaaaaaattacatgaaaatagaatgcactgagttgataaagggaaaaattgtaaggcaggagtttggcaagtggctgttggccagagacttacttgtaactctctaaatgaagtttttttgatcctgtaatcactgaaggtacatactccatgtggacttcccttaaacaggcaaacacctacaggtatggtgtgcaacagattgtacaattacattttggcctaaatacatttttgcttactagtatttaaaataaattcttaatcagaggaggcctttgggttttattggtcaaatctttgtaagctggcttttgtctttttaaaaaatttcttgaatttgtggttgtgtccaatttgcaaacatttccaaaaatgtttgctttgcttacaaaccacatgattttaatgttttttgtataccataatatctagccccaaacatttgattactacatgtgcattggtgattttgatcatccattcttaatatttgatttctgtgtcacctactgtcatttgttaaactgctggccaacaagaacaggaagtatagtttggggggttggggagagtttacataaggaagagaagaaattgagtggcatattgtaaatatcagatctataattgtaaatataaaacctgcctcagttagaatgaatggaaagcagatctacaatttgctaatataggaatatcaggttgactatatagccatacttgaaaatgcttctgagtggtgtcaactttacttgaatgaatttttcatcttgattgacgcacagtgatgtacagttcacttctgaagctagtggttaacttgtgtaggaaacttttgcagtttgacactaagataacttctgtgtgcatttttctatgcttttttaaaaactagtttcatttcattttcatgagatgtttggtttataagatctgaggatggttataaatactgtaagtattgtaatgttatgaatgcaggttatttgaaagctgtttattattatatcattcctgataatgctatgtgagtgtttttaataaaatttatatttatttaatgcactctaagtgttgtcttcct

SEQ ID NO: 190310 - DNA, 865 bp, Homo sapiens
  Payload ID: 17595
  Gene Name: tet methylcytosine dioxygenase 2
  ENST ID: ENST00000514870
  CDS Start-End: 536-865
atcagctgtagggtctgggtctgggtttgtgtctgcctcctcctaccttcttatccccctttagggggctgtacgaagtgaatgtcacagggagtggaattggagtacactgagtgggttttttttttccttaagtccgcgcgttttgttagcggcgctgagtgaaagaggaaagaatagtttctctggttccccaaacaagaccagaactcacttttctcaaggtacataagtcagcgctgggctgagccttccagcctggggaatgtatgtaagagaatttatggacaaatctgtgtcccggctttgtgcttctcccgaatcagcttcgtttggttccttggctggcaaacattcagcagcacaccctctcaagattgtttacttgcctttgctcctgttgagttacaacgcttggaagcaggagatgggctcagcagcagccaataggacatgatccaggaagagcagtaagggactgagctgctgaattcaactagagggcagccttgtggatggccccgaagcaagcctgatggaacaggatagaaccaaccatgttgagggcaacagactaagtccattcctgataccatcacctcccatttgccagacagaacctctggctacaaagctccagaatggaagcccactgcctgagagagctcatccagaagtaaatggagacaccaagtggcactctttcaaaagttattatggaataccctgtatgaagggaagccagaatagtcgtgtgagtcctgactttacacaagaaagtagagggtattccaagtgtttgcaaaatggaggaataaaacgcacagttagtgaaccttctctctctgggctccttcagatcaag

SEQ ID NO: 190311 - DNA, 10166 bp, Homo sapiens; identical to SEQ ID NO: 190309
  Payload ID: 17595
  Gene Name: tet methylcytosine dioxygenase 2
  Uniprot ID: Q6N021
  ENST ID: ENST00000540549
  CDS Start-End: 861-6869

SEQ ID NO: 190312 - DNA, 5174 bp, Homo sapiens
  Payload ID: 17596
  Gene Name: tet methylcytosine dioxygenase 3
  ENST ID: ENST00000305799
  CDS Start-End: 66-5174
cctcctctgcagtgcctccctccgtgcgctccctccggcggggataatgggaggcccgccggccgatgcaccagaggaggccggccgaggtggaaataaaggctggtgaaggagccgggccgtggggacaaggagcggctgtcaagacaggctcagagctcagcccagttgatggacctgttccaggtcagatggactcagggccagtgtaccatggggactcacggcagctaagcgcctcaggggtgccggtcaatggtgctagagagcccgctggacccagtctgctggggactgggggtccttggcgggtagaccaaaagcccgactgggaggctgccccaggcccagctcatactgctcgcctggaagatgcccacgatctggtggccttttcggctgtggccgaagctgtgtcctcttatggggcccttagcacccggctctatgaaaccttcaaccgtgagatgagtcgtgaggctgggaacaacagcaggggaccccggccagggcctgagggctgctctgctggcagcgaagaccttgacacactgcagacggccctggccctcgcgcggcatggtatgaaaccacccaactgcaactgcgatggcccagaatgccctgactacctcgagtggctggaggggaagatcaagtctgtggtcatggaaggaggggaggagcggcccaggctcccagggcctctgcctcctggtgaggccggcctcccagcaccaagcaccaggccactcctcagctcagaggtgccccagatctctccccaagagggcctgcccctgtcccagagtgccctgagcattgccaaggaaaaaaacatcagcttgcagaccgccattgccattgaggccctcacacagctctcctctgccctcccgcagccttctcattccaccccccaggcttcttgcccccttcctgaggccttgtcacctcctgcccctttcagatctccccagtcttacctccgggctccctcatggcctgtggttcctcctgaagagcactcatcttttgctcctgatagctctgccttccctccagcaactcctagaactgagttccctgaagcctggggcactgacacccctccagcaacgccccggagctcctggcccatgcctcgcccaagccccgatcccatggctgaactggagcagttgttgggcagcgccagtgattacatccagtcagtattcaagcggcctgaggccctgcctaccaagcccaaggtcaaggtggaggcaccctcttcctccccggccccggccccatcccctgtacttcagagggaggctcccacgccatcctcggagcccgacacccaccagaaggcccagaccgccctgcagcagcacctccaccacaagcgcagcctcttcctagaacaggtgcacgacacctccttccctgctccttcagagccttctgctcctggctggtggcccccaccaagttcacctgtcccacggcttccagacagaccacccaaggagaagaagaagaagctcccaacaccagctggaggtcccgtgggaacggagaaagctgcccctgggatcaagcccagtgtccgaaagcccattcagatcaagaagtccaggccccgggaagcacagcccctcttcccacctgtccgacagattgtcctggaagggcttaggtccccagcctcccaggaagtgcaggctcatccaccggcccctctgcctgcctcacagggctctgctgtgcccctgcccccagaaccttctcttgcgctatttgcacctagtccctccagggacagcctgctgccccctactcaggaaatgaggtcccccagccccatgacagccttgcagccaggctccactggccctcttccccctgccgatgacaagctggaagagctcatccggcagtttgaggctgaatttggagatagctttgggcttcccggccccccttctgtgcccattcaggaccccgagaaccagcaaacatgtctcccagcccctgagagcccctttgctacccgttcccccaagcaaatcaagattgagtcttcgggggctgtgactgtgctctcaaccacctgcttccattcagaggagggaggacaggaggccacacccaccaaggctgagaacccactcacacccaccctcagtggcttcttggagtcacctcttaagtacctggacacacccaccaagagtctgctggacacacctgccaagagagcccaggccgagttccccacctgcgattgcgtcgaacaaatagtggagaaagatgaaggtccatattatactcacttgggatctggccccacggtcgcctctatccgggaactcatggaggagcggtatggagagaaggggaaagccatccggatcgagaaggtcatctacacggggaaggagggaaagagctcccgcggttgccccattgcaaagtgggtgatccgcaggcacacgctggaggagaagctactctgcctggtgcggcaccgggcaggccaccactgccagaacgctgtgatcgtcatcctcatcctggcctgggagggcattccccgtagcctcggagacaccctctaccaggagctcaccgacaccctccggaagtatgggaaccccaccagccggagatgcggcctcaacgatgaccggacctgcgcttgccaaggcaaagaccccaacacctgtggtgcctccttctcctttggttgttcctggagcatgtacttcaacggctgcaagtatgctcggagcaagacacctcgcaagttccgcctcgcaggggacaatcccaaagaggaagaagtgctccggaagagtttccaggacctggccaccgaagtcgctcccctgtacaagcgactggcccctcaggcctatcagaaccaggtgaccaacgaggaaatagcgattgactgccgtctggggctgaaggaaggacggcccttcgcgggggtcacggcctgcatggacttctgtgcccacgcccacaaggaccagcataacctctacaatgggtgcaccgtggtctgcaccctgaccaaggaagacaatcgctgcgtgggcaagattcccgaggatgagcagctgcatgttctccccctgtacaagatggccaacacggatgagtttggtagcgaggagaaccagaatgcaaaggtgggcagcggagccatccaggtgctcaccgccttcccccgcgaggtccgacgcctgcccgagcctgccaagtcctgccgccagcggcagctggaagccagaaaggcagcagccgagaagaagaagattcagaaggagaagctgagcactccggagaagatcaagcaggaggccctggagctggcgggcattacgtcggacccaggcctgtctctgaagggtggattgtcccagcaaggcctgaagccctccctcaaggtggagccgcagaaccacttcagctccttcaagtacagcggcaacgcggtggtggagagctactcggtgctgggcaactgccggccctccgacccttacagcatgaacagcgtgtactcctaccactcctactatgcacagcccagcctgacctccgtcaatggcttccactccaagtacgctctcccgtcttttagctactatggctttccatccagcaaccccgtcttcccctctcagttcctgggtcctggtgcctgggggcacagtggcagcagtggcagttttgagaagaagccagacctccacgctctgcacaacagcctgagcccggcctacggtggtgctgagtttgccgagctgcccagccaggctgttcccacagacgcccaccaccccactcctcaccaccagcagcctgcgtacccaggccccaaggagtatctgcttcccaaggcccccctactccactcagtgtccagggacccctccccctttgcccagagctccaactgctacaacagatccatcaagcaagagccagtagacccgctgacccaggctgagcctgtgcccagagacgctggcaagatgggcaagacacctctgtccgaggtgtctcagaatggaggacccagtcacctttggggacagtactcaggaggcccaagcatgtcccccaagaggactaacggtgtgggtggcagctggggtgtgttctcgtctggggagagtcctgccatcgtccctgacaagctcagttcctttggggccagctgcctggccccttcccacttcacagatggccagtgggggctgttccccggtgaggggcagcaggcagcttcccactctggaggacggctgcgaggcaaaccgtggagcccctgcaagtttgggaacagcacctcggccttggctgggcccagcctgactgagaagccgtgggcgctgggggcaggggatttcaactcggccctgaaaggtagtcctgggttccaagacaagctgtggaaccccatgaaaggagaggagggcaggattccagccgcaggggccagccagctggacagggcctggcagtcctttggtctgcccctgggatccagcgagaagctgtttggggctctgaagtcagaggagaagctgtgggaccccttcagcctggaggaggggccggctgaggagccccccagcaagggagcggtgaaggaggagaagggcggtggtggtgcggaggaggaagaggaggagctgtggtcggacagtgaacacaacttcctggacgagaacatcggcggcgtggccgtggccccagcccacggctccatcctcatcgagtgtgcccggcgggagctgcacgccaccacgccgcttaagaagcccaaccgctgccaccccacccgcatctcgctggtcttctaccagcacaagaacctcaaccagcccaaccacgggctggccctctgggaagccaagatgaagcagctggcggagagggcacgggcacggcaggaggaggctgcccggctgggcctgggccagcaggaggccaagctctacgggaagaagcgcaagtgggggggcactgtggttgctgagccccagcagaaagagaagaagggggtcgtccccacccggcaggcactggctgtgcccacagactcggcggtcaccgtgtcctcctatgcctacacgaaggtcactggcccctacagccgctggatctag

SEQ ID NO: 190313 - DNA, 11388 bp, Homo sapiens
  Payload ID: 17596
  Gene Name: tet methylcytosine dioxygenase 3
  Uniprot ID: O43151
  ENST ID: ENST00000409262
  CDS Start-End: 1-5388
atgagccagtttcaggtgcccctggccgtccagccggacctgccaggcctttatgacttccctcagcgccaggtgatggtagggagcttcccggggtctgggctctccatggctgggagtgagtcccaactccgagggggtggagatggtcgaaagaaacggaaacggtgtggtacttgtgagccctgccggcggctggaaaactgtggcgcttgcactagctgtaccaaccgccgcacgcaccagatctgcaaactgcgaaaatgtgaggtgctgaagaaaaaagtagggcttctcaaggaggtggaaataaaggctggtgaaggagccgggccgtggggacaaggagcggctgtcaagacaggctcagagctcagcccagttgatggacctgttccaggtcagatggactcagggccagtgtaccatggggactcacggcagctaagcgcctcaggggtgccggtcaatggtgctagagagcccgctggacccagtctgctggggactgggggtccttggcgggtagaccaaaagcccgactgggaggctgccccaggcccagctcatactgctcgcctggaagatgcccacgatctggtggccttttcggctgtggccgaagctgtgtcctcttatggggcccttagcacccggctctatgaaaccttcaaccgtgagatgagtcgtgaggctgggaacaacagcaggggaccccggccagggcctgagggctgctctgctggcagcgaagaccttgacacactgcagacggccctggccctcgcgcggcatggtatgaaaccacccaactgcaactgcgatggcccagaatgccctgactacctcgagtggctggaggggaagatcaagtctgtggtcatggaaggaggggaggagcggcccaggctcccagggcctctgcctcctggtgaggccggcctcccagcaccaagcaccaggccactcctcagctcagaggtgccccagatctctccccaagagggcctgcccctgtcccagagtgccctgagcattgccaaggaaaaaaacatcagcttgcagaccgccattgccattgaggccctcacacagctctcctctgccctcccgcagccttctcattccaccccccaggcttcttgcccccttcctgaggccttgtcacctcctgcccctttcagatctccccagtcttacctccgggctccctcatggcctgtggttcctcctgaagagcactcatcttttgctcctgatagctctgccttccctccagcaactcctagaactgagttccctgaagcctggggcactgacacccctccagcaacgccccggagctcctggcccatgcctcgcccaagccccgatcccatggctgaactggagcagttgttgggcagcgccagtgattacatccagtcagtattcaagcggcctgaggccctgcctaccaagcccaaggtcaaggtggaggcaccctcttcctccccggccccggccccatcccctgtacttcagagggaggctcccacgccatcctcggagcccgacacccaccagaaggcccagaccgccctgcagcagcacctccaccacaagcgcagcctcttcctagaacaggtgcacgacacctccttccctgctccttcagagccttctgctcctggctggtggcccccaccaagttcacctgtcccacggcttccagacagaccacccaaggagaagaagaagaagctcccaacaccagctggaggtcccgtgggaacggagaaagctgcccctgggatcaagcccagtgtccgaaagcccattcagatcaagaagtccaggccccgggaagcacagcccctcttcccacctgtccgacagattgtcctggaagggcttaggtccccagcctcccaggaagtgcaggctcatccaccggcccctctgcctgcctcacagggctctgctgtgcccctgcccccagaaccttctcttgcgctatttgcacctagtccctccagggacagcctgctgccccctactcaggaaatgaggtcccccagccccatgacagccttgcagccaggctccactggccctcttccccctgccgatgacaagctggaagagctcatccggcagtttgaggctgaatttggagatagctttgggcttcccggccccccttctgtgcccattcaggaccccgagaaccagcaaacatgtctcccagcccctgagagcccctttgctacccgttcccccaagcaaatcaagattgagtcttcgggggctgtgactgtgctctcaaccacctgcttccattcagaggagggaggacaggaggccacacccaccaaggctgagaacccactcacacccaccctcagtggcttcttggagtcacctcttaagtacctggacacacccaccaagagtctgctggacacacctgccaagagagcccaggccgagttccccacctgcgattgcgtcgaacaaatagtggagaaagatgaaggtccatattatactcacttgggatctggccccacggtcgcctctatccgggaactcatggaggagcggtatggagagaaggggaaagccatccggatcgagaaggtcatctacacggggaaggagggaaagagctcccgcggttgccccattgcaaagtgggtgatccgcaggcacacgctggaggagaagctactctgcctggtgcggcaccgggcaggccaccactgccagaacgctgtgatcgtcatcctcatcctggcctgggagggcattccccgtagcctcggagacaccctctaccaggagctcaccgacaccctccggaagtatgggaaccccaccagccggagatgcggcctcaacgatgaccggacctgcgcttgccaaggcaaagaccccaacacctgtggtgcctccttctcctttggttgttcctggagcatgtacttcaacggctgcaagtatgctcggagcaagacacctcgcaagttccgcctcgcaggggacaatcccaaagaggaagaagtgctccggaagagtttccaggacctggccaccgaagtcgctcccctgtacaagcgactggcccctcaggcctatcagaaccaggtgaccaacgaggaaatagcgattgactgccgtctggggctgaaggaaggacggcccttcgcgggggtcacggcctgcatggacttctgtgcccacgcccacaaggaccagcataacctctacaatgggtgcaccgtggtctgcaccctgaccaaggaagacaatcgctgcgtgggcaagattcccgaggatgagcagctgcatgttctccccctgtacaagatggccaacacggatgagtttggtagcgaggagaaccagaatgcaaaggtgggcagcggagccatccaggtgctcaccgccttcccccgcgaggtccgacgcctgcccgagcctgccaagtcctgccgccagcggcagctggaagccagaaaggcagcagccgagaagaagaagattcagaaggagaagctgagcactccggagaagatcaagcaggaggccctggagctggcgggcattacgtcggacccaggcctgtctctgaagggtggattgtcccagcaaggcctgaagccctccctcaaggtggagccgcagaaccacttcagctccttcaagtacagcggcaacgcggtggtggagagctactcggtgctgggcaactgccggccctccgacccttacagcatgaacagcgtgtactcctaccactcctactatgcacagcccagcctgacctccgtcaatggcttccactccaagtacgctctcccgtcttttagctactatggctttccatccagcaaccccgtcttcccctctcagttcctgggtcctggtgcctgggggcacagtggcagcagtggcagttttgagaagaagccagacctccacgctctgcacaacagcctgagcccggcctacggtggtgctgagtttgccgagctgcccagccaggctgttcccacagacgcccaccaccccactcctcaccaccagcagcctgcgtacccaggccccaaggagtatctgcttcccaaggcccccctactccactcagtgtccagggacccctccccctttgcccagagctccaactgctacaacagatccatcaagcaagagccagtagacccgctgacccaggctgagcctgtgcccagagacgctggcaagatgggcaagacacctctgtccgaggtgtctcagaatggaggacccagtcacctttggggacagtactcaggaggcccaagcatgtcccccaagaggactaacggtgtgggtggcagctggggtgtgttctcgtctggggagagtcctgccatcgtccctgacaagctcagttcctttggggccagctgcctggccccttcccacttcacagatggccagtgggggctgttccccggtgaggggcagcaggcagcttcccactctggaggacggctgcgaggcaaaccgtggagcccctgcaagtttgggaacagcacctcggccttggctgggcccagcctgactgagaagccgtgggcgctgggggcaggggatttcaactcggccctgaaaggtagtcctgggttccaagacaagctgtggaaccccatgaaaggagaggagggcaggattccagccgcaggggccagccagctggacagggcctggcagtcctttggtctgcccctgggatccagcgagaagctgtttggggctctgaagtcagaggagaagctgtgggaccccttcagcctggaggaggggccggctgaggagccccccagcaagggagcggtgaaggaggagaagggcggtggtggtgcggaggaggaagaggaggagctgtggtcggacagtgaacacaacttcctggacgagaacatcggcggcgtggccgtggccccagcccacggctccatcctcatcgagtgtgcccggcgggagctgcacgccaccacgccgcttaagaagcccaaccgctgccaccccacccgcatctcgctggtcttctaccagcacaagaacctcaaccagcccaaccacgggctggccctctgggaagccaagatgaagcagctggcggagagggcacgggcacggcaggaggaggctgcccggctgggcctgggccagcaggaggccaagctctacgggaagaagcgcaagtgggggggcactgtggttgctgagccccagcagaaagagaagaagggggtcgtccccacccggcaggcactggctgtgcccacagactcggcggtcaccgtgtcctcctatgcctacacgaaggtcactggcccctacagccgctggatctaggtgccagggagccagcgtacctcagcgtcgggcctggcccgagctgtctctgtggtgcttttgccctcatacctgggggcgggttgggggtgcagaagtctttttatctctatatacatatatagatgcgcatatcatatatatgtatttatggtccaaacctcagaactgacccgcccctcccttacccccacttccccagcactttgaagaagaaactacggctgtcgggtgatttttccgtgatcttaatatttatatctccaagttgtcccccccccttgtctggggggtttttatttttattttctctttgtttttaaaactctatccttgtatatcacaataatggaaagaaagtttatagtatcctttcacaaaggagtagttttaaattccatttaaaatgtgtatttattggattttttaaaagcgacaatagtaatggtaaaggatgggcaggaaaggccagtagtgctcccccgcccagtctcgctgggtctggcgagccaagcccctcgggcgctggcgaggtcctcagccatctgcccctcgagagccaagcgcggacggtagccacccagttcatccctcccgacatacaccccttccctttggggaagggagcctcaggacagcttctgtcctctctgataggatgggagagtctgcagaaaaccatctggggtcccttttccagtccccggcttggagtcgaagggcagatgcaccccaggccagccccacgagatgctggcatagctttccccagaaaccaggttggaagtagatggcttcaagcttgctagtctccacactgaatcctctgtccgttatttatggagtcacacgatgtcatggttcactaggcagcacctcacgctggagctggagtgcgaggttcttaggggccgtgcccaccatgttgccaagccaatgcatgctgagctgaaggaatttgtcttagtggcagttttttaaaaaatgcccccaaagtctatgctgatactgaaaaagggctactgtatctttaaaaacaggaagttgaacccaagctgtgaaaagccagtggtgctctgtgcatggtgctgtgcggagcctggtgctgtagtgttgtgctgggactttcttgactcttgggcaggtcacatcctacaggagctcagcagaccagtgtaacaacagttaatgcatctatcctgatccctgaatttccacattggacaatggtgcatgcctcacacctgagcctgcttcctccatgctgtcattgggttcgggggcctacacttaacaattttaaagtgcaagagtcaaacattttcaacaggttgctataattttcctccctaattggtgccatttctccatttgatcattttctttttttcctttctcccctcttcatccactttaatatagctgttctgaaattctggtgcattcattcggttctttgaaatgagaatgtggtgcttaatttttgtgacgttgtcgagagaggttgggcctgatgggagcaacactcatcatcaccaagtcaaactttgttggagtgttggtttttcttgtgatattagcagaaatgatctcatgctagccatgtggatgtgtgtgtggtgaatggggggcttcatcaggacacacagaggggaatgtggccacacggtggatgaccaccaagccctgagatgaacaggtatttactgagcagttgtattcagatatgggtcttcatgaatcatgtttaacaatcagatgaccgctataggcaagttcctgagcttccgggtgccttgagtaagagctgagaaccggcctgctgggtgtttactgtatctgtttggaagcactggcggagggtcgttgtaagatgtcctgagcatttatgtggtctggttttaactgtaaatagtgaaagatttttttaagcacttttgcctagatttaaacagcaacttgaaaaaaaaagtatgttttaacatgtaattgtgggagaaattgtaaatagtagccgaatatttaatgtgctttgtctatcctccacttttaccatattctgtaaagttgcatttattttacaggacaaaaaaatgaaatattattgcttttgaaataaatacccaagagcttatcaggacttagaattattcagaactcagatttataggaaaacctctgaccttcagtttgacaagctaaaggaagcagagtctttaatgagcatgctaattttctagttttgaggaaaaattgggtcctttaaatgctattttgcttatcgcatcagtacttttatgcaggtctcatttgactccgtgcttaggtagatgcgggggtgccttgaaaacttcattttaaatgatcttaagcaagaaatacaatattttacgaaacatttggagaatgtgaccgtctgtatgacccgtggaagccccaggttggctgttggtttggaaggtcccgagtgtaacccaggtgattctgatacttggcatgtgtgaatcttcctgatgtatgttaaataaactcttcccctcatcaccctttggtaggaaagccattagatgaaaggagaaaccaatacaagctaaaagcatgcgacgtctgtcccccagcccaaacagccttggttcatcagtttctgcagtaggagataggctgctgagaggtgagtcaagaggcagtctccattggatgtccccactccccgcagaatggcgtttccagagttaggcggtgtggttgccgtgctcaagcccatgctgatttgtacactacatgtctaacctacctcaaatctcagtcattaaaattagcatgctttagacatatatttaaaaagtaactatgcacagctctttatcccccccttgctgctgaagctttcttaaagagaaaaatcaaatttttattttttactggcactatcattttttaagtcctaaagatgattaacagacatttttatcatgagaagaaaaataaagccattgcaactaaagaacctaacagcatgaccaagttcgaagagtcatattatagcaacggaaatcgatggcgtcttagtcatctccccagtgtgccctgtccacggacaccatccacgtgcagtgcaaacatttggttccttttctgctctgttttgttttccctgcctgttgcgtgcaagggaagtgcttgtaaagttctgtgctacgagatttttaaaataaaaatcgcttcgcagcaggttctcacaaaataactggtgctagctcaagaaatcatcatctgaccatcagaaatcttgactaaaggtgttgcatggatttgggggtctttcggtttttggttttgggtctggcttttagcagggccaatgtttcccacaccccggcttcatgggtactgctttgccttctcaccaaggtgacgatggtgtgcgtggaaagagatgataccccaccgccccctcttggtccttccaccagcctcttttgggaacagtagtttgcagagcaagggatttttaaagcgctaaagcaaggaaagaagtagcagagcttaactgctttgtaccacacagcagtagatgtgcaaggacggttgacaatgagtcgatgataacctaatttcattgagagaaacccagccagacttgcttctagaggtttaatcaccatgagatctcaaaccaaggcaaagctggtggaaaactatatgatatccctgacgtgcctcaaccagtatctctttccttttgttactgaagtgtgttttatggactaggaagcatttttatgaattgaaatagtctaaataaaatggtgctatggtgttttaatgtgactgtccctgatcctgtcttgctgaggtgctatcaacgttctgaaaccacaaccaaccaaaaacaaggtgggctccagtctcttggcttttttttttccctcccctcttttggtgctgtcttagacccgtttaccgtgctataatctgctctgagcagtgttgtgttgtgttgtattgttcttcccttggtggccaaacaaagcaagtcgagaaggcagctatctccctttctgtgatcgggagtgggcctgcctggcttggcaggtgctttttggttccacacctgtcttctcaggcttgatgtgaaagaaagggcgaagggttttttgagtttttgtttttgaggaaggggagttgggtacttctgcctctcctagcatgataggcattctcatagccagggacagattttctcctgcagcccagggtgctaagcagacatctctgggagtcccaagggcacaccaagggagaccagatggatctccttcctcccctggcactggctgggaccatggtgggcaggggcttcattctctgacccagcgttgcttctgcctctcattggtaaccccttatgttcggactaaaggaaggagctttctttgctcactcgatgccactgaggctgctttttagttggtgctaacctaaatttcttcttgggtccacagaagttgatgttttaaaaactcaccaggaagctccattttgtgtcatccactgtcacaataatttttttaaatacctcaaaaacaggacatcatgacaacttcagtaaagtagattccatgagggtctgatacctgcaggttgtccgtctgatgacatacttgaccttgaaaaatctggggtcattttgtttttcattcttcagcagttaagatagcggaacgccgaaaggaaggagcgtagttggctgtatttcatgtttaagttttgcttttgaataaaatgtgaatttcctatgcccatctcattgagctttctcagtcattgttgctgtcatttgaaatgactccctcaaaacctagttttattagccagctgcctctgctgtagtacatggccaacttcaacataccctggaccaaaacatttttgaggtgcatacccccaacataagttacacagtcccacatccaggtgcacagagtgcgagtgcactccgcgagtgcggggggaggggcggccccctctggtgctcccagcccttcctcctgcagagctgcaggcaagagcagagcaataggcttctcccctgagcagagaccgcagcacagaaatgcaaggtctaaagttgctttttgcctaagaatcagcgagcgatttggcctacttcctcattggcttctattctgatatcagggatgctttttgtagtggtattgtttgctccctcttcgcgttttgactacccgtcattcaggggtaactcatcactcttcacacggggatttaaattaagaaactaattggctcatgtgaacattccaaattttcttggtttcaatacccttttttttcttttgaggggaaaagaggggagaaaaacaggagtgatgtcatttctttttcatgtattccaattaaagaaacaagggcaggtcgtataatggcatattaatacattagacttaatctagaacccctgtagctttttgatgtgttttatttcttatctctttgaattcctgtttggttacttggcttccaatggaggtgaacttaacaaccatacttgaatattccgtcttgactttgtaaactgtggctacttgaaatgaagtttatctggggttgatggatgaatggtagatttttgcaatgtctcaaggcaataggatgtgtattaaactgtagatattcttagtacagtaaatttatgctgataattttattttgtataatttttacctttttgttaatattttttccttccactttattggtttgcctcctgagctacccctccttaccctcccttctccctcagtgtttcagtaaatttaatttagggtgcctagaaattgcaagtatgtatcctttttgatttgtattttattataatttacacaaacaactgggtttgtgaactgtattactcctggtatctttaaaatattgtgggtgttttaataaattttatatttattttttgcactcaaa

SEQ ID NO: 190314 - DNA, 1924 bp, Homo sapiens
  Payload ID: 17597
  Gene Name: tetra-peptide repeat homeobox 1
  Uniprot ID: Q8N7U7
  ENST ID: ENST00000322175
  CDS Start-End: 157-1392
tccctcccacccccaggccctcccctggccctggaccctccaaggagacagcggcaggagcgcacggtctacactgaaagccagcagaaagtgctagaattttactttcagaaggaccagtacccgaactacgaccagcgactgaatctggcggagatgctcagcctcagggagcaacagctgcaggtgtggttcaagaatcgccgcgccaaactagctcgggagcggcggctccagcagcagccccagcgcgtccctgggcagagaggccgaggagcccgcgctgcgcccctagtccctgcagcctctgcctccgcacctcagcggggcccctcgggaatccttccagcggcggaacccacgatctgcagcctccaccaggcctggggtggccctgggtgcagagcccagaagggcatcccagctgccctgagtccaggccctggcccgatccctgccccaatcccaggcccagcccagatcccaggcccactccctggctcaattccaggcccaattccaggcccagctcagatcccaagcccgatcccagccccaatcccaggcccaatttcaggcccagtccagatcccaggcccattccgtggcccaatcccaggcccaatttcaggcccagccccgatcccaggcccaatctcaggcccattctcaggcccaaacccaggcccgatcccaggcccaaacccaggcccgatcccaggcccaatctcaggcccgatcccaggcccaatctcagtcccgatcccaggcccgatcccaggcccaatctcaggcccaatctcaggcccaaacccaggcccgatcccaggcccaatcccaggcccaatctcaggcccgaacccaggcccgatcccaggcccaatctcaggcccgaacccaggcctgatcccaggcccaatcccaggcccaatctcaggcccaggcccaattataggcccgattcccagcccagcccagatcccaggcccaggcagactccaaggcccaggtcccatcttaagtcctggccggatgcgaagccctggctcacttccaggcctagccccgattttaggcccaggctcaggcccaggctcaggctcagtcccagctccaatcccaggcccaggatcactcccagccccagcccccttatggcctcagagccccgatgcctccgacttcttgccagacacccagttattccctcacttcacagagctgctcctacccctagaccccttggagggatcctcagtctccaccatgacctctcagtaccaagaaggggatgactctatgggcaaaaaacactcagggtctcagccccaagaggagggtggctctgtgaatgaaaatcactcaggccccaggttattactggatttatagggggcctgtgcctgcaaagttcttcagatcccagagggcctggagtggctgatctacactgctggtgactttctgcagtgaatgcatcaccctttacccaccctgctgcaggtggacatttgctgtcttcactgtgcagctatcacaggtggctctgctgtgaatgtgcctgcctgtcatttgaattgagcctgagcgtttctctgctgggattggagtcgctgctcactgggatatctggcattagtggatgctgctcgagagctttctaaagggcttttcccagggcttctgatggtcagcatcttccccaacacttaggattgtgagactttttaatgtttgtcgatccaatgacttgtggttttgttgtggttgtaatatccatttccctgatgattgagaagttaaaccctcacatgttaattgaaccttagatatcttcataatgtgtatttgtttaccccttttccttcatttatttgaatgtattcttatattctcttggcaattaaagttctgcagacacctt

SEQ ID NO: 190315 - DNA, 1526 bp, Homo sapiens
  Payload ID: 17597
  Gene Name: tetra-peptide repeat homeobox 1
  ENST ID: ENST00000543508
  CDS Start-End: 26-1231
cgaccagcgactgaatctggcggagatgctcagcctcagggagcaacagctgcaggtgtggttcaagaatcgccgcgccaaactagctcgggagcggcggctccagcagcagccccagcgcgtccctgggcagagaggccgaggagcccgcgctgcgcccctagtccctgcagcctctgcctccgcacctcagcggggcccctcgggaatccttccagcggcggaacccacgatctgcagcctccaccaggcctggggtggccctgggtgcagagcccagaagggcatcccagctgccctgagtccaggccctggcccgatccctgccccaatcccaggcccagcccagatcccaggcccactccctggctcaattccaggcccaattccaggcccagctcagatcccaagcccgatcccagccccaatcccaggcccaatttcaggcccagtccagatcccaggcccattccgtggcccaatcccaggcccaatctcaggcccattctcaggcccaaacccaggcccgatcccaggcccaaacccaggcccgatcccaggcccaatctcaggcccgatcccaggcccaatctcagtcccgatcccaggcccgatcccaggcccaatctcaggcccaatctcaggcccaaacccaggcccgatcccaggcccaatcccaggcccaatctcaggcccgaacccaggcccgatcccaggcccaatctcaggcccgaacccaggcctgatcccaggcccaatcccaggcccaatctcaggcccaggcccaattataggcccgattcccagcccagcccagatcccaggcccaggcagactccaaggcccaggtcccatcttaagtcctggccggatgcgaagccctggctcacttccaggcctagccccgattttaggcccaggctcaggcccaggctcaggctcagtcccagctccaatcccaggcccaggatcactcccagccccagcccccttatggcctcagagccccgatgcctccgacttcttgccagacacccagttattccctcacttcacagagctgctcctacccctagaccccttggagggatcctcagtctccaccatgacctctcagtaccaagaaggggatgactctatgggcaaaaaacactcagggtctcagccccaagaggagggtggctctgtgaatgaaaatcactcaggccccaggttattactggatttatagggggcctgtgcctgcaaagttcttcagatcccagagggcctggagtggctgatctacactgctggtgactttctgcagtgaatgcatcaccctttacccaccctgctgcaggtggacatttgctgtcttcactgtgcagctatcacaggtggctctgctgtgaatgtgcctgcctgtcatttgaattgagcctgagcgtttctctgctgggattggagtcgctgctcactgggatatctggcattagtggatgctgctcgagagctttctaaagggcttttcccagggcttctga

SEQ ID NO: 190316 - DNA, 2059 bp, Homo sapiens
  Payload ID: 17597
  Gene Name: tetra-peptide repeat homeobox 1
  ENST ID: ENST00000535759
  CDS Start-End: 1-1527
atggatgaagctggaaaccatcattctgagcaaactatcacaaggacagaaaaccaaacaccgcatgctctcgctcataggaggatggggccctgtctgtcttgttctcagctgtattcccagtacctaggactgtcccagacacacagcagccctcccctggccctggaccctccaaggagacagcggcaggagcgcacggtctacactgaaagccagcagaaagtgctagaattttactttcagaaggaccagtacccgaactacgaccagcgactgaatctggcggagatgctcagcctcagggagcaacagctgcaggtgtggttcaagaatcgccgcgccaaactagctcgggagcggcggctccagcagcagccccagcgcgtccctgggcagagaggccgaggagcccgcgctgcgcccctagtccctgcagcctctgcctccgcacctcagcggggcccctcgggaatccttccagcggcggaacccacgatctgcagcctccaccaggcctggggtggccctgggtgcagagcccagaagggcatcccagctgccctgagtccaggccctggcccgatccctgccccaatcccaggcccagcccagatcccaggcccactccctggctcaattccaggcccaattccaggcccagctcagatcccaagcccgatcccagccccaatcccaggcccaatttcaggcccagtccagatcccaggcccattccgtggcccaatcccaggcccaatttcaggcccagccccgatcccaggcccaatctcaggcccattctcaggcccaaacccaggcccgatcccaggcccaaacccaggcccgatcccaggcccaatctcaggcccgatcccaggcccaatctcagtcccgatcccaggcccgatcccaggcccaatctcaggcccaatctcaggcccaaacccaggcccgatcccaggcccaatcccaggcccaatctcaggcccgaacccaggcccgatcccaggcccaatctcaggcccgaacccaggcctgatcccaggcccaatcccaggcccaatctcaggcccaggcccaattataggcccgattcccagcccagcccagatcccaggcccaggcagactccaaggcccaggtcccatcttaagtcctggccggatgcgaagccctggctcacttccaggcctagccccgattttaggcccaggctcaggcccaggctcaggctcagtcccagctccaatcccaggcccaggatcactcccagccccagcccccttatggcctcagagccccgatgcctccgacttcttgccagacacccagttattccctcacttcacagagctgctcctacccctagaccccttggagggatcctcagtctccaccatgacctctcagtaccaagaaggggatgactctatgggcaaaaaacactcagggtctcagccccaagaggagggtggctctgtgaatgaaaatcactcaggccccaggttattactggatttatagggggcctgtgcctgcaaagttcttcagatcccagagggcctggagtggctgatctacactgctggtgactttctgcagtgaatgcatcaccctttacccaccctgctgcaggtggacatttgctgtcttcactgtgcagctatcacaggtggctctgctgtgaatgtgcctgcctgtcatttgaattgagcctgagcgtttctctgctgggattggagtcgctgctcactgggatatctggcattagtggatgctgctcgagagctttctaaagggcttttcccagggcttctgatggtcagcatcttccccaacacttaggattgtgagactttttaatgtttgtcgatccaatgacttgtggttttgttgtggttgtaatatccatttccctgatgattgagaagttaaaccctcacatgttaattgaaccttagatatcttcataatgtgtatttgtttaccccttttccttcatttatttgaatgtattcttatattctcttggcaattaaagttctgcagacacctt

SEQ ID NO: 190317 - DNA, 2170 bp, Homo sapiens
  Payload ID: 17598
  Gene Name: tetra-peptide repeat homeobox-like
  ENST ID: ENST00000326972
  CDS Start-End: 223-642
aaaatgatggctatgtggacatgagcagcttcaacacctttaagaacaatcagcagagcacagaccaggacgcagaaagacagagtcttgccctgttgcccaggctggagtatagtagtgcagtggtgtgatcatagctcactgtaacttcgaccacctgggctcaaacaatccttcttcctctgcctcccaagtagctgggactacagagcaggacccaggatgcaagaccctaggcatccccaaggccttccactgtccccaggccttccaaagagacagcggcaggaccgcacaatctacaactggaaacagcaggaagtgctagaaaatcactttaaggaggaacagtacccagactatgacacacgacaagagctggcggagatgctcaatctcagggagtaccaagtgcaggtgtggttcaagaatcgccgggccaaacgctctcgggagcggtggttccagaagcagctccagcagctccagaagcatcctcagcagcagcatcctcagcagcagcatccccagcagcagctccagcagcagcagccccagcagcagccccagcagcagcagccccagcagcagccacagcagcagcagccccagcagcagcagctccaccagcagccccagtagcagctctagcagcagcagcagcagccccagcagcagcaactccagtagcagctccagcagcagcagccccagcagtagctccagcagcagcagcagcagccccagtagcagctccagcagccccagtagcagctccagcagcagcagcagcagccccagtagcagctccagcagccccagtagcagctctagcagcagcagctccagcagcagcagtcccagcagcagcagccccagtagcagcggcagcagccccagtagcagcaacagcagccccagtagtagcagcagcagccccagtagcagcagcagcagccccagcccccgtagcagcagccccagcagcagcagctccagcaccagcagtcccagcagcagcagtcccagcagcagcagccccagcagcagctgccccagtgcagccctgggcaggaggccacagagcccacagagctcgcactgtgccccctttccctgaagctgcggcctctgccccccatcagcctggcctcttgggaattctcccacagggagaggccccgtgggtattctcccacaatctgcagcctccaccaggccttgagtagctttgggtgcagagccaggagggcgtttggctgtcctaggtctagcccctggcccaatcccagccccattccaggcccactcaaaagccaaggcccaatcccaggtccaggctcaatcctaggccctggcctgattccaagccaggcttactcccaggcccaggcttagtcctagccccaatcccaggtcctggcccaatcccaaacttaggatccctcccagccccagccctagtccccttgtgacctcagagcacttatgcctccaatttcttgccagacagtcattccctgacttcacagagctcctcccacccctagaccagttcgaggaatccttggtctccaccacgacatctcagtaccaagagggggatggctctatggacaaaaagactcgggccccaagtgattaatggatttatagggggcctgtgtctgcaaagtcctgcggataccagtggacctggagtggctggttggtctacactgctggtgaatgcaccaccaccatttaaccaccctgccgctggtgggcatttgctgtcttcactgtgtggccatcacgactagctctgctatgaatgcacctgccctcatttgagttgagcctgagcatttcgcagctgggattggagtcgctgctcatggggatgtttggcattagtggatgctacttgagagctttgtaaagagctttactcagcacttctgatagtcagcattctccctgacacttaggattgtgagactttttaatgtttgtggatccaatggcttatggcttccctgatgactgagaggttgagaagttctcacatgttaattgaaccttagaaatcctcatatgtgtccatttgtttgcccatttttcttcatttatttgaatgtatttttatattctcttgataattaaagtgctgcaaacaccccccaaaaat

SEQ ID NO: 190318 - DNA, 2356 bp, Homo sapiens
  Payload ID: 17598
  Gene Name: tetra-peptide repeat homeobox-like
  ENST ID: ENST00000424053
  CDS Start-End: 409-828
ctccctgcctgtcgagtctgcacacgggtttcacgccctcccctgtgttctggccaggagactttgcgttcggttggaattgttacagagttcagctggaggtttccttctccctgtggccttttcccagttcctctggcagccctcctcaaggacccctgtgagataagtcagaggtgactttcctggggacccagagaacccacaaggcttttcccactgcttactgtattttgctcggctctctaaattgaatcaattgcagacagagtcttgccctgttgcccaggctggagtatagtagtgcagtggtgtgatcatagctcactgtaacttcgaccacctgggctcaaacaatccttcttcctctgcctcccaagtagctgggactacagagcaggacccaggatgcaagaccctaggcatccccaaggccttccactgtccccaggccttccaaagagacagcggcaggaccgcacaatctacaactggaaacagcaggaagtgctagaaaatcactttaaggaggaacagtacccagactatgacacacgacaagagctggcggagatgctcaatctcagggagtaccaagtgcaggtgtggttcaagaatcgccgggccaaacgctctcgggagcggtggttccagaagcagctccagcagctccagaagcatcctcagcagcagcatcctcagcagcagcatccccagcagcagctccagcagcagcagccccagcagcagccccagcagcagcagccccagcagcagccacagcagcagcagccccagcagcagcagctccaccagcagccccagtagcagctctagcagcagcagcagcagccccagcagcagcaactccagtagcagctccagcagcagcagccccagcagtagctccagcagcagcagcagcagccccagtagcagctccagcagccccagtagcagctccagcagcagcagcagcagccccagtagcagctccagcagccccagtagcagctctagcagcagcagctccagcagcagcagtcccagcagcagcagccccagtagcagcggcagcagccccagtagcagcaacagcagccccagtagtagcagcagcagccccagtagcagcagcagcagccccagcccccgtagcagcagccccagcagcagcagctccagcaccagcagtcccagcagcagcagtcccagcagcagcagccccagcagcagctgccccagtgcagccctgggcaggaggccacagagcccacagagctcgcactgtgccccctttccctgaagctgcggcctctgccccccatcagcctggcctcttgggaattctcccacagggagaggccccgtgggtattctcccacaatctgcagcctccaccaggccttgagtagctttgggtgcagagccaggagggcgtttggctgtcctaggtctagcccctggcccaatcccagccccattccaggcccactcaaaagccaaggcccaatcccaggtccaggctcaatcctaggccctggcctgattccaagccaggcttactcccaggcccaggcttagtcctagccccaatcccaggtcctggcccaatcccaaacttaggatccctcccagccccagccctagtccccttgtgacctcagagcacttatgcctccaatttcttgccagacagtcattccctgacttcacagagctcctcccacccctagaccagttcgaggaatccttggtctccaccacgacatctcagtaccaagagggggatggctctatggacaaaaagactcgggccccaagtgattaatggatttatagggggcctgtgtctgcaaagtcctgcggataccagtggacctggagtggctggttggtctacactgctggtgaatgcaccaccaccatttaaccaccctgccgctggtgggcatttgctgtcttcactgtgtggccatcacgactagctctgctatgaatgcacctgccctcatttgagttgagcctgagcatttcgcagctgggattggagtcgctgctcatggggatgtttggcattagtggatgctacttgagagctttgtaaagagctttactcagcacttctgatagtcagcattctccctgacacttaggattgtgagactttttaatgtttgtggatccaatggcttatggcttccctgatgactgagaggttgagaagttctcacatgttaattgaaccttagaaatcctcatatgtgtccatttgtttgcccatttttcttcatttatttgaatgtatttttatattctcttgataattaaagtgctgcaaacaccccccaaaaat

SEQ ID NO: 190319 - DNA, 2256 bp, Homo sapiens
  Payload ID: 17598
  Gene Name: tetra-peptide repeat homeobox-like
  ENST ID: ENST00000429201
  CDS Start-End: 309-728
ggacccctgtgagataagtcagaggtgactttcctggggacccagagaacccacaaggcttttcccactgcttactgtattttgctcggctctctaaattgaatcaattgcaggtaagtcagggatttcttcttggtttggatccactgctggtgagcagacagagtcttgccctgttgcccaggctggagtatagtagtgcagtggtgtgatcatagctcactgtaacttcgaccacctgggctcaaacaatccttcttcctctgcctcccaagtagctgggactacagaacagagcaggacccaggatgcaagaccctaggcatccccaaggccttccactgtccccaggccttccaaagagacagcggcaggaccgcacaatctacaactggaaacagcaggaagtgctagaaaatcactttaaggaggaacagtacccagactatgacacacgacaagagctggcggagatgctcaatctcagggagtaccaagtgcaggtgtggttcaagaatcgccgggccaaacgctctcgggagcggtggttccagaagcagctccagcagctccagaagcatcctcagcagcagcatcctcagcagcagcatccccagcagcagctccagcagcagcagccccagcagcagccccagcagcagcagccccagcagcagccacagcagcagcagccccagcagcagcagctccaccagcagccccagtagcagctctagcagcagcagcagcagccccagcagcagcaactccagtagcagctccagcagcagcagccccagcagtagctccagcagcagcagcagcagccccagtagcagctccagcagccccagtagcagctccagcagcagcagcagcagccccagtagcagctccagcagccccagtagcagctctagcagcagcagctccagcagcagcagtcccagcagcagcagccccagtagcagcggcagcagccccagtagcagcaacagcagccccagtagtagcagcagcagccccagtagcagcagcagcagccccagcccccgtagcagcagccccagcagcagcagctccagcaccagcagtcccagcagcagcagtcccagcagcagcagccccagcagcagctgccccagtgcagccctgggcaggaggccacagagcccacagagctcgcactgtgccccctttccctgaagctgcggcctctgccccccatcagcctggcctcttgggaattctcccacagggagaggccccgtgggtattctcccacaatctgcagcctccaccaggccttgagtagctttgggtgcagagccaggagggcgtttggctgtcctaggtctagcccctggcccaatcccagccccattccaggcccactcaaaagccaaggcccaatcccaggtccaggctcaatcctaggccctggcctgattccaagccaggcttactcccaggcccaggcttagtcctagccccaatcccaggtcctggcccaatcccaaacttaggatccctcccagccccagccctagtccccttgtgacctcagagcacttatgcctccaatttcttgccagacagtcattccctgacttcacagagctcctcccacccctagaccagttcgaggaatccttggtctccaccacgacatctcagtaccaagagggggatggctctatggacaaaaagactcgggccccaagtgattaatggatttatagggggcctgtgtctgcaaagtcctgcggataccagtggacctggagtggctggttggtctacactgctggtgaatgcaccaccaccatttaaccaccctgccgctggtgggcatttgctgtcttcactgtgtggccatcacgactagctctgctatgaatgcacctgccctcatttgagttgagcctgagcatttcgcagctgggattggagtcgctgctcatggggatgtttggcattagtggatgctacttgagagctttgtaaagagctttactcagcacttctgatagtcagcattctccctgacacttaggattgtgagactttttaatgtttgtggatccaatggcttatggcttccctgatgactgagaggttgagaagttctcacatgttaattgaaccttagaaatcctcatatgtgtccatttgtttgcccatttttcttcatttatttgaatgtatttttatattctcttgataattaaagtgctgcaaacaccccccaaaaat

SEQ ID NO: 190320 - DNA, 932 bp, Homo sapiens
  Payload ID: 17598
  Gene Name: tetra-peptide repeat homeobox-like
  ENST ID: ENST00000532924
  CDS Start-End: 345-764
tctggagatctgttttctggttttggctgtgccataaacgattatttatgaaaactgcaatagtcatcatttaaagttatggaactgtgtccggaattggtgggttcttggtctcactgacttcaagaatgaagccgcggacccttgcggtaagtcagggatttcttcttggtttggatccactgctggtgagcagacagagtcttgccctgttgcccaggctggagtatagtagtgcagtggtgtgatcatagctcactgtaacttcgaccacctgggctcaaacaatccttcttcctctgcctcccaagtagctgggactacagaacagagcaggacccaggatgcaagaccctaggcatccccaaggccttccactgtccccaggccttccaaagagacagcggcaggaccgcacaatctacaactggaaacagcaggaagtgctagaaaatcactttaaggaggaacagtacccagactatgacacacgacaagagctggcggagatgctcaatctcagggagtaccaagtgcaggtgtggttcaagaatcgccgggccaaacgctctcgggagcggtggttccagaagcagctccagcagctccagaagcatcctcagcagcagcatcctcagcagcagcatccccagcagcagctccagcagcagcagccccagcagcagccccagcagcagcagccccagcagcagccacagcagcagcagccccagcagcagcagctccaccagcagccccagtagcagctctagcagcagcagcagcagccccagcagcagcaactccagtagcagctccagcagcagcagccccagcagtagctccagcagcagcagcagcagccccagtagcagctccagcagccccagtagcagctccagcagcagcagcagcagccccagtagcagctc

SEQ ID NO: 190321 - DNA, 549 bp, Homo sapiens
  Payload ID: 17598
  Gene Name: tetra-peptide repeat homeobox-like
  ENST ID: ENST00000524375
  CDS Start-End: 259-549
aaactaaaatgatggctatgtggacatgagcagcttcaacacctttaagaacaatcagcagagcacagaccaggacgcagaaagattatttatgaaaactgcaatagtcatcatttaaagttatggaactgtgtccggaattggtgggttcttggtctcactgacttcaagaatgaagccgcggacccttgcggtaagtcagggatttcttcttggtttggatccactgctggtgagcagaacagagcaggacccaggatgcaagaccctaggcatccccaaggccttccactgtccccaggccttccaaagagacagcggcaggaccgcacaatctacaactggaaacagcaggaagtgctagaaaatcactttaaggaggaacagtacccagactatgacacacgacaagagctggcggagatgctcaatctcagggagtaccaagtgcaggtgtggttcaagaatcgccgggccaaacgctctcgggagcggtggttccagaagcagctccagcagctccagaagcatcctcagcagcagcatcct

SEQ ID NO: 190322 - DNA, 597 bp, Homo sapiens
  Payload ID: 17598
  Gene Name: tetra-peptide repeat homeobox-like
  ENST ID: ENST00000528312
  CDS Start-End: 330-597
agagtctcgctctgtcgcccaggctggcagcctccctagtagctgggactacaggcacctgccaccacgcctagctaattttttgtatttttttagtagagacggggtttcactgtgttagccaggtctccatctcctgacctcgtgatctgcctgcctcggcatcccaaagtgctgggattacagacagagtcttgccctgttgcccaggctggagtatagtagtgcagtggtgtgatcatagctcactgtaacttcgaccacctgggctcaaacaatccttcttcctctgcctcccaagtagctgggactacagagcaggacccaggatgcaagaccctaggcatccccaaggccttccactgtccccaggccttccaaagagacagcggcaggaccgcacaatctacaactggaaacagcaggaagtgctagaaaatcactttaaggaggaacagtacccagactatgacacacgacaagagctggcggagatgctcaatctcagggagtaccaagtgcaggtgtggttcaagaatcgccgggccaaacgctctcgggagcggtggttccagaagcagctccagcagctccaga

SEQ ID NO: 190323 - DNA, 563 bp, Homo sapiens
  Payload ID: 17598
  Gene Name: tetra-peptide repeat homeobox-like
  ENST ID: ENST00000528067
  CDS Start-End: 200-563
ttgttacagagttcagctggaggtttccttctccctgtggccttttcccagttcctctggcagccctcctcaaggacccctgtgagataagtcagaggtgactttcctggggacccagagaacccacaaggcttttcccactgcttactgtattttgctcggctctctaaattgaatcaattgcagagcaggacccaggatgcaagaccctaggcatccccaaggccttccactgtccccaggccttccaaagagacagcggcaggaccgcacaatctacaactggaaacagcaggaagtgctagaaaatcactttaaggaggaacagtacccagactatgacacacgacaagagctggcggagatgctcaatctcagggagtaccaagtgcaggtgtggttcaagaatcgccgggccaaacgctctcgggagcggtggttccagaagcagctccagcagctccagaagcatcctcagcagcagcatcctcagcagcagcatccccagcagcagctccagcagcagcagccccagcagcagccccagcagcagcagccccagc

SEQ ID NO: 190324 - DNA, 508 bp, Homo sapiens
  Payload ID: 17598
  Gene Name: tetra-peptide repeat homeobox-like
  ENST ID: ENST00000528040
  CDS Start-End: 308-508
ttgcataaatgtttcaagtatctaacagacagcttacagtagatgtacacaatggtttgcaataagatctactctccttcctctggttcaaggaaaaaaattatctggatttttgccacttcaagaccaagactgctgccatgctagaaaagggctggggtaagacagagtcttgccctgttgcccaggctggagtatagtagtgcagtggtgtgatcatagctcactgtaacttcgaccacctgggctcaaacaatccttcttcctctgcctcccaagtagctgggactacagagcaggacccaggatgcaagaccctaggcatccccaaggccttccactgtccccaggccttccaaagagacagcggcaggaccgcacaatctacaactggaaacagcaggaagtgctagaaaatcactttaaggaggaacagtacccagactatgacacacgacaagagctggcggagatgctcaatctcagggagtaccaagtgcaggtgtgg

SEQ ID NO: 190325 - DNA, 533 bp, Homo sapiens
  Payload ID: 17598
  Gene Name: tetra-peptide repeat homeobox-like
  ENST ID: ENST00000530586
  CDS Start-End: 359-533
agagccctgtccacagcaaactaaaatgatggctatgtggacatgagcagcttcaacacctttaagaacaatcagcagagcacagaccaggacgcagaaagattatttatgaaaactgcaatagtcatcatttaaagttatggaactgtgtccggaattggtgggttcttggtctcactgacttcaagaatgaagccgcggacccttgcgacagagtcttgccctgttgcccaggctggagtatagtagtgcagtggtgtgatcatagctcactgtaacttcgaccacctgggctcaaacaatccttcttcctctgcctcccaagtagctgggactacagaacagagcaggacccaggatgcaagaccctaggcatccccaaggccttccactgtccccaggccttccaaagagacagcggcaggaccgcacaatctacaactggaaacagcaggaagtgctagaaaatcactttaaggaggaacagtacccagactatgacacacgacaagagctggcggagatgctcaatc

SEQ ID NO: 190326 - DNA, 539 bp, Homo sapiens
  Payload ID: 17598
  Gene Name: tetra-peptide repeat homeobox-like
  ENST ID: ENST00000529129
  CDS Start-End: 286-539
gattttttgtataaggtgagagatgaggatccagttttggtctcctacacgtggctagccaattatcccagcaccatttgtggaaaaggatgccctttccccactttatgattttgtttgctttgttgaagatcagttggctacagagtcttgccctgttgcccaggctggagtatagtagtgcagtggtgtgatcatagctcactgtaacttcgaccacctgggctcaaacaatccttcttcctctgcctcccaagtagctgggactacagagcaggacccaggatgcaagaccctaggcatccccaaggccttccactgtccccaggccttccaaagagacagcggcaggaccgcacaatctacaactggaaacagcaggaagtgctagaaaatcactttaaggaggaacagtacccagactatgacacacgacaagagctggcggagatgctcaatctcagggagtaccaagtgcaggtgtggttcaagaatcgccgggccaaacgctctcgggagcggtggttccagaagcagct

SEQ ID NO: 190327 - DNA, 771 bp, Homo sapiens
  Payload ID: 17598
  Gene Name: tetra-peptide repeat homeobox-like
  ENST ID: ENST00000532880
  CDS Start-End: 572-771
cagcgctgaccattcagactatgagaacattccaaccatgaactcagactatgagaatatccagattctgccctggaggcctgcagggctggtgtgttcaggaagctgtttgaagatcagagcagagccctgtccacagcaaactaaaatgatggctatgtggacatgagcagcttcaacacctttaagaacaatcagcagagcacagaccaggacgcagaaaggagtggacaacacctggccccagctgagtgcctcctagcactgaggaaagcagaaccaagctttgcaacaatgaactctccttgctggaagagaccgcccacctctaacagaattttgtagctggaggaaacttcagacacaagtcctgttacagaagaggaaactggcacagagaggaaatggtgcttgcataaggtctctggacagagtcttgccctgttgcccaggctggagtatagtagtgcagtggtgtgatcatagctcactgtaacttcgaccacctgggctcaaacaatccttcttcctctgcctcccaagtagctgggactacagagcaggacccaggatgcaagaccctaggcatccccaaggccttccactgtccccaggccttccaaagagacagcggcaggaccgcacaatctacaactggaaacagcaggaagtgctagaaaatcactttaaggaggaacagtacccagactatgacacacgacaagagctggcggagatgctcaatctcagggagtaccaagtgcaggtgtg

SEQ ID NO: 190328 - DNA, 1615 bp, Homo sapiens
  Payload ID: 17599
  Gene Name: tetraspanin 1
  Uniprot ID: O60635
  ENST ID: ENST00000372003
  CDS Start-End: 465-1190
agacacacacaccagcagctacacctacacgctgaccatcacaggcacacagaggcacatccacctcacatccacctcatacttgtgtactctcagggttcagtctttcatcctatccctctctgatctgtgcctcccaataccttccaagatgtttacagagacccttctccctgtgcagttaggagtgtaaggcaagagagcccctacttcatggggcagatcaagagctgagaccaaagatggtctatgttgctgaccttgtcctgtcctcctgctgtcttaaactatgatccctgctgcggtcactgaagcctttccctgtgagcagtggtgtgtgagagccaggcgtccctctgcctgcccactcagtggcaacacccgggagctgttttgtcctttgtggagcctcagcagttccctctttcagaactcactgccaagagccctgaacaggagccaccatgcagtgcttcagcttcattaagaccatgatgatcctcttcaatttgctcatctttctgtgtggtgcagccctgttggcagtgggcatctgggtgtcaatcgatggggcatcctttctgaagatcttcgggccactgtcgtccagtgccatgcagtttgtcaacgtgggctacttcctcatcgcagccggcgttgtggtctttgctcttggtttcctgggctgctatggtgctaagactgagagcaagtgtgccctcgtgacgttcttcttcatcctcctcctcatcttcattgctgaggttgcagctgctgtggtcgccttggtgtacaccacaatggctgagcacttcctgacgttgctggtagtgcctgccatcaagaaagattatggttcccaggaagacttcactcaagtgtggaacaccaccatgaaagggctcaagtgctgtggcttcaccaactatacggattttgaggactcaccctacttcaaagagaacagtgcctttcccccattctgttgcaatgacaacgtcaccaacacagccaatgaaacctgcaccaagcaaaaggctcacgaccaaaaagtagagggttgcttcaatcagcttttgtatgacatccgaactaatgcagtcaccgtgggtggtgtggcagctggaattgggggcctcgagctggctgccatgattgtgtccatgtatctgtactgcaatctacaataagtccacttctgcctctgccactactgctgccacatgggaactgtgaagaggcaccctggcaagcagcagtgattgggggaggggacaggatctaacaatgtcacttgggccagaatggacctgccctttctgctccagacttggggctagatagggaccactccttttaggcgatgcctgactttccttccattggtgggtggatgggtggggggcattccagagcctctaaggtagccagttctgttgcccattcccccagtctattaaacccttgatatgccccctaggcctagtggtgatcccagtgctctactgggggatgagagaaaggcattttatagcctgggcataagtgaaatcagcagagcctctgggtggatgtgtagaaggcacttcaaaatgcataaacctgttacaatgtt

SEQ ID NO: 190329 - DNA, 1837 bp, Homo sapiens
  Payload ID: 17600
  Gene Name: tetraspanin 10
  ENST ID: ENST00000574882
  CDS Start-End: 202-1383
ccccgccatccctgcaactggaggaggggattttggaaagttgcgtctgagattacttctgctcgtcctcggaaacccaagcggcacaggaaagtccaaaaaggaagcaaagacgagcatccgaagtctcacccaaaaataactactgctgcgtattatagcgtattataattggggaaacagcattccaaacttctctccatgcacagactagcccagggccgcagtcaggaccagcccagcagcccagccacagaggagccagcgaacctctcccggcgcctgtgctgggggctttctgttccagcgtcaaggatggaggagggggagaggagccccttactgtcccaggaaactgcaggccagaagcccctctctgtgcacaggccacccacctcaggctgcctaggtccagtgcccagggaggaccaggcggaggcctggggctgcagctgctgtcccccggagaccaagcaccaggccttgagtggcacccccaagaaaggaccagccccttccctctccccagggagcagctgcgtcaagtatctgatcttcctctccaacttccccttctccctgctggggctgctggccctggccatcgggctctggggcctggctgtcaaggggtctctgggaagtgatctgggggggcccctgcccgcagaccccatgctggggctggcactgggagggctggtggtcagcgcagtgagcctggctggctacctgggcgccctctgtgagaacacctgcctgttacgtggcttctctgggggcatccttgccttcctggtgcttgaggccgtggcgggggccctggtggtggccctctggggcccgctgcaagacagcctggagcacaccctgcgtgtggccatcgcccactaccaggacgacccagacctgcgcttcctcctcgaccaagtccagctcgggctgaggtgctgcggagctgcctcctaccaggactggcagcagaacctgtactttaactgcagctcccccggggtgcaggcctgcagccttcccgcctcctgctgcatcgacccccgcgaagatggagcctctgtcaacgaccagtgcggcttcggggtcctgcgcctggatgcggacgcagctcagagagtggtgtacctggagggctgcggcccgccgctccggcggtggctgcgcgcgaacctggctgcctcgggcggctacgcaatcgcggtggtgctgctgcagggcgcggagctcctgctggccgcccggctactcggggccctcgctgcccgcaggggggcggcgtacggccccggagcgcgcggggaggaccgcgctggcccccagagccccagccccggcgccccgcccgctgccaagcccgcccggggctgagcgcacgccccgaggtccgagaccgccacgcacagggatacagggggcgcctccgcccggctaaaaagcgcggcctgcgccgccgccgccgcctgatttcgctcgggcttcgggtgacttcgccgcaggacctacccagctcgctcacttcgctcgctccgcgtcccccatgccagcccccaacgcagggcgcccggcgaagccacgggactggcgggaggagcacgcggggccggaggaaatcctgaagctgaccctcacctccgagcccccactcccaccccagccgcacagttcccacctcctggcacctccctcccctggggccgccaccccttctgggctcgtgatggtggagctaaggtccaggcctctccctcccgagtgcatttttggggagatagtaaatgttttattcgggtgtatcattcatacagtaaagacaccaatcttc

SEQ ID NO: 190330 - DNA, 1868 bp, Homo sapiens
  Payload ID: 17600
  Gene Name: tetraspanin 10
  ENST ID: ENST00000621293
  CDS Start-End: 78-785
ccagcagcccagccacagaggagccagcgaacctctcccggcgcctgtgctgggggctttctgttccagcgtcaaggatggaggagggggagaggagccccttactgtcccaggaaactgcaggccagaagcccctctctgtgcacaggccacccacctcaggctgcctaggtccagtgcccagggaggaccaggcggaggcctggggctgcagctgctgtcccccggagaccaagcaccaggccttgagtggcacccccaagaaaggaccagccccttccctctccccagggagcagctgcgtcaagtatctgatcttcctctccaacttccccttctccctgctggggctgctggccctggccatcgggctctggggcctggctgtcaaggggtctctgggaagtgatctgggggggcccctgcccgcagaccccatgctggggctggcactgggagggctggtggtcagcgcagtgagcctggctggctacctgggcgccctctgtgagaacacctgcctgttacgtggcttctctgggggcatccttgccttcctggtgcttgaggccgtggcgggggccctggtggtggccctctggggcccgctgcaagacagcctggagcacaccctgcgtgtggccatcgcccactaccaggacgacccagacctgcgcttcctcctcgaccaagtccagctcgggctgaggtgctgcggagctgcctcctaccaggactggcagcagaacctgtactgcctctcaagcccttgctcttcccagtaagacctgtggaccattccagaagcctctgccagagttccatccaccctcccctgctccaactctaccttctcaatgagctcagcagcctctgcggagggaggtcctcttatcaatgcttgtctgttcccccttcaaccgtctcactaaatatcctcctgctagtcaacacagccaccacccctacctgcaagcgcagaggactgccgtgcacagggatacgttatagagagccaggtactttaactgcagctcccccggggtgcaggcctgcagccttcccgcctcctgctgcatcgacccccgcgaagatggagcctctgtcaacgaccagtgcggcttcggggtcctgcgcctggatgcggacgcagctcagagagtggtgtacctggagggctgcggcccgccgctccggcggtggctgcgcgcgaacctggctgcctcgggcggctacgcaatcgcggtggtgctgctgcagggcgcggagctcctgctggccgcccggctactcggggccctcgctgcccgcaggggggcggcgtacggccccggagcgcgcggggaggaccgcgctggcccccagagccccagccccggcgccccgcccgctgccaagcccgcccggggctgagcgcacgccccgaggtccgagaccgccacgcacagggatacagggggcgcctccgcccggctaaaaagcgcggcctgcgccgccgccgccgcctgatttcgctcgggcttcgggtgacttcgccgcaggacctacccagctcgctcacttcgctcgctccgcgtcccccatgccagcccccaacgcagggcgcccggcgaagccacgggactggcgggaggagcacgcggggccggaggaaatcctgaagctgaccctcacctccgagcccccactcccaccccagccgcacagttcccacctcctggcacctccctcccctggggccgccaccccttctgggctcgtgatggtggagctaaggtccaggcctctccctcccgagtgcatttttggggagatagtaaatgttttattcgggtgtatcattcatacagtaaagacaccaatcttca

SEQ ID NO: 190331 - DNA, 1068 bp, Homo sapiens
  Payload ID: 17600
  Gene Name: tetraspanin 10
  ENST ID: ENST00000611590
  CDS Start-End: 1-1068
atggaggagggggagaggagccccttactgtcccaggaaactgcaggccagaagcccctctctgtgcacaggccacccacctcaggctgcctaggtccagtgcccagggaggaccaggcggaggcctggggctgcagctgctgtcccccggagaccaagcaccaggccttgagtggcacccccaagaaaggaccagccccttccctctccccagggagcagctgcgtcaagtatctgatcttcctctccaacttccccttctccctgctggggctgctggccctggccatcgggctctggggcctggctgtcaaggggtctctgggaagtgatctgggggggcccctgcccgcagaccccatgctggggctggcactgggagggctggtggtcagcgcagtgagcctggctggctacctgggcgccctctgtgagaacacctgcctgttacgtggcttctctgggggcatccttgccttcctggtgcttgaggccgtggcgggggccctggtggtggccctctggggcccgctgcaagacagcctggagcacaccctgcgtgtggccatcgcccactaccaggacgacccagacctgcgcttcctcctcgaccaagtccagctcgggctgaggtgctgcggagctgcctcctaccaggactggcagcagaacctgtactttaactgcagctcccccggggtgcaggcctgcagccttcccgcctcctgctgcatcgacccccgcgaagatggagcctctgtcaacgaccagtgcggcttcggggtcctgcgcctggatgcggacgcagctcagagagtggtgtacctggagggctgcggcccgccgctccggcggtggctgcgcgcgaacctggctgcctcgggcggctacgcaatcgcggtggtgctgctgcagggcgcggagctcctgctggccgcccggctactcggggccctcgctgcccgcaggggggcggcgtacggccccggagcgcgcggggaggaccgcgctggcccccagagccccagccccggcgccccgcccgctgccaagcccgcccggggctga

SEQ ID NO: 190332 - DNA, 5505 bp, Homo sapiens
  Payload ID: 17601
  Gene Name: tetraspanin 11
  Uniprot ID: A1L157
  ENST ID: ENST00000261177
  CDS Start-End: 60-821
agtggaggaggcaggaatgcctgggacactcgcggggcatgtgagcaggcccagaagccatggcccactataagactgagcaggacgactggctgatcatctacttgaagtatttactctttgtcttcaacttcttcttctgggtcgggggagcagccgtcctggctgtgggcatctggaccctggtggagaagagtggctacctcagcgtcctggcctccagcacctttgccgcctccgcctacatcctcatctttgcgggcgtacttgtcatggtgaccggcttcctgggcttcggtgccatcctctgggagcggaagggctgcctctccacgtatttctgcctgttgctcgtcatcttcctggttgagctggtggcgggagtcctggcccatgtgtattaccagaggctgagtgatgaactgaagcagcacttgaaccggactctggctgagaactacgggcagcccggagccacgcagatcaccgcctcagtggaccgactccagcaggatttcaagtgctgtggaagcaacagctcagccgactggcagcacagcacgtacatcctgttgcgggaggccgagggccgccaggtgcccgacagctgctgcaagacagtggtggtgcgctgcggccagcgggcccacccctccaacatctataaggtggagggaggctgcctcaccaagctggagcagttcctggccgaccacctgctgcttatgggggcagtgggcatcggggtggcctgcctgcagatctgcgggatggttctcacctgctgcttgcaccagaggctccagcggcatttttactaatggccaaccacctcctcttccaactgcccctcaagacaacatgtggccacatgccatctgcaaggcctgcagagttagcaccagctccactagggccatagatgccccctcctttgtgcctagctcctgcgaatccaccgagtgcctgagaccatagcttctgtgcccacccaggcagagaccctcggccccctctcctccatttctgagcccccatggccagatcctgggcagggaaatgatcctttcaggagacaaccagagcccctcaccaggaacgggggcacccgtggactacgggagggtggcggttgggttctctgctccctcccagctcctgaacctggaacaatcggcagaaaacccaggaaccccggcactcctgcattcagcacgggattcccccacccatgcccagaagccctgaccttgctgtttctggaaaaagcatggggtggggcagggagggctggcatttcccccagaagaccttgccctttgacctgcccactctccacactgcctcacctggaaagccatgtcctgctggcctcattccttcctgaagggcctaggagtggggaggcctgggtagggcagccacaggctgggtagagccgccctggcaggaagcagggggtaaggtggccataccagcacatgctgcactaggagcagagccctgcacctgcctagctgccttcctgggagaaacctccctgggagaccatggccccaagccctggcctctagtgatacgcccctcgggaatctcctgttccggggcctgattctcaggaacaccaggtttcagaccatcttcagcacctaatgttgatgggtgtcaaacatctcctggagtggaccaactcgcaaccctgcaaagtcggagctgctgagaaggggcagctctgaatagaggggcatctgcctgaacctcacttttcctggggccctctccttgaccccgtagccaccaccacactgcttccagggggtccagctctgcttcccttcccacctgtcctagagtggacagagctttttccttgggttctctcttgcatcactaagttcagcagggaatttgcggaattttcaggaagaactttccccagtaataagggagaacagaaagaaaatcctagaaaatacagagtatccatgctggcagctttttgtacaacacccatagggacccccccaaatggctattacaaaggggcagcccattcactacacaagaaccccacacctggcttccaccctccccagctcctgcacttctccccagagcgggaccctcttacttccccccatgaaggggggcaccttgtgctaaggccaaggctgagcgaggtcccagctcacctccctgcttgatccagattgcactgtgatgagcacattgctgacctaggccagtcctggggcaggcgtgctctctctcccatacataggagtggcctcaaggccacccagtgctgaccccaacagagccctgaactgtccagaaactgcatcctcagcacaggaagtacccacatggacagagggaagcccagcctcggggccggttgcctcctcttctctgggtgttctccagtggcttcttggagcctaggctggtttatctcccctgcctaaaaggccctggggttgccaatgcaaattcattaaaacgaagaccagatatcccagactgcacagaggccgagagaaatggtatagtgcgtgattagcattgctgccctccaacctcctgggattcatgcagataatcaaaaactgactatgactcccaagttctctgaaggatgagatcacaactgacaactcttacgacagagggagagtggtgagagagagaaagagggtactgggctagagccatgttcttcctgccgaggtgccagggggaggcggcagtgggcagggggtgctggggccttacctgtctgccctggtggggatgaaagacaggtgacaggcaggtgccctgtgcacagccttatcattgaaggcaggcccaggacagcctgccccatctgccccagccccatgggatggttggtccagcctgactggggcaggattagctgcaattcctgccctgtgtgtcgtccagccagactgcctcttgaaagatggcttgtccaagcggcagacagtggtagaacaacccagggcttggaaatctgacctccttgtccatgccaacagcctgggagatgagacagggttagaggaaacagaggcccaggatacggcaggttctgcctgggagtgtacaatggttggagtccagagccaacgatgtggtccccagcggggtgtgcccctcctgctgacgagggtacagatccatacccaggtcaattcctcccgggcccctgtttggaggctgctacagccttgagttccttggagagagaggacacgcctgtggaatgtcaccttcagtcccgtgcaggcaaaaggcccctgcacaccagggccctaggaaagcagcatcaggtgctgggatcccacccagctggcacgggcacgttcttgccctgcacactccatgctgcccttccctgagctcgcaggggcagacaccaagagaagggcgcgtccccgagtcccctgggtgacctgtgtcaggacagcaggcaagaatgaaacgtggccttggctgacgggttggaatatttgtgaccgttcttgtctttctccctcctgcttccccggcaccctagccccatctccaggagcccctcaggcagagtaagtggggagtgtgtccagggatttttttgtgtttaccaaggtcctgctgtgcacttagaatctgtcaccataaatacttatctcgcagttaccccagcaagagggtgttatttcccccattttataaaaggaaattaaggctgggcaaagttaagacttgcttgtcagtggtcatggctgttgtcttgccacccccagctggggagaaggaagaaaactgggccgggaacccctcccctcagtgtcccccagttctccatctccataaggagccatcaggctgtcattaaggaacagagtgtcactcagggggcactgtcacaaagcagcacccatggcacatgggccgggggtgcagaagcctggcttatttcaggctgacagctggaccctctgggtgcaggggctcaggcagtggccaagagcccaaagggctaaggcccgtgacgaccacccagcccgtcaccccaggtacaaacactgaccccaaagcaagagcagggactgtccctcagccctcagggccttcatgcagggtgcagaatctcatgtccacatggaggtcacccctcaggtcacacccactcccagagcaaccctgggcagggaggggcaccctggggttgtgttgaccacctccccttcaggtgaggcccttttctgccttctttctagccccctgcatggggcacctgctattgctggggctctggggtggaccctgtgtgatttctgtcagggagcttgtgctgtgcatggccagaggtgtttacatccagaagggcccagcacggccctgtggggtgtggggggaatatggtagatcattgtgatgtgcctcggggccctcttgccttggagccagctttgtttcagaatctgctacttgggccctcttcagggttttgaggctggagaagtgagttgggacagtcactgtcatcaccacccaccctgtcacccacctggaaaacattcttgatatactggccatgctgggccgggctcacatccactgagggtatagtgaccaagcgtctaaaccagtcgttctcaaacttcggtgagtatcagaatcacctggaagggcttttacaaacagattgctggccccaccccccagaatttctcatcaggagtgggcaagaccaatcatttgcatttctgacaagttcccaggagctgcagctgctggccctggaaccacactttgagaaccactgctttagaccaaacaccaaaggaagatgcagccaccctcctttacatgtcacaacgctcagggtccatgagtacctcaggctgtccagctgagctccacctgcagcagccgagattcccgactcgctccaccattgggggctaggagtgaagcgtgtcaccatggtcagctcatggccagccaggaaagcctctctgctgtgcgtctgtgcagttcttgttcttccctggaggactcttggatcgcctgtgatcttggccaggagaccaggtgcctgggtcccttcctggaaggggacaagttacacaccccagccccattttcccaccaacttctacatgccttgggagaacctgctacatgttggctgcccccttcccctatttcagcagtgcccagtcctgcttataaacctgaggcctgctccccataccctgccctgtgcaagtgccagccgttattccaggcagcccaatgttgttgaggccagatggattcctggaagcagctggcccatggatgtgagtcatcacagtattctagaaacagagaagaggtcttaacctaatgcgcatagagaaattgttctcattgtaaacatacccctgtccttagctgatctaggtggaagcccagcttcatgtgctagggggcatgataatgataataaaggaattgtatctagga

SEQ ID NO: 190333 - DNA, 1058 bp, Homo sapiens
  Payload ID: 17601
  Gene Name: tetraspanin 11
  Uniprot ID: A1L157
  ENST ID: ENST00000546076
  CDS Start-End: 61-822
agtctctctaggcgcagctcccttcgccgcttccggagcccctggcagggcccagaagccatggcccactataagactgagcaggacgactggctgatcatctacttgaagtatttactctttgtcttcaacttcttcttctgggtcgggggagcagccgtcctggctgtgggcatctggaccctggtggagaagagtggctacctcagcgtcctggcctccagcacctttgccgcctccgcctacatcctcatctttgcgggcgtacttgtcatggtgaccggcttcctgggcttcggtgccatcctctgggagcggaagggctgcctctccacgtatttctgcctgttgctcgtcatcttcctggttgagctggtggcgggagtcctggcccatgtgtattaccagaggctgagtgatgaactgaagcagcacttgaaccggactctggctgagaactacgggcagcccggagccacgcagatcaccgcctcagtggaccgactccagcaggatttcaagtgctgtggaagcaacagctcagccgactggcagcacagcacgtacatcctgttgcgggaggccgagggccgccaggtgcccgacagctgctgcaagacagtggtggtgcgctgcggccagcgggcccacccctccaacatctataaggtggagggaggctgcctcaccaagctggagcagttcctggccgaccacctgctgcttatgggggcagtgggcatcggggtggcctgcctgcagatctgcgggatggttctcacctgctgcttgcaccagaggctccagcggcatttttactaatggccaaccacctcctcttccaactgcccctcaagacaacatgtggccacatgccatctgcaaggcctgcagagttagcaccagctccactagggccatagatgccccctcctttgtgcctagctcctgcgaatccaccgagtgcctgagaccatagcttctgtgcccacccaggcagagaccctcggccccctctcctccatttctgagcccccatggccagatcctgggcaggg

SEQ ID NO: 190334 - DNA, 1649 bp, Homo sapiens
  Payload ID: 17601
  Gene Name: tetraspanin 11
  ENST ID: ENST00000545802
  CDS Start-End: 381-506
cggcaaccgcacagctgcctcggactctgacttaattccctccgcgtgctctgaatcgcagagaggcaaacccccaaacaaagagccggcagctcgcgtgcggggctcccgggcgcgtcctgccggctgggctgggagagccggcgccggggcgtcgcggccgagcgctgggcaggcggggactagagggccggcaggaagcctcagtgggcgcaggggcgcgggccgggctgcccacacgctgaccttcccgggctgggagggaggagcgctggctgcgggcggtgggcggctgggcggccccgggagccgccgctctcagtctctctaggcgcagctcccttcgccgcttccggagcccctggcagggcccagaagccatggcccactataagactgagcaggacgactggctgatcatctacttgaagtatttactctttgtcttcaacttcttcttctgggtgagtgaattctgcacacacatcctcttccccgagcactgaatgagtcaagccaccttttgtttttttgtgtcaccactttgaggttgatatcttccaaatcaaagatcaacgatcaaccatgggtgaattcttcccactttaaagcaaatatgtacatttgctactgagaaagaagaaaagaattgggtctgcaggttggcatggagtttgtaccacatggcatctgaatagaggcacaaacataacaataggctttgtgttctagccctgctgtacaaagggtccggttctttcttccccactaacttgttgcaccagcgccttttggaaaatgtgactgcctgaaataataacttgttttccactgaaatccattcacctttcatggttaacattctccaggcccagggcagagaaacagaagtcctggaggctccaactactgctgcctgtgatgaaaataatctctatggcaactctcctcaggagcctgcctgggtgaggtcttccagaggagtgtagtctgtccacttgaagcaatcatctgggtaattgggagcagaataccatcagttcccaaaaatagacactggaatatatatatttgttattacagtctcactaaatttgagaaggtagaagagtgacaagagtgcaggctttgcaggcagctgtacccatgctctgctgactactaatggtggagccttgggcaacttacctaacttcaaggaatctgcttccccagctgcaattcaatgataatttctagcctgttggggttgcattcagtaaatgcagtattttgaatatattagatgtcaaatgcctgaaaataccaccaaatcaacccatgataaggcatagctgggcttcctgctaccatggtgagggagaagacacttgacagagtcttagaagcatctcagaaaggcaaatgcagaagtgggggacatgtctgagttttcagggtctttcttgcaggggcttgcttaagattgggaaagaccatgatgtgagagtttaggatgggtagacatggcaaggcaagagttttgaagagtcttggagaataaaccagtcattagatgctatctgttaaaaagttgtgcgatctgctatttgtttaaatgttgtttgcaaagttcctgaaaggaataataaaataatttgtcactttta

SEQ ID NO: 190335 - DNA, 988 bp, Homo sapiens
  Payload ID: 17601
  Gene Name: tetraspanin 11
  ENST ID: ENST00000535215
  CDS Start-End: 232-780
agactgtcccgagcttcccccgggcgggcagagggaagccggctggggatgaggagtggaggaggcaggaatgcctgggacactcgcggggcatgtgagcaggtcgggggagcagccgtcctggctgtgggcatctggaccctggtggagaagagtggctacctcagcgtcctggcctccagcacctttgccgcctccgcctacatcctcatctttgcgggcgtacttgtcatggtgaccggcttcctgggcttcggtgccatcctctgggagcggaagggctgcctctccacgtatttctgcctgttgctcgtcatcttcctggttgagctggtggcgggagtcctggcccatgtgtattaccagaggctgagtgatgaactgaagcagcacttgaaccggactctggctgagaactacgggcagcccggagccacgcagatcaccgcctcagtggaccgactccagcaggatttcaagtgctgtggaagcaacagctcagccgactggcagcacagcacgtacatcctgttgcgggaggccgagggccgccaggtgcccgacagctgctgcaagacagtggtggtgcgctgcggccagcgggcccacccctccaacatctataaggtggagggaggctgcctcaccaagctggagcagttcctggccgaccacctgctgcttatgggggcagtgggcatcggggtggcctgcctgcagatctgcgggatggttctcacctgctgcttgcaccagaggctccagcggcatttttactaatggccaaccacctcctcttccaactgcccctcaagacaacatgtggccacatgccatctgcaaggcctgcagagttagcaccagctccactagggccatagatgccccctcctttgtgcctagctcctgcgaatccaccgagtgcctgagaccatagcttctgtgcccacccaggcagagaccctcggccccctctcctccatttctg

SEQ ID NO: 190336 - DNA, 2798 bp, Homo sapiens
  Payload ID: 17602
  Gene Name: tetraspanin 12
  Uniprot ID: O95859
  ENST ID: ENST00000222747
  CDS Start-End: 609-1526
aagcctgcttctctatgcttataacccagcctccattccttcgacgccaccattttaaagggatttactgcacggacttctcccaagttcctaggcattatcttctggaccctatcctgcagaggtgaagcgtccctttggggactctcgctgggtgagagggacaagaaacacccactaggacccaaccccggcagccagcggctcgagcatgcgctgagagtttgtgcagctggccctggctgccgccgctgcctcgtccggactcggagaggacttgggagggacagcggcgctgggaggtggcttagcagagactttccagcaactgctgcccaggacttttttttttttttttctttttcccaggaggcggcgacggcggcggcggggggagaggaagagaaagaagcgtctccagctgaagccaatgcagccctccggctctccgcgaagaagttccctgccccgatgagcccccgccgtgcgtccccgactatccccaggcgggcgtggggcaccgggcccagcgccgacgatcgctgccgttttgcccttgggagtaggatgtggtgaaaggatggggcttctcccttacggggctcacaatggccagagaagattccgtgaagtgtctgcgctgcctgctctacgccctcaatctgctcttttggttaatgtccatcagtgtgttggcagtttctgcttggatgagggactacctaaataatgttctcactttaactgcagaaacgagggtagaggaagcagtcattttgacttactttcctgtggttcatccggtcatgattgctgtttgctgtttccttatcattgtggggatgttaggatattgtggaacggtgaaaagaaatctgttgcttcttgcatggtactttggaagtttgcttgtcattttctgtgtagaactggcttgtggcgtttggacatatgaacaggaacttatggttccagtacaatggtcagatatggtcactttgaaagccaggatgacaaattatggattacctagatatcggtggcttactcatgcttggaatttttttcagagagagtttaagtgctgtggagtagtatatttcactgactggttggaaatgacagagatggactggcccccagattcctgctgtgttagagaattcccaggatgttccaaacaggcccaccaggaagatctcagtgacctttatcaagagggttgtgggaagaaaatgtattcctttttgagaggaaccaaacaactgcaggtgctgaggtttctgggaatctccattggggtgacacaaatcctggccatgattctcaccattactctgctctgggctctgtattatgatagaagggagccggggacagaccaaatgatgtccttgaagaatgacaactctcagcacctgtcatgtccctcagtagaactgttgaaaccaagcctgtcaagaatctttgaacacacatccatggcaaacagctttaatacacactttgagatggaggagttataaaaagaaatgtcacagaagaaaaccacaaacttgttttactggacttgtgaatttttgagtacatactatgtgtttcagaaatatgtagaaataaaaatgttgccataaaataacacctaagcatatactattctatgctttaaaatgaggatggaaaagtttcatgtcataagtcaccacctggacaataattgatgcccttaaaatgctgaagacagatgtcatacccactgtgtagcctgtgtatgacttttactgaacacagttatgttttgaggcagcatggtttgattagcatttccgcatccatgcaaacgagtcacatatggtgggactggagccatagtaaaggttgatttacttctaccaactagtatataaagtactaattaaatgctaacataggaagttagaaaatactaataacttttattactcagcgatctattcttctgatgctaaataaattatatatcagaaaactttcaatattggtgactacctaaatgtgatttttgctggttactaaaatattcttaccacttaaaagagcaagctaacacattgtcttaagctgatcagggattttttgtatataagtctgtgttaaatctgtataattcagtcgatttcagttctgataatgttaagaataaccattatgaaaaggaaaatttgtcctgtatagcatcattatttttagcctttcctgttaataaagctttactattctgtcctgggcttatattacacatataactgttatttaaatacttaaccactaattttgaaaattaccagtgtgatacataggaatcattattcagaatgtagtctggtctttaggaagtattaataagaaaatttgcacataacttagttgattcagaaaggacttgtatgctgtttttctcccaaatgaagactctttttgacactaaacactttttaaaaagcttatctttgccttctccaaacaagaagcaatagtctccaagtcaatataaattctacagaaaatagtgttctttttctccagaaaaatgcttgtgagaatcattaaaacatgtgacaatttagagattctttgttttatttcactgattaatatactgtggcaaattacacagattattaaatttttttacaagagtatagtatatttatttgaaatgggaaaagtgcattttactgtattttgtgtattttgtttatttctcagaatatggaaagaaaattaaaatgtgtcaataaatattttctagagagtaa

SEQ ID NO: 190337 - DNA, 693 bp, Homo sapiens
  Payload ID: 17602
  Gene Name: tetraspanin 12
  ENST ID: ENST00000430985
  CDS Start-End: 409-693
accccttcaccccccttctcaaacacaaatattatcatataataaaagcctgcttctctatgcttataacccagcctccattccttcgacgccaccattttaaagggatttactgcacggacttctcccaagttcctaggcattatcttctggaccctatcctgcagaggaggcggcgacggcggcggcggggggagaggaagagaaagaagcgtctccagctgaagccaatgcagccctccggctctccgcgaagaagttccctgccccgatgagcccccgccgtgcgtccccgactatccccaggcgggcgtggggcaccgggcccagcgccgacgatcgctgccgttttgcccttgggagtaggatgtggtgaaaggatggggcttctcccttacggggctcacaatggccagagaagattccgtgaagtgtctgcgctgcctgctctacgccctcaatctgctcttttggttaatgtccatcagtgtgttggcagtttctgcttggatgagggactacctaaataatgttctcactttaactgcagaaacgagggtagaggaagcagtcattttgacttactttcctgtggttcatccggtcatgattgctgtttgctgtttccttatcattgtggggatgttaggatattgtggaacggtgaaaagaaatctgttgcttcttgcatgg

SEQ ID NO: 190338 - DNA, 1167 bp, Homo sapiens
  Payload ID: 17602
  Gene Name: tetraspanin 12
  ENST ID: ENST00000450414
  CDS Start-End: 1-129
aatctgttgcttcttgcatggtactttggaagtttgcttgtcattttctgtgtagaactggcttgtggcgtttggacatatgaacaggaacttatgagcgaagagagtcatttggcaattgaacagtaaaatagaagtcatttctggtgctgatgtagtcttcaaagattctttggtgaatctactattgtgcttcgagactgttttgaatactaagtagtaaccacagactagtggctactctgcacactccaatttacatgtcagtggtgctttggcacactcacacatatgtatctctgtgaagacactcatgcttccaatgtacaacggcactaagttccagtacaatggtcagatatggtcactttgaaagccaggatgacaaattatggattacctagatatcggtggcttactcatgcttggaatttttttcagagagagtttaagtgctgtggagtagtatatttcactgactggttggaaatgacagagatggactggcccccagattcctgctgtgttagagaattcccaggatgttccaaacaggcccaccaggaagatctcagtgacctttatcaagagggttgtgggaagaaaatgtattcctttttgagaggaaccaaacaactgcaggtgctgaggtttctgggaatctccattggggtgacacaaatcctggccatgattctcaccattactctgctctgggctctgtattatgatagaagggagccggggacagaccaaatgatgtccttgaagaatgacaactctcagcacctgtcatgtccctcagtagaactgttgaaaccaagcctgtcaagaatctttgaacacacatccatggcaaacagctttaatacacactttgagatggaggagttataaaaagaaatgtcacagaagaaaaccacaaacttgttttactggacttgtgaatttttgagtacatactatgtgtttcagaaatatgtagaaataaaaatgttgccataaaataacacctaagcatatactattctatgctttaaaatgaggatggaaaagtttcatgtcataagtcaccacctggacaataattgatgcccttaaaatgctgaagacagatgtcatacccactgtgtagcctgtgtatgacttttactgaacacagttatg

SEQ ID NO: 190339 - DNA, 1495 bp, Homo sapiens
  Payload ID: 17602
  Gene Name: tetraspanin 12
  Uniprot ID: O95859
  ENST ID: ENST00000415871
  CDS Start-End: 360-1277
attccttcgacgccaccattttaaagggatttactgcacggacttctcccaagttcctaggcattatcttctggaccctatcctgcagaggtgaagcgtccctttggggactctcgctgggaggcggcgacggcggcggcggggggagaggaagagaaagaagcgtctccagctgaagccaatgcagccctccggctctccgcgaagaagttccctgccccgatgagcccccgccgtgcgtccccgactatccccaggcgggcgtggggcaccgggcccagcgccgacgatcgctgccgttttgcccttgggagtaggatgtggtgaaaggatggggcttctcccttacggggctcacaatggccagagaagattccgtgaagtgtctgcgctgcctgctctacgccctcaatctgctcttttggttaatgtccatcagtgtgttggcagtttctgcttggatgagggactacctaaataatgttctcactttaactgcagaaacgagggtagaggaagcagtcattttgacttactttcctgtggttcatccggtcatgattgctgtttgctgtttccttatcattgtggggatgttaggatattgtggaacggtgaaaagaaatctgttgcttcttgcatggtactttggaagtttgcttgtcattttctgtgtagaactggcttgtggcgtttggacatatgaacaggaacttatggttccagtacaatggtcagatatggtcactttgaaagccaggatgacaaattatggattacctagatatcggtggcttactcatgcttggaatttttttcagagagagtttaagtgctgtggagtagtatatttcactgactggttggaaatgacagagatggactggcccccagattcctgctgtgttagagaattcccaggatgttccaaacaggcccaccaggaagatctcagtgacctttatcaagagggttgtgggaagaaaatgtattcctttttgagaggaaccaaacaactgcaggtgctgaggtttctgggaatctccattggggtgacacaaatcctggccatgattctcaccattactctgctctgggctctgtattatgatagaagggagccggggacagaccaaatgatgtccttgaagaatgacaactctcagcacctgtcatgtccctcagtagaactgttgaaaccaagcctgtcaagaatctttgaacacacatccatggcaaacagctttaatacacactttgagatggaggagttataaaaagaaatgtcacagaagaaaaccacaaacttgttttactggacttgtgaatttttgagtacatactatgtgtttcagaaatatgtagaaataaaaatgttgccataaaataacacctaagcatatactattctatgctttaaaatgaggatggaaaagtttcatgtcataagtcaccacctggacaataattgatgcccttaaaatgctgaagacag

SEQ ID NO: 190340 - DNA, 551 bp, Homo sapiens
  Payload ID: 17602
  Gene Name: tetraspanin 12
  ENST ID: ENST00000433758
  CDS Start-End: 192-551
attcacacccgagctgcgggacggggtagaggggtgcggagttggagtgcccaggaactgtcctaactagaagggcgctcattctctcgggcttgccggtggcgcctctgacgtgtccgggatcgctgccgttttgcccttgggagtaggatgtggtgaaaggatggggcttctcccttacggggctcacaatggccagagaagattccgtgaagtgtctgcgctgcctgctctacgccctcaatctgctcttttggttaatgtccatcagtgtgttggcagtttctgcttggatgagggactacctaaataatgttctcactttaactgcagaaacgagggtagaggaagcagtcattttgacttactttcctgtggttcatccggtcatgattgctgtttgctgtttccttatcattgtggggatgttaggatattgtggaacggtgaaaagaaatctgttgcttcttgcatggtactttggaagtttgcttgtcattttctgtgtagaactggcttgtggcgtttggacatatgaacaggaacttatg

SEQ ID NO: 190341 - DNA, 569 bp, Homo sapiens
  Payload ID: 17602
  Gene Name: tetraspanin 12
  ENST ID: ENST00000424710
  CDS Start-End: 232-569
agtgccgagcacagctgtcctcgaggaggggcgtggagtgagggaggttttcaagagcgtctcatcagaatgcacagggctccgccgcgtgtcccctgagaacgcgagtttactgtgcgacttcattcatccggatagttgctcttttcttttcccagcagatcgctgccgttttgcccttgggagtaggatgtggtgaaaggatggggcttctcccttacggggctcacaatggccagagaagattccgtgaagtgtctgcgctgcctgctctacgccctcaatctgctcttttggttaatgtccatcagtgtgttggcagtttctgcttggatgagggactacctaaataatgttctcactttaactgcagaaacgagggtagaggaagcagtcattttgacttactttcctgtggttcatccggtcatgattgctgtttgctgtttccttatcattgtggggatgttaggatattgtggaacggtgaaaagaaatctgttgcttcttgcatggtactttggaagtttgcttgtcattttctgtgtagaactggcttgtggcgtttg

SEQ ID NO: 190342 - DNA, 551 bp, Homo sapiens
  Payload ID: 17602
  Gene Name: tetraspanin 12
  ENST ID: ENST00000441017
  CDS Start-End: 110-551
agggctccgccgcgtgtcccctgagaacgcgagtttactatcgctgccgttttgcccttgggagtaggatgtggtgaaaggatggggcttctcccttacggggctcacaatggccagagaagattccgtgaagtgtctgcgctgcctgctctacgccctcaatctgctcttttggttaatgtccatcagtgtgttggcagtttctgcttggatgagggactacctaaataatgttctcactttaactgcagaaacgagggtagaggaagcagtcattttgacttactttcctgtggttcatccggtcatgattgctgtttgctgtttccttatcattgtggggatgttaggatattgtggaacggtgaaaagaaatctgttgcttcttgcatggtactttggaagtttgcttgtcattttctgtgtagaactggcttgtggcgtttggacatatgaacaggaacttatggttccagtacaatggtcagatatggtcactttgaaagccaggatgacaaattatggattacctagatatcggtggcttactc

SEQ ID NO: 190343 - DNA, 2093 bp, Homo sapiens
  Payload ID: 17603
  Gene Name: tetraspanin 13
  Uniprot ID: O95857
  ENST ID: ENST00000262067
  CDS Start-End: 434-1048
acctgctcctggggaaactacaccaaggccgccgctctggcctggggctccctcccacacggccttggccctctccccctcgccccgggaccgctccgcccctcccggatcccggtcggcggagcgcatttatttgcatatttctacctttgttccctgccagcggccaatcagcgcgcggggcgagacgaaggggctgggcggggctcgggctcctgctccggctcagctgcggcggccgcaggttccaaagcgggtccgagccgccgccgcgcgcgcgccgcgcactgcagccccaggccccggccccccacccacgtctgcgttgctgccccgcctgggccaggccccaaaggcaaggacaaagcagctgtcagggaacctccgccggagtcgaatttacgtgcagctgccggcaaccacaggttccaagatggtttgcgggggcttcgcgtgttccaagaactgcctgtgcgccctcaacctgctttacaccttggttagtctgctgctaattggaattgctgcgtggggcattggcttcgggctgatttccagtctccgagtggtcggcgtggtcattgcagtgggcatcttcttgttcctgattgctttagtgggtctgattggagctgtaaaacatcatcaggtgttgctatttttttatatgattattctgttacttgtatttattgttcagttttctgtatcttgcgcttgtttagccctgaaccaggagcaacagggtcagcttctggaggttggttggaacaatacggcaagtgctcgaaatgacatccagagaaatctaaactgctgtgggttccgaagtgttaacccaaatgacacctgtctggctagctgtgttaaaagtgaccactcgtgctcgccatgtgctccaatcataggagaatatgctggagaggttttgagatttgttggtggcattggcctgttcttcagttttacagagatcctgggtgtttggctgacctacagatacaggaaccagaaagacccccgcgcgaatcctagtgcattcctttgatgagaaaacaaggaagatttcctttcgtattatgatcttgttcactttctgtaattttctgttaagctccatttgccagtttaaggaaggaaacactatctggaaaagtaccttattgatagtggaattatatatttttactctatgtttctctacatgtttttttctttccgttgctgaaaaatatttgaaacttgtggtctctgaagctcggtggcacctggaatttactgtattcattgtcgggcactgtccactgtggcctttcttagcatttttacctgcagaaaaactttgtatggtaccactgtgttggttatatggtgaatctgaacgtacatctcactggtataattatatgtagcactgtgctgtgtagatagttcctactggaaaaagagtggaaatttattaaaatcagaaagtatgagatcctgttatgttaagggaaatccaaattcccaattttttttggtctttttaggaaagattgttgtggtaaaaagtgttagtataaaaatgataatttacttgtagtcttttatgattacaccaatgtattctagaaatagttatgtcttaggaaattgtggtttaatttttgacttttacaggtaagtgcaaaggagaagtggtttcatgaaatgttctaatgtataataacatttaccttcagcctccatcagaatggaacgagttttgagtaatcaggaagtatatctatatgatcttgatattgttttataataatttgaagtctaaaagactgcatttttaaacaagttagtattaatgcgttggcccacgtagcaaaaagatatttgattatcttaaaaattgttaaataccgttttcatgaaatttctcagtattgtaacagcaacttgtcaaacctaagcatatttgaatatgatctcccataatttgaaattgaaatcgtattgtgtggctctgtatattctgttaaaaaattaaaggacagaaacctttctttgtgtatgcatgtttgaattaaaagaaagtaatggaagaattgatcgatgaa

SEQ ID NO: 190344 - DNA, 1037 bp, Homo sapiens
  Payload ID: 17604
  Gene Name: tetraspanin 14
  ENST ID: ENST00000341863
  CDS Start-End: 35-676
gccgccgccgcgcgcggattctgcttctcagaagatgcactattatagatactctaacgccaaggtcagctgctggtacaagtacctccttttcagctacaacatcatcttctggttggctggagttgtcttccttggagtcgggctgtgggcatggagcgaaaagggtgtgctgtccgacctcaccaaagtgacccggatgcatggaatcgaccctgtggtgctggtcctgatggtgggcgtggtgatgttcaccctggggttcgccggctgcgtgggggctctgcgggagaatatctgcttgctcaactttaaccagtgctgtggcgcatatggccctgaagactgggacctcaacgtctacttcaattgcagcggtgccagctacagccgagagaagtgcggggtccccttctcctgctgcgtgccagatcctgcgcaaaaagttgtgaacacacagtgtggatatgatgtcaggattcagctgaagagcaagtgggatgagtccatcttcacgaaaggctgcatccaggcgctggaaagctggctcccgcggaacatttacattgtggctggcgtcttcatcgccatctcgctgttgcagatatttggcatcttcctggcaaggacgctgatctcagacatcgaggcagtgaaggccggccatcacttctgaggagcagagttgagggagccgagctgagccacgctgggaggccagagcctttctctgccatcagccctacgtccagagggagaggagccgacacccccagagccagtgccccatcttaagcatcagcgtgacgtgacctctctgtttctgcttgctggtgctgaagaccaagggtcccccttgttacctgcccaaacttgtgactgcatccctctggagtctacccagagacagagaatgtgtctttatgtgggagtggtgactctgaaagacagagagggctcctgtggctgccaggagggcttgactcagaccccctgcagctcaagcatgtctgcaggacaccctggtcccctctcca

SEQ ID NO: 190345 - DNA, 1380 bp, Homo sapiens
  Payload ID: 17604
  Gene Name: tetraspanin 14
  Uniprot ID: Q8NG11
  ENST ID: ENST00000372156
  CDS Start-End: 503-1315
gggcaggctggggttgaaactcttcaccccttgcggtctgtactgcctcccaactgagcagccagggagaaggcctagagcctgtgcctttcagctagatagctggaggaactggctcctccctccttaggctgtgctggcctgagctgggagcctgagagctggggcagttgtctctaaagtggcttctgggattctggtaagaggacttggggtggagtcgaaagcagggagccctgtgagttgagacgaactcttgcaatgttgccttggctggtctcgaactcatcttctgggttcaagctgtccgtctgcctcggactcccaaagtgctaggattacagcgttacatccttactattcaaagtgccatccacagacctgctgatgggcagcatgagcatcacctgggagcttgctgcgctgtagaatcttgaggggtctccatccagatcagctgaatcagagtttgcattgttaacaagattctgcttctcagaagatgcactattatagatactctaacgccaaggtcagctgctggtacaagtacctccttttcagctacaacatcatcttctggttggctggagttgtcttccttggagtcgggctgtgggcatggagcgaaaagggtgtgctgtccgacctcaccaaagtgacccggatgcatggaatcgaccctgtggtgctggtcctgatggtgggcgtggtgatgttcaccctggggttcgccggctgcgtgggggctctgcgggagaatatctgcttgctcaactttttctgtggcaccatcgtgctcatcttcttcctggagctggctgtggccgtgctggccttcctgttccaggactgggtgagggaccggttccgggagttcttcgagagcaacatcaagtcctaccgggacgatatcgatctgcaaaacctcatcgactcccttcagaaagctaaccagtgctgtggcgcatatggccctgaagactgggacctcaacgtctacttcaattgcagcggtgccagctacagccgagagaagtgcggggtccccttctcctgctgcgtgccagatcctgcgcaaaaagttgtgaacacacagtgtggatatgatgtcaggattcagctgaagagcaagtgggatgagtccatcttcacgaaaggctgcatccaggcgctggaaagctggctcccgcggaacatttacattgtggctggcgtcttcatcgccatctcgctgttgcagatatttggcatcttcctggcaaggacgctgatctcagacatcgaggcagtgaaggccggccatcacttctgaggagcagagttgagggagccgagctgagccacgctgggaggccagagcctttctctgccatcagc

SEQ ID NO: 190346 - DNA, 855 bp, Homo sapiens
  Payload ID: 17604
  Gene Name: tetraspanin 14
  ENST ID: ENST00000372157
  CDS Start-End: 187-855
acttcctcggccgagccgggccgcgccgccgctgccgccgccgcgcgcggattctgcttctcagaagatgcactattatagatactctaacgccaaggtcagctgctggtacaagtacctccttttcagctacaacatcatcttctggttggctggagttgtcttccttggagtcgggctgtgggcatggagcgaaaagtgctgccctgctttctctgtctctttcagggtgtgctgtccgacctcaccaaagtgacccggatgcatggaatcgaccctgtggtgctggtcctgatggtgggcgtggtgatgttcaccctggggttcgccggctgcgtgggggctctgcgggagaatatctgcttgctcaactttttctgtggcaccatcgtgctcatcttcttcctggagctggctgtggccgtgctggccttcctgttccaggactgggtgagggaccggttccgggagttcttcgagagcaacatcaagtcctaccgggacgatatcgatctgcaaaacctcatcgactcccttcagaaagctaaccagtgctgtggcgcatatggccctgaagactgggacctcaacgtctacttcaattgcagcggtgccagctacagccgagagaagtgcggggtccccttctcctgctgcgtgccagatcctgcgcaaaaagttgtgaacacacagtgtggatatgatgtcaggattcagctgaagagcaagtgggatgagtccatcttcacgaaaggctgcatccaggcgctggaaagctggctcccgcggaacatttacattgtggctggcgtcttcatcgccatctcgctgttgcagatatttggcatcttcctg

SEQ ID NO: 190347 - DNA, 1095 bp, Homo sapiens
  Payload ID: 17604
  Gene Name: tetraspanin 14
  Uniprot ID: Q8NG11
  ENST ID: ENST00000372158
  CDS Start-End: 218-1030
ctgccgccgccgcgcgcgggacttggggtggagtcgaaagcagggagccctgtgagttgcgttacatccttactattcaaagtgccatccacagacctgctgatgggcagcatgagcatcacctgggagcttgctgcgctgtagaatcttgaggggtctccatccagatcagctgaatcagagtttgcattgttaacaagattctgcttctcagaagatgcactattatagatactctaacgccaaggtcagctgctggtacaagtacctccttttcagctacaacatcatcttctggttggctggagttgtcttccttggagtcgggctgtgggcatggagcgaaaagggtgtgctgtccgacctcaccaaagtgacccggatgcatggaatcgaccctgtggtgctggtcctgatggtgggcgtggtgatgttcaccctggggttcgccggctgcgtgggggctctgcgggagaatatctgcttgctcaactttttctgtggcaccatcgtgctcatcttcttcctggagctggctgtggccgtgctggccttcctgttccaggactgggtgagggaccggttccgggagttcttcgagagcaacatcaagtcctaccgggacgatatcgatctgcaaaacctcatcgactcccttcagaaagctaaccagtgctgtggcgcatatggccctgaagactgggacctcaacgtctacttcaattgcagcggtgccagctacagccgagagaagtgcggggtccccttctcctgctgcgtgccagatcctgcgcaaaaagttgtgaacacacagtgtggatatgatgtcaggattcagctgaagagcaagtgggatgagtccatcttcacgaaaggctgcatccaggcgctggaaagctggctcccgcggaacatttacattgtggctggcgtcttcatcgccatctcgctgttgcagatatttggcatcttcctggcaaggacgctgatctcagacatcgaggcagtgaaggccggccatcacttctgaggagcagagttgagggagccgagctgagccacgctgggaggccagagcctttctctgccatcagc

SEQ ID NO: 190348 - DNA, 5476 bp, Homo sapiens
  Payload ID: 17604
  Gene Name: tetraspanin 14
  Uniprot ID: Q8NG11
  ENST ID: ENST00000372164
  CDS Start-End: 60-821
ggccgagccgggccgcgccgccgctgccgccgccgcgcgcggattctgcttctcagaagatgcactattatagatactctaacgccaaggtcagctgctggtacaagtacctccttttcagctacaacatcatcttctggggtgtgctgtccgacctcaccaaagtgacccggatgcatggaatcgaccctgtggtgctggtcctgatggtgggcgtggtgatgttcaccctggggttcgccggctgcgtgggggctctgcgggagaatatctgcttgctcaactttttctgtggcaccatcgtgctcatcttcttcctggagctggctgtggccgtgctggccttcctgttccaggactgggtgagggaccggttccgggagttcttcgagagcaacatcaagtcctaccgggacgatatcgatctgcaaaacctcatcgactcccttcagaaagctaaccagtgctgtggcgcatatggccctgaagactgggacctcaacgtctacttcaattgcagcggtgccagctacagccgagagaagtgcggggtccccttctcctgctgcgtgccagatcctgcgcaaaaagttgtgaacacacagtgtggatatgatgtcaggattcagctgaagagcaagtgggatgagtccatcttcacgaaaggctgcatccaggcgctggaaagctggctcccgcggaacatttacattgtggctggcgtcttcatcgccatctcgctgttgcagatatttggcatcttcctggcaaggacgctgatctcagacatcgaggcagtgaaggccggccatcacttctgaggagcagagttgagggagccgagctgagccacgctgggaggccagagcctttctctgccatcagccctacgtccagagggagaggagccgacacccccagagccagtgccccatcttaagcatcagcgtgacgtgacctctctgtttctgcttgctggtgctgaagaccaagggtcccccttgttacctgcccaaacttgtgactgcatccctctggagtctacccagagacagagaatgtgtctttatgtgggagtggtgactctgaaagacagagagggctcctgtggctgccaggagggcttgactcagaccccctgcagctcaagcatgtctgcaggacaccctggtcccctctccactggcatccagacatctgctttgggtcatccacatctgtgggtgggccgtgggtagagggacccacaggcgtggacagggcatctctctccatcaagcaaagcagcatgggggcctgcccgtaacgggaggcggacgtggccccgctgggcctctgagtgccagcgcagtctgctgggacatgcacatatcaggggttgtttgcaggatcctcagccatgttcaagtgaagtaagcctgagccagtgcgtggactggtgccacgggagtgccttgtccactgtccccctgtgtccaccagctattctcctggcgccggaactgcctctggtcttgatagcattaagccctgatggcgccggtggcgcggtgggcatggttcttcactgagagccggctctccttttcttaaagtgtgtaaatagtttatttataggggtaagaatgttctcacaccatttcacttcctcttcctctcctccagcattctcctctgagcagccttagatagtgtccatggctggagccgaccctttgagtccccttgagtgtcttaagaaccagcccacaacagcctctctttctcctccacatactgcagcctccctccatgcatcccacatacaagcactcccccactccccagcgtggcctcactgtcttctggtcttggtgctactgaaattgtcacccagaatttgaatcctgaccctccccactgcaagcccagggagccccagcccaagatggccagcctgaaactgttggccagggctcctcttgtggccatgtacccagggctggctggcctgccatttgcctctccccggagacagccgttcttctgcaaccacaccccgtgcctagccacaaccccaggctgcagctgctcagaagctccaggcattttgtttctggtgaccgcccctaatgggatatcggtgatcactggtccacccttcctgtcagggcttttctggggctgctcttggaaatgaagtcttaagtactgaataactcccctggggatagctggggcatttgtctagctgggctactttctaacactttgccatagctcagaccacttctcatcgttcagggatggactgcaaccttaatttacttgccggagtgtacattctagtgtggtgtatactggtggctgttgatgatgatttttttttttttacacaattctctgtagactaggagaagaatgcttgtgtttttcggaagtgtgatgcttctctttgactgccaaactcttttatggaatatatctttatattaatgctgttttggtcatttttgtttggggtcactattgagatattgctaagcatctcagtggtaaacgcggctgccagaggaaccaagggatagggtatgtagaccttacagaaggatggatggtaaaggcagtccatcatcagcacaatctgacttacatttcattgagtaattttttttttttttaagattctgtatggcagcactttcagttgcccttgtgtgccggccacagccgcacaagttggcttgtggtttatcccccgctataagtgagagctggagaaacttcaactccataggtctagaggaaacattgttttaggttatttctgtccacccctgtgcgatactatttattgatccaagcagaagagcttggggacactgagtcgaagtggggacatgggattgaagcctgggcactgctgctgcatgagctgtgtgtcctgggtgtgccggcctttctgtgaagggggttggtggcagtgcccacctcactagatgcctctgacccagcctcccctgggggagtgggtggccacagaccctccctgccagagctcctggaaggctcctgcaggcctgacccatctattcctgtagacctggtttaggatgaagtctcggtgcgatttttgcagagttgggtttatctttcaactatagacccttctggctgttctcagccatatcatgtgactctgaatagttggatgaggaatggaaagaaagcaaggatgagagccggtcacgtggcagtctccgcccagcatcggctgtccgcacagaggcacagggcaggcctcctgtgcactccccacctagcactggcctgtcctgaatccccgccttccctggttggaggccagctgtggcatttgcaccctcttctcacctcaccatgcacatgctaactttaaagccttggggtctttcctgtaccccctcctcaaccctggtccaccccctctcaggatcttgtcaacgttatttttcctgtcccgtcttcctatcgctggccttcctttcccatcctaaaaacttgccgaggccctatggctccctccctttctttcccaggcagcttcttatctgggctgtctgtaccccttcctttgcaccacccaccatgccccacgtagctgaaagctgcttatcccaattgtcaactctggccttcttcagcctctgtagcaccagacactgcacctcctgaatgtcctctgcttctctgcttcagaggcccaggctcgccagttctctgacctctcccatatgtctgcttaggactctgctgcagctgtcctcaccagcctccggggaatcccactacccacagggcagggctgtgggctgggctgaaaaaccatctgcatggtccacaagaagcctggcactgggtttccccatgaataacaatgaaaattaatggatgcacaaccttcctggaacgtggaatttctctgggagattccatgcagaggccactggggaggtggcaggcatgcatgtgactgtaggtggctgcagtgttggaaggctcccagcagagcagagagggtgtcagtctcatcagggaacccacctgatggcttctcagccagcagtctcagaggaacatagacgactgctgagaaaggagggaggcagcagtggtcccagcacctgaggcatcctgctgtcatgggaaggtctccgcccaaatgtcagatgcatcagcctgtcacccgctggtccagagctttcagctgtactggtagggggtgggtggtggagtgctgaatgaccttcacaggtgggcctttccagctctagggtcttacgggtgtcggtccacagaaccacggtttttaggttgtgtgtccggggctatgggaacctgtcccccatgatggatcttggtagagacacttccctctgtcatcgtgcccaggaggatgctgcaggtgactacctgcagccctgttctcattcatttggatgccctccagaaatctggggagccatacacctttagagccttttttgctccttatcaagttggcaaggcttggccaattcctgttcaaggctgcattaaaggcatgttcaccatcctggctaatacggtgaaaccccttctctactaaaaatacaaaaaaattagccgggcttggtggcgggtgcctgtagtcccagctactccggaggctgaggcaggggaatggtgtgaacccaggaggcggagcttgcagtgagccgagatcacaccactgcactccagcctgggctcaaaaaagaaaaaaaaaaaaaaaaaaaggcccgttcattctcaaatgcttttggcgtctccagggtgcctcaggaaaacatgaagtgggcattgtagaacttggggctactgtgtaactttggaagaaaaagttaagggtacttttaagtggatactgttttgatgaaattgccaacttcagggagcccagcttggagaaggaggacgtgagtattccttacaaggctccgaaacaattctttcttcacttagttttctttctgtgctctgcatcttatattccagcagggtcttccaatgcatggtttaataactactagaactggccaggtgcagtggctcacgcctgtaatcccagaactttgggaggctaagacaggcagatcacttgaggccaggagttcgagaccagcctggacaacatggtgatacccagtttctactaaaaatacaaaaattagtcgggcatggtgatgtgcacctgtagtcccagctgctcgggaggctgaggcaggagaatcgcttgaacccgggagacagaggttgcaacgagccaagatcgagccactgcgctccggcctgggtgacaggagactccatctcaaaaaataaaattaaaaaaaaactactacaataaattatcaccttggactgtataaaacaacttttaaactagtctttttaaaaagtacacttaaataaaaatctaaacataagagaatgtaaa

SEQ ID NO: 190349 - DNA, 16183 bp, Homo sapiens
  Payload ID: 17604
  Gene Name: tetraspanin 14
  Uniprot ID: Q8NG11
  ENST ID: ENST00000429989
  CDS Start-End: 224-1036
ccgcaccgggcggcgcagggaagcggcgccccttcctcggcagacggcaggcgccgcgcctccggccccgcccctccgcgcccctccgcgccccgcccccgccgctcggacggcccgagtcgcgccctcccgccccgcgccgcggaacttgctctaacttcctcggccgagccgggccgcgccgccgctgccgccgccgcgcgcggattctgcttctcagaagatgcactattatagatactctaacgccaaggtcagctgctggtacaagtacctccttttcagctacaacatcatcttctggttggctggagttgtcttccttggagtcgggctgtgggcatggagcgaaaagggtgtgctgtccgacctcaccaaagtgacccggatgcatggaatcgaccctgtggtgctggtcctgatggtgggcgtggtgatgttcaccctggggttcgccggctgcgtgggggctctgcgggagaatatctgcttgctcaactttttctgtggcaccatcgtgctcatcttcttcctggagctggctgtggccgtgctggccttcctgttccaggactgggtgagggaccggttccgggagttcttcgagagcaacatcaagtcctaccgggacgatatcgatctgcaaaacctcatcgactcccttcagaaagctaaccagtgctgtggcgcatatggccctgaagactgggacctcaacgtctacttcaattgcagcggtgccagctacagccgagagaagtgcggggtccccttctcctgctgcgtgccagatcctgcgcaaaaagttgtgaacacacagtgtggatatgatgtcaggattcagctgaagagcaagtgggatgagtccatcttcacgaaaggctgcatccaggcgctggaaagctggctcccgcggaacatttacattgtggctggcgtcttcatcgccatctcgctgttgcagatatttggcatcttcctggcaaggacgctgatctcagacatcgaggcagtgaaggccggccatcacttctgaggagcagagttgagggagccgagctgagccacgctgggaggccagagcctttctctgccatcagccctacgtccagagggagaggagccgacacccccagagccagtgccccatcttaagcatcagcgtgacgtgacctctctgtttctgcttgctggtgctgaagaccaagggtcccccttgttacctgcccaaacttgtgactgcatccctctggagtctacccagagacagagaatgtgtctttatgtgggagtggtgactctgaaagacagagagggctcctgtggctgccaggagggcttgactcagaccccctgcagctcaagcatgtctgcaggacaccctggtcccctctccactggcatccagacatctgctttgggtcatccacatctgtgggtgggccgtgggtagagggacccacaggcgtggacagggcatctctctccatcaagcaaagcagcatgggggcctgcccgtaacgggaggcggacgtggccccgctgggcctctgagtgccagcgcagtctgctgggacatgcacatatcaggggttgtttgcaggatcctcagccatgttcaagtgaagtaagcctgagccagtgcgtggactggtgccacgggagtgccttgtccactgtccccctgtgtccaccagctattctcctggcgccggaactgcctctggtcttgatagcattaagccctgatggcgccggtggcgcggtgggcatggttcttcactgagagccggctctccttttcttaaagtgtgtaaatagtttatttataggggtaagaatgttctcacaccatttcacttcctcttcctctcctccagcattctcctctgagcagccttagatagtgtccatggctggagccgaccctttgagtccccttgagtgtcttaagaaccagcccacaacagcctctctttctcctccacatactgcagcctccctccatgcatcccacatacaagcactcccccactccccagcgtggcctcactgtcttctggtcttggtgctactgaaattgtcacccagaatttgaatcctgaccctccccactgcaagcccagggagccccagcccaagatggccagcctgaaactgttggccagggctcctcttgtggccatgtacccagggctggctggcctgccatttgcctctccccggagacagccgttcttctgcaaccacaccccgtgcctagccacaaccccaggctgcagctgctcagaagctccaggcattttgtttctggtgaccgcccctaatgggatatcggtgatcactggtccacccttcctgtcagggcttttctggggctgctcttggaaatgaagtcttaagtactgaataactcccctggggatagctggggcatttgtctagctgggctactttctaacactttgccatagctcagaccacttctcatcgttcagggatggactgcaaccttaatttacttgccggagtgtacattctagtgtggtgtatactggtggctgttgatgatgatttttttttttttacacaattctctgtagactaggagaagaatgcttgtgtttttcggaagtgtgatgcttctctttgactgccaaactcttttatggaatatatctttatattaatgctgttttggtcatttttgtttggggtcactattgagatattgctaagcatctcagtggtaaacgcggctgccagaggaaccaagggatagggtatgtagaccttacagaaggatggatggtaaaggcagtccatcatcagcacaatctgacttacatttcattgagtaattttttttttttttaagattctgtatggcagcactttcagttgcccttgtgtgccggccacagccgcacaagttggcttgtggtttatcccccgctataagtgagagctggagaaacttcaactccataggtctagaggaaacattgttttaggttatttctgtccacccctgtgcgatactatttattgatccaagcagaagagcttggggacactgagtcgaagtggggacatgggattgaagcctgggcactgctgctgcatgagctgtgtgtcctgggtgtgccggcctttctgtgaagggggttggtggcagtgcccacctcactagatgcctctgacccagcctcccctgggggagtgggtggccacagaccctccctgccagagctcctggaaggctcctgcaggcctgacccatctattcctgtagacctggtttaggatgaagtctcggtgcgatttttgcagagttgggtttatctttcaactatagacccttctggctgttctcagccatatcatgtgactctgaatagttggatgaggaatggaaagaaagcaaggatgagagccggtcacgtggcagtctccgcccagcatcggctgtccgcacagaggcacagggcaggcctcctgtgcactccccacctagcactggcctgtcctgaatccccgccttccctggttggaggccagctgtggcatttgcaccctcttctcacctcaccatgcacatgctaactttaaagccttggggtctttcctgtaccccctcctcaaccctggtccaccccctctcaggatcttgtcaacgttatttttcctgtcccgtcttcctatcgctggccttcctttcccatcctaaaaacttgccgaggccctatggctccctccctttctttcccaggcagcttcttatctgggctgtctgtaccccttcctttgcaccacccaccatgccccacgtagctgaaagctgcttatcccaattgtcaactctggccttcttcagcctctgtagcaccagacactgcacctcctgaatgtcctctgcttctctgcttcagaggcccaggctcgccagttctctgacctctcccatatgtctgcttaggactctgctgcagctgtcctcaccagcctccggggaatcccactacccacagggcagggctgtgggctgggctgaaaaaccatctgcatggtccacaagaagcctggcactgggtttccccatgaataacaatgaaaattaatggatgcacaaccttcctggaacgtggaatttctctgggagattccatgcagaggccactggggaggtggcaggcatgcatgtgactgtaggtggctgcagtgttggaaggctcccagcagagcagagagggtgtcagtctcatcagggaacccacctgatggcttctcagccagcagtctcagaggaacatagacgactgctgagaaaggagggaggcagcagtggtcccagcacctgaggcatcctgctgtcatgggaaggtctccgcccaaatgtcagatgcatcagcctgtcacccgctggtccagagctttcagctgtactggtagggggtgggtggtggagtgctgaatgaccttcacaggtgggcctttccagctctagggtcttacgggtgtcggtccacagaaccacggtttttaggttgtgtgtccggggctatgggaacctgtcccccatgatggatcttggtagagacacttccctctgtcatcgtgcccaggaggatgctgcaggtgactacctgcagccctgttctcattcatttggatgccctccagaaatctggggagccatacacctttagagccttttttgctccttatcaagttggcaaggcttggccaattcctgttcaaggctgcattaaaggcatgttcaccatcctggctaatacggtgaaaccccttctctactaaaaatacaaaaaaattagccgggcttggtggcgggtgcctgtagtcccagctactccggaggctgaggcaggggaatggtgtgaacccaggaggcggagcttgcagtgagccgagatcacaccactgcactccagcctgggctcaaaaaagaaaaaaaaaaaaaaaaaaaggcccgttcattctcaaatgcttttggcgtctccagggtgcctcaggaaaacatgaagtgggcattgtagaacttggggctactgtgtaactttggaagaaaaagttaagggtacttttaagtggatactgttttgatgaaattgccaacttcagggagcccagcttggagaaggaggacgtgagtattccttacaaggctccgaaacaattctttcttcacttagttttctttctgtgctctgcatcttatattccagcagggtcttccaatgcatggtttaataactactagaactggccaggtgcagtggctcacgcctgtaatcccagaactttgggaggctaagacaggcagatcacttgaggccaggagttcgagaccagcctggacaacatggtgatacccagtttctactaaaaatacaaaaattagtcgggcatggtgatgtgcacctgtagtcccagctgctcgggaggctgaggcaggagaatcgcttgaacccgggagacagaggttgcaacgagccaagatcgagccactgcgctccggcctgggtgacaggagactccatctcaaaaaataaaattaaaaaaaaactactacaataaattatcaccttggactgtataaaacaacttttaaactagtctttttaaaaagtacacttaaataaaaatctaaacataagagaatgtaaagtgaaaagtgaaagtatgtcttctgttacgcagaggtaactactattaggaatccttcctgaaaatgtccatgcatctactcaggtcatcacacccatggaatcattttacatactattttatgagtgttacttaatatactgatccacagtgcgttttcacggtcacgccatcagttgtaggagtgtgccaagaacagatgggccttgcctttgtaccagaggagtccatttacagttgcaggtaatagaaaacccaattcagactggcctaaacaatgaggggaggttttggctcttgaaactggaaagtcccaaggtggggtgagtttcaggtttgggttgatccaagtggctcagtgacgtcaacaggatcttgtttccatttctctgccttccacagcctccccttcatctatggtggagggaaggagtctaccacagacaaaccccgagcctccccctgatgggtggtgtggtggtgaagccagcaagggaagggatccccggacacacccctcctcatgctttatcccactgaaaccatgcggctgtgaaatgcagcatcctccaggagggggatgaaggccggggatgctgtcagctattgccattgcacttctgtggatgggtgttacagttttttgcagggttttgcacttacaaggacatatatatatatatataaactacagtgttattggaattgcttcttacagtttgtaagaaaaaaacatgtttttagaggagttctcctgggaggtgggatcacatttttttttttttttttttttgagacggagtctcgctctgtggcccaggcgggagtgcagtggcgcaatctcggctcactgcaagctccgcctcccgggttcacgccattctcctgcctcagcctcccgagtagctgggactacaggcgcccgccactacgcccggctaattttttttgtatttttagtagagacggggtttcaccgtgttagccaggatgggggatcacattttaataagtaggtactcagggctggggtgtacctgttgctgcctgaccactgctggtgtgtgtgggtataaggtgacaaaacctcctacccctgtgaggttgtttcaaggattaaatgagttgagatgggtaagcatctaacaaagatccagattatttagtatgcatcccctgaattattgctaacataattttaatgattggggaattttatctgtggctgccagtccctacgagagagctgcctgggtcacatgtcagatagctcaagctttgaatcactgaaacgaaacggtccacttccctgtccctttaggaacaaggcttcgaggtctgtggcaagcctcagcaggcatttggagttcaaggtctgttctctttctgtgccatagaggtggggagacaaggtagggtgttgcttcttgcctggagcgcagatgctaccagaaaccaacacaaccaaagttgcccgggagcccccagaagcagcagagtggccatcaactgccaaggggccagggtaggccacagaggcctggggcccaggagggatggtctgtggggagaaaggggattattgtgaacatcaacgctggggataatgtgccctgaagacagcagcatatcacgtttggacggttggtggaccccatctggtcccactcataaggagaacagaggccctggggtgtgctgggacttgcctgaggcctcagaccgggactgggtgctcctccgcacctcctatgagggagggtgtccgtgtctgtgaggacagctcagcagggctgggaacctgggggcagtgctgggggacatgtgtgagactagcgtgtgtgggccttgctcggcttgccctggtgccctgagaaaaacctggtatttgaaaatacacatggactgctggaaggtcaggaaatccagggttttgttctgaggcagtggaagtgttaccgtgagcctgtgttggcctctctcctcactccacctgcagccaattcagccacactgcctttgcatggaacccagggttgcaggccgcgtgtgtagatgctgatttaggcccaagcactcagctgtcagcaggaaggaccatagtgttttcttctagttttagatatgcactcgttctgtgttttaaagtcacagctgtgagccaatatgggaagaagtgaagtggcctctaggagggactgagcaccctgtccttggaggtatgcaagcccaggctacacccttcctgtctgggatgatatggctgggggtgggctttgtgctgcgtggaccatggcaagcctttccatctctgagaggtagtggtccttcccgtgccttctgttaaagataattttttaaaaaaaggcataactcatatatattacatgtacacatgtcaaagattttatttaactcagtaattgagagtgctgctaagattaacagccagttcaaaagagaaatcacaatgaaccataaatctgtatggagtaaaggaaagttgaaactggctggggtttttttttttttttttttttttgaggagaaaggtcaattgaatcttattcgtataatatgcacatccatagacaagaattattttgcattaactctacaacttagttgtaaaaatagctcaaaggcagtgaaagactagaatcagataattggaagggtgcaccctaagcaatgcatagttctattttctttctttttttttttgagacagagtttccctcttgtcacacaggctggagcgcagtggtgcaatcttggctcattgcaacctctgcctcccgggttcaagtgattctcctgactcagcctcctgagtagctgggattacaggcgcatgccaccacaactggctaatttttgtatttttagtagatacagggtttcactgtgttggccaggttggtctcatactcctgacctcaggtgatccacccgcctcggcctcccaaaatgttgggattacaggcgtcagccaccacgcccggccccaatgcatagttttttactgaagacaaccagaatctctgttgcttattccaaatttccttccaccacttgtccatccagcagagccacttttaaaataggacacaggcagaaatttaaaggagtcaatatctcatggtgaaaagtgaatcctgagggttagagcatccaccaggtgccctaggtaagggccagccactctgggaggcagcccggggcactcactgtcctctcagtagtaaatgaaatcactcaggccatgtctgctacccagagagcctgagtgtcctcaaatgcttgttctgcctctccatccactcctgcagacacctcagtggctgcatcccaaaccgctgaactttgcttctctttctccaacccccaattccacccacatccaaaactgctctgccccctattcccatctcagctgagggtactatcatccaccctgtggccacatccaggaatgtgtgtatcacctgggctctgaggatgacatcagctcttctaagtcaacagaatgtcgggtctgttctaaaagtctcatctgacaaggagatctttaaggctttactcccttaaaggctttactcccatcatgatgggataaccatcatgatggatttcagtgtcattctgtctttttcttcggaatgattcctgggactcgccttgtttgcaacatgtgcattgaaatatcttttcaacataactttgttcttaattgtgtttacttcctttctctgtgaatctcagtgattcctggaagctgtggttggtgggggatggggtgggaggactttggtagtataaaagagtacctgcaatgaatgttctaagaaactggagtgttggggtcctccagcccttggctggtaaactctccactccttcctctttgcaacacaattctcataactggcaaaggtgtgcatgtaaaatttgtgactgtagtctgaggttttttttccctgtacaattccgccttcccccctgtaagcctgtaccaggagaggtctcagctgccttggaggcggtgagacacgtgggtgctcactgtggccctcaagggtgaggctggcactggggcatctggggccagaagtcctcctttagtcccaagtctctgccactcaagtgcatcagtgagaggtcctcatagaaaatctactgtgggcacaaagctgccaggctgatgggggtggggagcaaacgaacacccttttccccttttacaccagaggaaagagacttagactgaggaacttgcctgctgccagacagctgggaggtggtagaaccgggcttacagcccagggtttccactctaggaactcttctcccttcctctgatgacactaactcgcaggccatgatcaatgagcaacgatgtaggcaggcactgacgaggcacagcaggaaggcagctcagtgcccatgacggccaggaactgggtaccatttcctcagcaaaatgggatagtaactcccacactgcagctacgcacttgggcagtggttcacaaggccagcagccacaacatcaccccagaccagcagcagctgcagcattacccccagcacttgttaaaagatgcaaattcaggccaggtgtggtggctcgtgcctgtaatcccagtactttgggaagccaaggcgggtgggtcacctgaggtcaggagttcgagaccagcctggccaatgtggtgaaaccctgtctctactaaaaatacaaaaaatgacccgggcatggttgtgggcgcctgtaatcccagctacccaggagaccgaggcaggagaatcacttgaacccgggaggcagaggttgcagtcagccgagattgtgccattacactccagcctgggcaacaagagcgaaactctgtttcaataaataaataaaaatgcaaattgtatgccccttccttcaggcctatgggaccaaaaactgggatggggcccaataaaatgttttaaccagcccttcggtggttacagaaggatagagccagaatagactaaccactgtaacaaacattacctatacttgggaggctttgaaaaatgtttatttagccgggtgcggtggctcacgcctgtaatcccaacactttgggaggctgaggcgggcggatcacgaggtcaggagattgagaccagcctggctaacacagtgaaaccccgtctctactaaaaatacaaaaaattagccaggtgtggtggcaggtgcctgtagtcccagctactctggaggctgaggcagtagaatttcttgaacccaggaggcggggcttgcagtaagtcgagatcacgccactgcactccagcctgggtgacagagtgagactccatctcaaaaaaaaaaaaaaaggaaagaaaaatgtttatttttttgctcatgccacagtctctggtagttgctgggaactagggtgggggattctctgctccacacagtctttcatggacccaggttcctttcctgttgtgggtccagcctcctgtagctgttggaggcatctctagtcagctggtggttggggaagaggtgaggatcagggagggaagatggagagtactctgcttgttctcacattctgctggccagaactcacaagccacctgaaatgatgcaaaggtctagctgtgtgtgtaggagaaagaagagaggccagatattggaagacagcagtggtctgtgccccaggccccatggtttagggaagtgaaccttggcactggatttcctggctttctaaatctccctttatagggaacttagggcccagtctgtggtgggtggatttgcctggttcacagcctctggtcagccttctttctgctccacagggcggcctggagatggtgggctccttgtcacactggttggggatgtgggctccatggggccagagatgtgtgtgctctgtgttcagattaagggacagacggcacatgaattccttcagtgccctccagatttggtcactggggaggggtaggctgagcagtagctcttgggtctgtagtagtgtgaccctggaaggactgtccagctgaaaacaagagcctggggcgtggggaggggaggggttactcagggttccatgagacctgggtttaagtcctggatccatcattagcagctatgtgaacttatgcctcactttcctcaaatatgaacttgagataatgaaattaccttcctcataatactgttctaagaattgaatgaggaaaggtttacaattcggccctggttgttccactggggagggaacagagattgggggcacagggctcccctggcctgggggagtctggctcactcaagttctcagtcatttgcaaggcaaggaccctgcttctccttgctctgggtccgagtagtctcaagcccagtgggcagggcctgtggtgtggatggactcgtctgcagtgagtcaggcagcaggcagagctggcaggctgtgtggtctctagtgggtaccaggggacctgggagggccttgtgggaggttgtccacggtgtgagccagtttgccatctggggtcctggagttccctcccgccctttgagttaaaaagagtcagtcctgggctgagacttaattgcgctagtgctgagtgaccttgtgtcaggggaaatcggatggggcaaagtgttttttaattagcaggactcactgacctttccttcactgtcagcaacttctcacagggaggcagagcaaggggggctggagccccgcatctctctaatggagcctatgtccaacaaggaggtggatggctggattcagggccctgggaggacttcatgtgggaagcagacctcaggaagggcccttagtgatggtgtgggccagggttctcacctccttagtctcctgtcctgtccatctccgcagatcctaggcaaaagaagcggagaaacactcaagccactggggtggttagggcacactggtggcaactgtttaaaaccttaactaaaacaaggttaagcaaaaggagtttacaggctctcatagatgggaaggatgtgggagggtcacagactgagaggaaccagggctgtggctgctggaaggagcctcaccaccgccagtgtgtttcctccccgtcgtcggcatctctgcttctctctgcacgccagcagctctctcttagggcacgcagacctttcctctgcaggggaacacgagtgccggcagccccgagttagtgactatcatagaaactcagtgtatttctctcttgtttatcattccgagtcctgagtcacaggcttgtccagcactcaagactttttcttttctctattttttgaaacggattctcgctctgtcccccaggctggagtgcagtggcccgattttgggtgcaagcgattctcctgcctcaacctcccgagtagctgggactacaggtgtgcgccaccacatccagctaatttttgtatttttagtagagacggagtttcactatgttggccaggctggtttcaaactcctgacctcccgccggcctcagcctcccaaagtgctgggattacaggcatgagccaccacgcctggccaagattttttcttttaaacctggagtatggagatgctcactaggcagacagaatcagccaccacagcccactccctcagccagtattactttgactaagttagtgaggaaccaggccccagattaagaagcagaactcacactgtcatctgctgtgtgcctggctggctcatgcataccttgtctatctaatgtggaccaaagccctgtggcacaccctgctggttacccccagtggttaccctggcacagaggaggaaagggagtcgtgggagggagaaggacttccctgggaggtctctgggctggcaagttgggtgacacaggtccggttggctgcaagcctgggctctgctgttgtaatcataaatgtgtgtgtgtgtacagttgtttacaatgtcagcatgggtgtccttgtttgttagagatacatgccactgctcccatcatgaggaaaatcccaagccctccccatgatttttgccagtttctggggactcatgctcctggcagcccatgtgtccccaactcctgtgtcctttagggacctctgttgagccctgcctctattctggcagaattagagaaaattctttaaaaaaacaataaagtttaaattcatttaaaaaaataataaaaaatctcacagcatgagttttgatgagatttggggcaaggtgggccacaaccttgggttgtatggccacctccccctcttcttcccctgttgtctctgcagctcagaaaccccaatttcctggcctgtgttatgtggaggagctgagctcaccccctacagcttcatctccaaacctagcaaggatcctgcccagatcaggagatcctccttttaacagaagttatttacactccttagaaagcagtgggggtggaacgattctttttcctgatgcagagatgtaaaactgggacattgctacacataatattttaaacctgtcttccctcttaccaacgaacacatcactagcaccatctatgccaatacatttctcaacatcaatttcagtggctgtattacattttatcctacggatgtgctctcatttataatctaaaccacttttattgaacacatcagttattctgaaattttcagtgttatgatggatgttgcagtaattattcttatatatgcacagaacccccagaggacatgactactgaaggctgtgctggcaggatcacaggtaaggatctagcaaattgtcccagcttcattgactgagctttcatccttgttgcactactttgagctgccattttgatcatataataatgatttagtagagctcttttttggttcaacctacctgttcttgtatcagaactgaaatgtttgattttataaatttgaatagtggcacaatatagagttcactattcctcaatattttcaaggctgtttcttatctgttcattcttttggttaacttgggaattattttatcaagtctctctacttcccaatttcctttcacctttggctcgaaatgatattcaatgtatacattaacttgagttacattttgctgcataatgcttgagttacattttgagtattacgtgttactcataatacatattgagttacattttgctgcataatacattatccccaagtttaacaccttaaagcagcacatatatatctcatacccttctgagggtcaggaatctagaagcagcttagctgggtgactgtggctctgggtctctcatgaggctgcagtgaaactgttggccagggctggaggatcccttccaacctcactccatgactgttggtgggaggcttcagttctccacctggttctcacaatataatttcccccagagtgagttatcagagagagtgtgcaaccagtaatctgttagaatatgtcacgtctgtcatatttgattggtcactcagaccaaccctaatagatgcgagagtgactatgcaagggtgtgagttccaggaggaaagcatcattggaaccatcttggagactggctaatacacagataaatggcacatctgacaatatggcatctttctgagtgtcagtgtggtgtgttcctatatgaacttaatgctattaaacttaattaaattgtaggtatgctctcagtgaagatttttacttttacattacaggtttccacactgttaaattcattccaagtatttcatacatgctgttcctattatgaaaggatcttttttttcacatggcattttctaagtagttgttgcattcatataggagatgctattgattttgacacccataatttttcagtggagacaaggcagaaactactccagactctcacctgctgttgctgatccttacatggtggctgtgccaggctcagccgcgctgagatgacagggctgtctggccatcattggtcatatggacttcagatttgaaaggattttatgtagaagcagagtgcctgataggactctccgggacccccatttctgccctgcttggctcccactggcaaggctggctcagttcctgtcaccttctcctggactttggccagagtccactggctgtttcccctgcctcctgctctcccagtgccctctccacaccagtgccagagctgcttctaagagatgcctcaaagcccgcttccagcttaggaaccccagggaacatggatggtttctccattgccacttcctagccttcctggcataggaaggtctggtttgcctgcaggtccctctctgggggggtccctgctccatagatgctgaggctccagaagtctgttcttttatatcacatttgaaaacctttgaaatgcattatagttgagtcatatgaattatgtaagtatatcctactcattgtataaaacaacacagaattgt

SEQ ID NO: 190350 - DNA, 808 bp, Homo sapiens
  Payload ID: 17604
  Gene Name: tetraspanin 14
  Uniprot ID: Q8NG11
  ENST ID: ENST00000481124
  CDS Start-End: 125-568
cgccgctcggacggcccgagtcgcgccctcccgccccgcgccgcggaacttgctctaacttcctcggccgagccgggccgcgccgccgctgccgccgccgcgcgcggattctgcttctcagaagatgcactattatagatactctaacgccaaggtcagctgctggtacaagtacctccttttcagctacaacatcatcttctggaaccagtgctgtggcgcatatggccctgaagactgggacctcaacgtctacttcaattgcagcggtgccagctacagccgagagaagtgcggggtccccttctcctgctgcgtgccagatcctgcgcaaaaagttgtgaacacacagtgtggatatgatgtcaggattcagctgaagagcaagtgggatgagtccatcttcacgaaaggctgcatccaggcgctggaaagctggctcccgcggaacatttacattgtggctggcgtcttcatcgccatctcgctgttgcagatatttggcatcttcctggcaaggacgctgatctcagacatcgaggcagtgaaggccggccatcacttctgaggagcagagttgagggagccgagctgagccacgctgggaggccagagcctttctctgccatcagccctacgtccagagggagaggagccgacacccccagagccagtgccccatcttaagcatcagcgtgacgtgacctctctgtttctgcttgctggtgctgaagaccaagggtcccccttgttacctgcccaaacttgtgactgcatccctctggagtctacccagagacagagaatg

SEQ ID NO: 190351 - DNA, 2436 bp, Homo sapiens
  Payload ID: 17604
  Gene Name: tetraspanin 14
  Uniprot ID: Q8NG11
  ENST ID: ENST00000616406
  CDS Start-End: 23-784
cgcagattctgcttctcagaagatgcactattatagatactctaacgccaaggtcagctgctggtacaagtacctccttttcagctacaacatcatcttctggggtgtgctgtccgacctcaccaaagtgacccggatgcatggaatcgaccctgtggtgctggtcctgatggtgggcgtggtgatgttcaccctggggttcgccggctgcgtgggggctctgcgggagaatatctgcttgctcaactttttctgtggcaccatcgtgctcatcttcttcctggagctggctgtggccgtgctggccttcctgttccaggactgggtgagggaccggttccgggagttcttcgagagcaacatcaagtcctaccgggacgatatcgatctgcaaaacctcatcgactcccttcagaaagctaaccagtgctgtggcgcatatggccctgaagactgggacctcaacgtctacttcaattgcagcggtgccagctacagccgagagaagtgcggggtccccttctcctgctgcgtgccagatcctgcgcaaaaagttgtgaacacacagtgtggatatgatgtcaggattcagctgaagagcaagtgggatgagtccatcttcacgaaaggctgcatccaggcgctggaaagctggctcccgcggaacatttacattgtggctggcgtcttcatcgccatctcgctgttgcagatatttggcatcttcctggcaaggacgctgatctcagacatcgaggcagtgaaggccggccatcacttctgaggagcagagttgagggagccgagctgagccacgctgggaggccagagcctttctctgccatcagccctacgtccagagggagaggagccgacacccccagagccagtgccccatcttaagcatcagcgtgacgtgacctctctgtttctgcttgctggtgctgaagaccaagggtcccccttgttacctgcccaaacttgtgactgcatccctctggagtctacccagagacagagaatgtgtctttatgtgggagtggtgactctgaaagacagagagggctcctgtggctgccaggagggcttgactcagaccccctgcagctcaagcatgtctgcaggacaccctggtcccctctccactggcatccagacatctgctttgggtcatccacatctgtgggtgggccgtgggtagagggacccacaggcgtggacagggcatctctctccatcaagcaaagcagcatgggggcctgcccgtaacgggaggcggacgtggccccgctgggcctctgagtgccagcgcagtctgctgggacatgcacatatcaggggttgtttgcaggatcctcagccatgttcaagtgaagtaagcctgagccagtgcgtggactggtgccacgggagtgccttgtccactgtccccctgtgtccaccagctattctcctggcgccggaactgcctctggtcttgatagcattaagccctgatggcgccggtggcgcggtgggcatggttcttcactgagagccggctctccttttcttaaagtgtgtaaatagtttatttataggggtaagaatgttctcacaccatttcacttcctcttcctctcctccagcattctcctctgagcagccttagatagtgtccatggctggagccgaccctttgagtccccttgagtgtcttaagaaccagcccacaacagcctctctttctcctccacatactgcagcctccctccatgcatcccacatacaagcactcccccactccccagcgtggcctcactgtcttctggtcttggtgctactgaaattgtcacccagaatttgaatcctgaccctccccactgcaagcccagggagccccagcccaagatggccagcctgaaactgttggccagggctcctcttgtggccatgtacccagggctggctggcctgccatttgcctctccccggagacagccgttcttctgcaaccacaccccgtgcctagccacaaccccaggctgcagctgctcagaagctccaggcattttgtttctggtgaccgcccctaatgggatatcggtgatcactggtccacccttcctgtcagggcttttctggggctgctcttggaaatgaagtcttaagtactgaataactcccctggggatagctggggcatttgtctagctgggctactttctaacactttgccatagctcagaccacttctcatcgttcagggatggactgcaaccttaatttacttgccggagtgtacattctagtgtggtgtatactggtggctgttgatgatgatttttttttttttacacaattctctgtagactaggagaagaatgcttgtgtttttcggaagtgtgatgcttctctttgactgccaaactcttttatggaatatatctttatatt

SEQ ID NO: 190352 - DNA, 1698 bp, Homo sapiens
  Payload ID: 17605
  Gene Name: tetraspanin 15
  Uniprot ID: O95858
  ENST ID: ENST00000373290
  CDS Start-End: 123-1007
cggagagaacgccggtggcggggctggtagcccggcagccgcaggtggggccacgagcgctggctgagggaccgagccggagagccccggagcccccgtaacccgcgcggggagcgcccaggatgccgcgcggggactcggagcaggtgcgctactgcgcgcgcttctcctacctctggctcaagttttcacttatcatctattccaccgtgttctggctgattggggccctggtcctgtctgtgggcatctatgcagaggttgagcggcagaaatataaaacccttgaaagtgccttcctggctccagccatcatcctcatcctcctgggcgtcgtcatgttcatggtctccttcattggtgtgctggcgtccctccgtgacaacctgtaccttctccaagcattcatgtacatccttgggatctgcctcatcatggagctcattggtggcgtggtggccttgaccttccggaaccagaccattgacttcctgaacgacaacattcgaagaggaattgagaactactatgatgatctggacttcaaaaacatcatggactttgttcagaaaaagttcaagtgctgtggcggggaggactaccgagattggagcaagaatcagtaccacgactgcagtgcccctggacccctggcctgtggggtgccctacacctgctgcatcaggaacacgacagaagttgtcaacaccatgtgtggctacaaaactatcgacaaggagcgtttcagtgtgcaggatgtcatctacgtgcggggctgcaccaacgccgtgatcatctggttcatggacaactacaccatcatggcgggcatcctcctgggcatcctgcttccccagttcctgggggtgctgctgacgctgctgtacatcacccgggtggaggacatcatcatggagcactctgtcactgatgggctcctggggcccggtgccaagcccagcgtggaggcggcaggcacgggatgctgcttgtgctaccccaattagggcccagcctgccatggcagctccaacaaggaccgtctgggatagcacctctcagtcaacatcgtggggctggacagggctgcggcccctctgcccacactcagtactgaccaaagccagggctgtgtgtgcctgtgtgtaggtcccacggcctctgcctccccagggagcagagcctgggcctcccctaagaggctttccccgaggcagctctggaatctgtgcccacctggggcctggggaacaaggccctcctttctccaggcctgggctacgggggagggagagcctgaggctctgctcagggcccatttcatctctggcagtgccttggcggtggtattcaaggcagttttgtagcacctgtaattggggagagggagtgtgcccctcggggcaggagggaagggcatctggggaagggcaggagggaagagctgtccatgcagccacgcccatggccaggttggcctcttctcagcctcccaggtgccttgagccctcttgcaagggcggctgcttccttgagcctagtttttttacgtgatttttgtaacattcatttttttgtacagataacaggagtttctgactaatcaaagctggtatttccccgcatgtcttattcttgcccttcccccaaccagtttgttaatcaaacaataaaaacatgtttttttttttttttttt

SEQ ID NO: 190353 - DNA, 575 bp, Homo sapiens
  Payload ID: 17605
  Gene Name: tetraspanin 15
  ENST ID: ENST00000452130
  CDS Start-End: 1-483
ctccaagcattcatgtacatccttgggatctgcctcatcatggagctcattggtggcgtggtggccttgaccttccggaaccagaccattgacttcctgaacgacaacattcgaagaggaattgagaactactatgatgatctggacttcaaaaacatcatggactttgttcagaaaaagttcaagtgctgtggcggggaggactaccgagattggagcaagaatcagtaccacgactgcagtgcccctggacccctggcctgtggggtgccctacacctgctgcatcaggaacacgacagaagttgtcaacaccatgtgtggctacaaaactatcgacaaggagcgtttcagtgtgcaggatgtcatctacgtgcggggctgcaccaacgccgtgatcatctggttcatggacaactacaccatcatggcgggcatcctcctgggcatcctgcttccccagataacaggagtttctgactaatcaaagctggtatttccccgcatgtcttattcttgcccttcccccaaccagtttgttaatcaaacaataaaaacatgttttttttttttttt

SEQ ID NO: 190354 - DNA, 1040 bp, Homo sapiens
  Payload ID: 17606
  Gene Name: tetraspanin 16
  Uniprot ID: Q9UKR8
  ENST ID: ENST00000316737
  CDS Start-End: 151-888
tggacaaccatcaggcagccaggacacagaggggcagagcaagtcagcattggcgccccttcctcagatccctatcatcttgggaaacagtagcccagaggttcaggaagatgttaacttaaatgttcagggtgccccagtctgttcagcatggctgaaatccacactccgtattcttccttgaagaaactgttatctttactcaatggcttcgtggctgtgtctggcatcatcctagttggcctgggcattggtggtaaatgtggaggggcctctctgacgaatgtcctcgggctgtcctccgcatacctccttcacgttggcaacctgtgcctggtgatgggatgcatcacggtactgcttggctgtgccgggtggtatggagcgactaaagagagcagaggcacgctcttgttttgcatcctgtcaatggttattgtcctcatcatggaagttacagctgccacagtggtccttcttttctttccaattgttggagatgtggccttggaacacaccttcgtgaccctgaggaagaattacagaggttacaacgagccagacgactattctacacagtggaacttggtcatggagaagctaaagtgctgtggggtgaataactacacagatttttctggctcttccttcgaaatgacaacgggccacacctaccccaggagttgctgtaaatccatcggaagtgtgtcctgtgacggacgcgatgtgtctccaaacgtcatccaccagaagggctgtttccataaactcctaaaaatcaccaagactcagagcttcaccctgagtgggagctctctgggagctgcagtgatacagaggtgggggtctcgctatgttgcgcaggctggtcttgaactgctggcctaaagcgatccccccgcctaggcctcccaaagtgctgggtttaccagcgtgagccaccacgctgggcttcctgcatccttttaaggttcctgagggtctgcctgagaggagctgtccctgaatctccatgcagccccacctgccacatcaccaag

SEQ ID NO: 190355 - DNA, 1026 bp, Homo sapiens
  Payload ID: 17606
  Gene Name: tetraspanin 16
  Uniprot ID: Q9UKR8
  ENST ID: ENST00000337994
  CDS Start-End: 130-612
ggacacagaggggcagagcaagtcagcattggcgccccttcctcagatccctatcatcttgggaaacagtagcccagaggttcaggaagatgttaacttaaatgttcagggtgccccagtctgttcagcatggctgaaatccacactccgtattcttccttgaagaaactgttatctttactcaatggcttcgtggctgtgtctggcatcatcctagttggcctgggcattggtggtaaatgtggaggggcctctctgacgaatgtcctcgggctgtcctccgcatacctccttcacgttggcaacctgtgcctggtgatgggatgcatcacggtactgcttggctgtgccgggtggtatggagcgactaaagagagcagaggcacgctcttgttttgcatcctgtcaatggttattgtcctcatcatggaagttacagctgccacagtggtccttcttttctttccaattgttggagatgtggccttggaacacaccttcgtgaccctgaggaagaattacagaggttacaacgagccagacgactattctacacagtggaacttggtcatggagaagggactctccaagtatttcttctcctctctatagctaaagtgctgtggggtgaataactacacagatttttctggctcttccttcgaaatgacaacgggccacacctaccccaggagttgctgtaaatccatcggaagtgtgtcctgtgacggacgcgatgtgtctccaaacgtcatccaccagaagggctgtttccataaactcctaaaaatcaccaagactcagagcttcaccctgagtgggagctctctgggagctgcagtgatacagttgccaggaattcttgccactttgctgctgtttatcaagctgggctgacacccaggcctggagaagatgagacacctgggcccatctggctgctggagattcagtctcagttttatttctctgtggcactcactgcttctggaggggagactgttaataaaagatttgggaaccccc

SEQ ID NO: 190356 - DNA, 417 bp, Homo sapiens
  Payload ID: 17606
  Gene Name: tetraspanin 16
  ENST ID: ENST00000589928
  CDS Start-End: 1-117
cgcgatgtgtctccaaacgtcatccaccagaagaaactgaggctcggggaggggacatcactagttcaagatcacagagctttggcagagttggaatttgaagccccattggcctgagtccattgccggcaccacactacctgccttctagagaccctaaatggagcaataaccatgaaaagtgatcatcctagcgggagtgagggccagccacgtgatggagcactcactttggctgtttccataaactcctaaaaatcaccaagactcagagcttcaccctgagtgggagctctctgggagctgcagtgatacaggtaagacccagcctctctagggtctttgagctgttttattaagcacctactgtatgccaaacactgttctggtcactgggacacaggagtgaacaaaact

SEQ ID NO: 190357 - DNA, 927 bp, Homo sapiens
  Payload ID: 17606
  Gene Name: tetraspanin 16
  Uniprot ID: Q9UKR8
  ENST ID: ENST00000592955
  CDS Start-End: 139-798
aggcagccaggacacagaggggcagagcaagtcagcattggcgccccttcctcagatccctatcatcttgggaaacagtagcccagaggttcaggaagatgttaacttaaatgttcagggtgccccagtctgttcagcatggctgaaatccacactccgtattcttccttgaagaaactgttatctttactcaatggcttcgtggctgtgtctggcatcatcctagttggcctgggcattggtggtaaatgtggaggggcctctctgacgaatgtcctcgggctgtcctccgcatacctccttcacgttggcaacctgtgcctggtgatgggatgcatcacggtactgcttggctgtgccgggtggtatggagcgactaaagagagcagaggcacgctcttgtttgttggagatgtggccttggaacacaccttcgtgaccctgaggaagaattacagaggttacaacgagccagacgactattctacacagtggaacttggtcatggagaagctaaagtgctgtggggtgaataactacacagatttttctggctcttccttcgaaatgacaacgggccacacctaccccaggagttgctgtaaatccatcggaagtgtgtcctgtgacggacgcgatgtgtctccaaacgtcatccaccagaagggctgtttccataaactcctaaaaatcaccaagactcagagcttcaccctgagtgggagctctctgggagctgcagtgatacagttgccaggaattcttgccactttgctgctgtttatcaagctgggctgacacccaggcctggagaagatgagacacctgggcccatctggctgctggagattcagtctcagttttatttctctgtggcactcactgcttctggaggggagactgttaataaaagatttgggaaccccc

SEQ ID NO: 190358 - DNA, 997 bp, Homo sapiens
  Payload ID: 17606
  Gene Name: tetraspanin 16
  Uniprot ID: Q9UKR8
  ENST ID: ENST00000590327
  CDS Start-End: 132-866
caggacacagaggggcagagcaagtcagcattggcgccccttcctcagatccctatcatcttgggaaacagtagcccagaggttcaggaagatgttaacttaaatgttcagggtgccccagtctgttcagcatggctgaaatccacactccgtattcttccttgaagaaactgttatctttactcaatggcttcgtggctgtgtctggcatcatcctagttggcctgggcattggtggtaaatgtggaggggcctctctgacgaatgtcctcgggctgtcctccgcatacctccttcacgttggcaacctgtgcctggtgatgggatgcatcacggtactgcttggctgtgccgggtggtatggagcgactaaagagagcagaggcacgctcttgttttgcatcctgtcaatggttattgtcctcatcatggaagttacagctgccacagtggtccttcttttctttccaattgttggagatgtggccttggaacacaccttcgtgaccctgaggaagaattacagaggttacaacgagccagacgactattctacacagtggaacttggtcatggagaagctaaagtgctgtggggtgaataactacacagatttttctggctcttccttcgaaatgacaacgggccacacctaccccaggagttgctgtaaatccatcggaagtgtgtcctgtgacggacgcgatgtgtctccaaacgtcatccaccagaagggctgtttccataaactcctaaaaatcaccaagactcagagcttcaccctgagtgggagctctctgggagctgcagtgatacagttgccaggaattcttgccactttgctgctgtttatcaagctgggctgacacccaggcctggagaagatgagacacctgggcccatctggctgctggagattcagtctcagttttatttctctgtggcactcactgcttctggaggggagactgttaataaaagatttgggaaccccctg

SEQ ID NO: 190359 - DNA, 642 bp, Homo sapiens
  Payload ID: 17606
  Gene Name: tetraspanin 16
  Uniprot ID: Q9UKR8
  ENST ID: ENST00000621731
  CDS Start-End: 160-642
gggccgccttggacaaccatcaggcagccaggacacagaggggcagagcaagtcagcattggcgccccttcctcagatccctatcatcttgggaaacagtagcccagaggttcaggaagatgttaacttaaatgttcagggtgccccagtctgttcagcatggctgaaatccacactccgtattcttccttgaagaaactgttatctttactcaatggcttcgtggctgtgtctggcatcatcctagttggcctgggcattggtggtaaatgtggaggggcctctctgacgaatgtcctcgggctgtcctccgcatacctccttcacgttggcaacctgtgcctggtgatgggatgcatcacggtactgcttggctgtgccgggtggtatggagcgactaaagagagcagaggcacgctcttgttttgcatcctgtcaatggttattgtcctcatcatggaagttacagctgccacagtggtccttcttttctttccaattgttggagatgtggccttggaacacaccttcgtgaccctgaggaagaattacagaggttacaacgagccagacgactattctacacagtggaacttggtcatggagaagggactctccaagtatttcttctcctctctatag

SEQ ID NO: 190360 - DNA, 2810 bp, Homo sapiens
  Payload ID: 17607
  Gene Name: tetraspanin 17
  Uniprot ID: Q96FV3
  ENST ID: ENST00000298564
  CDS Start-End: 150-716
ggcggggcccgaccggcgctctgtgtggccgaggccatgaagccgcagccgcccggctaggccccgggcggctctagcccagggcggcccgcggggcgctgggcctggctcccggctccggtttccgggccggcgggtggccgctcaccatgcccggcaagcaccagcatttccaggaacctgaggtcggctgctgcgggaaatacttcctgtttggcttcaacattgtcttctggttctccgtgttcctcggtctcatcttcttcctggagctggcaacagggatcctggcctttgtcttcaaggactggattcgagaccagctcaacctcttcatcaacaacaacgtcaaggcctaccgggacgacattgacctccagaacctcattgactttgctcaggaatacgaggatgtcctcaacacccagtgtggctacgacgtccggctcaaactggagctggagcagcagggcttcatccacaccaaaggctgcgtgggccagtttgagaagtggctgcaggacaacctgattgtggtggcgggagtcttcatgggcatcgccctcctccaggtacccttgtggccccacgtgcccctccccttgccggggccgccctcactctcccctcacctgtcctctgtcttacagatctttggcatctgcctggcccagaacctcgtgagtgacatcaaggcagtgaaagccaactggtgaggccgccagaggccatggccacatgcctggcctacgcaggcctctggggggccccccaggaccctcctactatactcctgacgggcaaggctgcaggagatgttcctgctgggactgagccttgaggggttcgcctgaaccgctgtgctgtccacccacggaggaagttgctgtgcctccgcctgggcctcttgtcccatatgcgtgtgtacacacacatgcaggcacacgtgtgcacagggagccaccgtctcggctacatttggggtggtggactctccaggggactaggaagggcgcagctcagagggtgcaggccaagtggggtgggaggtgctgtgtggagggtcccccccgttccctgccccccagtgctgggacgcacctttctgtgcgtagctgtatggggcgcgttgcctgagccactgcctcacacagcttcagagcactcttttctatgagctgtaactttgagcctgccaggaacccacctcagcctcagtgtcccagactctgaaatgggtccaagaattttctttctcttgcttgcctctcaggagcaaatggaatgatgactttgaaaaccactggcttacgcccaccatttccgaggtcctgtccacggcggggcctcagcagaactctctgactggggcccctggcccggccccacccagccgacatgttttctttggcctgggtggtttataccctgagccaacctttaaaaattggtagatttcacataaaagtccagatccacagcttctcttgaagaatgaccacctggctacgccggctcttcggtggcaacactacctgggacactgcctccccagtcaccaagggccccagctggcccgttctactcacctaagtgccgcctgacccttgtacactaggagctggcctcccacctctgcagggttattccctgcacctcgaggccgctgcgggccaatctggagtgaaacacggggacctgaaggatggagaggctggaccccgctttgaagagggtgcagcctgggaagggcggccttgctggggactgcggtgggagtagagtgcccaggagagggtctgaggggtgggatgggggtcaggacaattttgcaaaagaagtagctggaagccatgggactggcgggagcctgtttgggggatctggatggttgactcctaggagtcaagttcagcatcttcaccgtggctgcagagctgcctgatgggcactagagggcatgccagccccacactccctgggtctggcttcctcccgcaacctcactctagtagagcctgtgcctgcctactagcgctctggggttcggagagtttgggaatttctcagagccaactggctcaggcttgggaaggctggctgctgccctcagctccgcctcatcagctatgtgaaggggtgtgtgtggagtgatcctgccgccccctccctgggctcgtccagagatctcaaactccgatgcccctggggccacgtatgttgtataaatggatgaaacaggcccttgagttgggagcctgcttcactttgactttcccactgttgctggagacaaagacatcgtgatgagagaaagttcgcacaatctagtcggtaacagccactttccttgagaccaagagagtgcggtggggatgggggggagagcacgggtccccgtctgacagtggccgctgccatattcaggtgtagctaattgctctggtgtgggaatgcaggcctaatgacagaaatctggagaagccagaaatacagatttgtatgtgagatgtcctgattttttaagttgttggcagaaattaattcagaaatcaaatctgcaggccaaacaaggtgcaggacccagctttggccccatgcccctgtaggtccctctgggacagtcaccgctggggtcctggctgctctgtcattgagggatgctgggcactgctgccgggtggccagggtatggggcatgtgcccagcaatgtggctccttggccccgctggccagtgtcctgggcccctgacaggcgctggctgtgagtggtttgtacatgctacaataaatgcagctggcagcattg

SEQ ID NO: 190361 - DNA, 2550 bp, Homo sapiens
  Payload ID: 17607
  Gene Name: tetraspanin 17
  ENST ID: ENST00000310032
  CDS Start-End: 230-1228
ggcggggcccggtccagaggcggggacagcagggctccgggcaaggaggtctggatgctgagggcggtccctgaggggcgggcggggcccgaccggcgctctgtgtggccgaggccatgaagccgcagccgcccggctaggccccgggcggctctagcccagggcggcccgcggggcgctgggcctggctcccggctccggtttccgggccggcgggtggccgctcaccatgcccggcaagcaccagcatttccaggaacctgaggtcggctgctgcgggaaatacttcctgtttggcttcaacattgtcttctgggtgctgggagccctgttcctggctatcggcctctgggcctggggtgagaagggcgttctctcgaacatctcagcgctgacagatctgggaggccttgaccccgtgtggctgtttgtggtagttggaggcgtcatgtcggtgctgggctttgctggctgcattggggccctccgggagaacaccttcctgctcaagtttttctccgtgttcctcggtctcatcttcttcctggagctggcaacagggatcctggcctttgtcttcaaggactggattcgagaccagctcaacctcttcatcaacaacaacgtcaaggcctaccgggacgacattgacctccagaacctcattgactttgctcaggaatactggtcttgctgcggagcccgaggccccaatgactggaacctcaatatctacttcaactgcactgacttgaaccccagccgggagcgctgcggggtgcccttctcctgctgcgtcagggaccctgcggaggatgtcctcaacacccagtgtggctacgacgtccggctcaaactggtgagaggggagctggagcagcagggcttcatccacaccaaaggctgcgtgggccagtttgagaagtggctgcaggacaacctgattgtggtggcgggagtcttcatgggcatcgccctcctccagatctttggcatctgcctggcccagaacctcgtgagtgacatcaaggcagtgaaagccaactggagcaaatggaatgatgactttgaaaaccactggcttacgcccaccatttccgaggtcctgtccacggcggggcctcagcagaactctctgactggggcccctggcccggccccacccagccgacatgttttctttggcctgggtggtttataccctgagccaacctttaaaaattggtagatttcacataaaagtccagatccacagcttctcttgaagaatgaccacctggctacgccggctcttcggtggcaacactacctgggacactgcctccccagtcaccaagggccccagctggcccgttctactcacctaagtgccgcctgacccttgtacactaggagctggcctcccacctctgcagggttattccctgcacctcgaggccgctgcgggccaatctggagtgaaacacggggacctgaaggatggagaggctggaccccgctttgaagagggtgcagcctgggaagggcggccttgctggggactgcggtgggagtagagtgcccaggagagggtctgaggggtgggatgggggtcaggacaattttgcaaaagaagtagctggaagccatgggactggcgggagcctgtttgggggatctggatggttgactcctaggagtcaagttcagcatcttcaccgtggctgcagagctgcctgatgggcactagagggcatgccagccccacactccctgggtctggcttcctcccgcaacctcactctagtagagcctgtgcctgcctactagcgctctggggttcggagagtttgggaatttctcagagccaactggctcaggcttgggaaggctggctgctgccctcagctccgcctcatcagctatgtgaaggggtgtgtgtggagtgatcctgccgccccctccctgggctcgtccagagatctcaaactccgatgcccctggggccacgtatgttgtataaatggatgaaacaggcccttgagttgggagcctgcttcactttgactttcccactgttgctggagacaaagacatcgtgatgagagaaagttcgcacaatctagtcggtaacagccactttccttgagaccaagagagtgcggtggggatgggggggagagcacgggtccccgtctgacagtggccgctgccatattcaggtgtagctaattgctctggtgtgggaatgcaggcctaatgacagaaatctggagaagccagaaatacagatttgtatgtgagatgtcctgattttttaagttgttggcagaaattaattcagaaatcaaatctgcaggccaaacaaggtgcaggacccagctttggccccatgcccctgtaggtccctctgggacagtcaccgctggggtcctggctgctctgtcattgagggatgctgggcactgctgccgggtggccagggtatggggcatgtgcccagcaatgtggctccttggccccgctggccagtgtcctgggcccctgacaggcgctggctgtgagtggttt

SEQ ID NO: 190362 - DNA, 2457 bp, Homo sapiens
  Payload ID: 17607
  Gene Name: tetraspanin 17
  Uniprot ID: Q96FV3
  ENST ID: ENST00000508164
  CDS Start-End: 115-1104
catgaagccgcagccgcccggctaggccccgggcggctctagcccagggcggcccgcggggcgctgggcctggctcccggctccggtttccgggccggcgggtggccgctcaccatgcccggcaagcaccagcatttccaggaacctgaggtcggctgctgcgggaaatacttcctgtttggcttcaacattgtcttctgggtgctgggagccctgttcctggctatcggcctctgggcctggggtgagaagggcgttctctcgaacatctcagcgctgacagatctgggaggccttgaccccgtgtggctgtttgtggtagttggaggcgtcatgtcggtgctgggctttgctggctgcattggggccctccgggagaacaccttcctgctcaagtttttctccgtgttcctcggtctcatcttcttcctggagctggcaacagggatcctggcctttgtcttcaaggactggattcgagaccagctcaacctcttcatcaacaacaacgtcaaggcctaccgggacgacattgacctccagaacctcattgactttgctcaggaatactggtcttgctgcggagcccgaggccccaatgactggaacctcaatatctacttcaactgcactgacttgaaccccagccgggagcgctgcggggtgcccttctcctgctgcgtcagggaccctgcggaggatgtcctcaacacccagtgtggctacgacgtccggctcaaactggagctggagcagcagggcttcatccacaccaaaggctgcgtgggccagtttgagaagtggctgcaggacaacctgattgtggtggcgggagtcttcatgggcatcgccctcctccagatctttggcatctgcctggcccagaacctcgtgagtgacatcaaggcagtgaaagccaactggagcaaatggaatgatgactttgaaaaccactggcttacgcccaccatttccgaggtcctgtccacggcggggcctcagcagaactctctgactggggcccctggcccggccccacccagccgacatgttttctttggcctgggtggtttataccctgagccaacctttaaaaattggtagatttcacataaaagtccagatccacagcttctcttgaagaatgaccacctggctacgccggctcttcggtggcaacactacctgggacactgcctccccagtcaccaagggccccagctggcccgttctactcacctaagtgccgcctgacccttgtacactaggagctggcctcccacctctgcagggttattccctgcacctcgaggccgctgcgggccaatctggagtgaaacacggggacctgaaggatggagaggctggaccccgctttgaagagggtgcagcctgggaagggcggccttgctggggactgcggtgggagtagagtgcccaggagagggtctgaggggtgggatgggggtcaggacaattttgcaaaagaagtagctggaagccatgggactggcgggagcctgtttgggggatctggatggttgactcctaggagtcaagttcagcatcttcaccgtggctgcagagctgcctgatgggcactagagggcatgccagccccacactccctgggtctggcttcctcccgcaacctcactctagtagagcctgtgcctgcctactagcgctctggggttcggagagtttgggaatttctcagagccaactggctcaggcttgggaaggctggctgctgccctcagctccgcctcatcagctatgtgaaggggtgtgtgtggagtgatcctgccgccccctccctgggctcgtccagagatctcaaactccgatgcccctggggccacgtatgttgtataaatggatgaaacaggcccttgagttgggagcctgcttcactttgactttcccactgttgctggagacaaagacatcgtgatgagagaaagttcgcacaatctagtcggtaacagccactttccttgagaccaagagagtgcggtggggatgggggggagagcacgggtccccgtctgacagtggccgctgccatattcaggtgtagctaattgctctggtgtgggaatgcaggcctaatgacagaaatctggagaagccagaaatacagatttgtatgtgagatgtcctgattttttaagttgttggcagaaattaattcagaaatcaaatctgcaggccaaacaaggtgcaggacccagctttggccccatgcccctgtaggtccctctgggacagtcaccgctggggtcctggctgctctgtcattgagggatgctgggcactgctgccgggtggccagggtatggggcatgtgcccagcaatgtggctccttggccccgctggccagtgtcctgggcccctgacaggcgctggctgtgagtggtttgtacatgctacaataaatgcagctggcagca

SEQ ID NO: 190363 - DNA, 707 bp, Homo sapiens
  Payload ID: 17607
  Gene Name: tetraspanin 17
  ENST ID: ENST00000507471
  CDS Start-End: 1-611
ccggcaagcaccagcatttccaggaacctgaggtcggctgctgcgggaaatacttcctgtttggcttcaacattgtcttctggttctccgtgttcctcggtctcatcttcttcctggagctggcaacagggatcctggcctttgtcttcaaggactggattcgagaccagctcaacctcttcatcaacaacaacgtcaaggcctaccgggacgacattgacctccagaacctcattgactttgctcaggaatactggtcttgctgcggagcccgaggccccaatgactggaacctcaatatctacttcaactgcactgacttgaaccccagccgggagcgctgcggggtgcccttctcctgctgcgtcagggaccctgcggaggatgtcctcaacacccagtgtggctacgacgtccggctcaaactggagctggagcagcagggcttcatccacaccaaaggctgcgtgggccagtttgagaagtggctgcaggacaacctgattgtggtggcgggagtcttcatgggcatcgccctcctccagatctttggcatctgcctggcccagaacctcgtgagtgacatcaaggcagtgaaagccaactggtgaggccgccagaggccatggccacatgcctggcctacgcaggcctctggggggccccccaggaccctcctactatactcctgacgggcaaggctgcag

SEQ ID NO: 190364 - DNA, 884 bp, Homo sapiens
  Payload ID: 17607
  Gene Name: tetraspanin 17
  ENST ID: ENST00000504168
  CDS Start-End: 112-884
gaagccgcagccgcccggctaggccccgggcggctctagcccagggcggcccgcggggcgctgggcctggctcccggctccggtttccgggccggcgggtggccgctcaccatgcccggcaagcaccagcatttccaggaacctgaggtcggctgctgcgggaaatacttcctgtttggcttcaacattgtcttctgggtgctgggagccctgttcctggctatcggcctctgggcctggggtgagaagggcgttctctcgaacatctcagcgctgacagatctgggaggccttgaccccgtgtggctgtttgtggtagttggaggcgtcatgtcggtgctgggctttgctggctgcattggggccctccgggagaacaccttcctgctcaagtttctggcaacagggatcctggcctttgtcttcaaggactggattcgagaccagctcaacctcttcatcaacaacaacgtcaaggcctaccgggacgacattgacctccagaacctcattgactttgctcaggaatactggtcttgctgcggagcccgaggccccaatgactggaacctcaatatctacttcaactgcactgacttgaaccccagccgggagcgctgcggggtgcccttctcctgctgcgtcagggaccctgcggaggatgtcctcaacacccagtgtggctacgacgtccggctcaaactggagctggagcagcagggcttcatccacaccaaaggctgcgtgggccagtttgagaagtggctgcaggacaacctgattgtggtggcgggagtcttcatgggcatcgccctcctccagatctttggcatctgcctggcccagaacctcgtgagtgacatcaaggcagtgaaagccaactg

SEQ ID NO: 190365 - DNA, 1019 bp, Homo sapiens
  Payload ID: 17607
  Gene Name: tetraspanin 17
  ENST ID: ENST00000503045
  CDS Start-End: 56-985
ggcgctgggcctggctcccggctccggtttccgggccggcgggtggccgctcaccatgcccggcaagcaccagcatttccaggaacctgaggtcggctgctgcgggaaatacttcctgtttggcttcaacattgtcttctgggtgctgggagccctgttcctggctatcggcctctgggcctggggtgagaagggcgttctctcgaacatctcagcgctgacagatctgggaggccttgaccccgtgtggctgtttgtggtagttggaggcgtcatgtcggtgctgggctttgctggctgcattggggccctccgggagaacaccttcctgctcaagtttgactggattcgagaccagctcaacctcttcatcaacaacaacgtcaaggcctaccgggacgacattgacctccagaacctcattgactttgctcaggaatactggtcttgctgcggagcccgaggccccaatgactggaacctcaatatctacttcaactgcactgacttgaaccccagccgggagcgctgcggggtgcccttctcctgctgcgtcagggaccctgcggaggatgtcctcaacacccagtgtggctacgacgtccggctcaaactggtgagaggggagctggagcagcagggcttcatccacaccaaaggctgcgtgggccagtttgagaagtggctgcaggacaacctgattgtggtggcgggagtcttcatgggcatcgccctcctccagatctttggcatctgcctggcccagaacctcgtgagtgacatcaaggcagtgaaagccaactggagcaaatggaatgatgactttgaaaaccactggcttacgcccaccatttccgaggtcctgtccacggcggggcctcagcagaactctctgactggggcccctggcccggccccacccagccgacatgttttctttggcctgggtggtttataccctgagccaacctttaaaaattggtagatttcacataaaagtccagatccacagcttctct

SEQ ID NO: 190366 - DNA, 909 bp, Homo sapiens
  Payload ID: 17607
  Gene Name: tetraspanin 17
  ENST ID: ENST00000503030
  CDS Start-End: 115-291
catgaagccgcagccgcccggctaggccccgggcggctctagcccagggcggcccgcggggcgctgggcctggctcccggctccggtttccgggccggcgggtggccgctcaccatgcccggcaagcaccagcatttccaggaacctgaggtcggctgctgcgggaaatacttcctgtttggcttcaacattgtcttctgggtgagcgcggggtgctgggagccctgttcctggctatcggcctctgggcctggggtgagaagggcgttctctcgaacatctcagcgctgacagatctgggaggccttgaccccgtgtggctgtttgtggtagttggaggcgtcatgtcggtgctgggctttgctggctgcattggggccctccgggagaacaccttcctgctcaagtttttctccgtgttcctcggtctcatcttcttcctggagctggcaacagggatcctggcctttgtcttcaaggactggattcgagaccagctcaacctcttcatcaacaacaacgtcaaggcctaccgggacgacattgacctccagaacctcattgactttgctcaggaatacgaggatgtcctcaacacccagtgtggctacgacgtccggctcaaactggagctggagcagcagggcttcatccacaccaaaggctgcgtgggccagtttgagaagtggctgcaggacaacctgattgtggtggcgggagtcttcatgggcatcgccctcctccagatctttggcatctgcctggcccagaacctcgtgagtgacatcaaggcagtgaaagccaactggagcaaatggaatgatgactttgaaaaccactggcttacgcccaccatttccgaggtcctgtccacggcggggcctcagcagaactctctgactggggccc

SEQ ID NO: 190367 - DNA, 2361 bp, Homo sapiens
  Payload ID: 17607
  Gene Name: tetraspanin 17
  Uniprot ID: Q96FV3
  ENST ID: ENST00000515708
  CDS Start-End: 49-840
ggcctggctcccggctccggtttccgggccggcgggtggccgctcaccatgcccggcaagcaccagcatttccaggaacctgaggtcggctgctgcgggaaatacttcctgtttggcttcaacattgtcttctgggtgctgggagccctgttcctggctatcggcctctgggcctggggtgagaagggcgttctctcgaacatctcagcgctgacagatctgggaggccttgaccccgtgtggctgtttgtggtagttggaggcgtcatgtcggtgctgggctttgctggctgcattggggccctccgggagaacaccttcctgctcaagtttttctccgtgttcctcggtctcatcttcttcctggagctggcaacagggatcctggcctttgtcttcaaggactggattcgagaccagctcaacctcttcatcaacaacaacgtcaaggcctaccgggacgacattgacctccagaacctcattgactttgctcaggaatactggtcttgctgcggagcccgaggccccaatgactggaacctcaatatctacttcaactgcactgacttgaaccccagccgggagcgctgcggggtgcccttctcctgctgcgtcagggaccctgcggaggatgtcctcaacacccagtgtggctacgacgtccggctcaaactggagctggagcagcagggcttcatccacaccaaaggctgcgtgggccagtttgagaagtggctgcaggacaacctgattgtggtggcgggagtcttcatgggcatcgccctcctccagatctttggcatctgcctggcccagaacctcgagcaaatggaatgatgactttgaaaaccactggcttacgcccaccatttccgaggtcctgtccacggcggggcctcagcagaactctctgactggggcccctggcccggccccacccagccgacatgttttctttggcctgggtggtttataccctgagccaacctttaaaaattggtagatttcacataaaagtccagatccacagcttctcttgaagaatgaccacctggctacgccggctcttcggtggcaacactacctgggacactgcctccccagtcaccaagggccccagctggcccgttctactcacctaagtgccgcctgacccttgtacactaggagctggcctcccacctctgcagggttattccctgcacctcgaggccgctgcgggccaatctggagtgaaacacggggacctgaaggatggagaggctggaccccgctttgaagagggtgcagcctgggaagggcggccttgctggggactgcggtgggagtagagtgcccaggagagggtctgaggggtgggatgggggtcaggacaattttgcaaaagaagtagctggaagccatgggactggcgggagcctgtttgggggatctggatggttgactcctaggagtcaagttcagcatcttcaccgtggctgcagagctgcctgatgggcactagagggcatgccagccccacactccctgggtctggcttcctcccgcaacctcactctagtagagcctgtgcctgcctactagcgctctggggttcggagagtttgggaatttctcagagccaactggctcaggcttgggaaggctggctgctgccctcagctccgcctcatcagctatgtgaaggggtgtgtgtggagtgatcctgccgccccctccctgggctcgtccagagatctcaaactccgatgcccctggggccacgtatgttgtataaatggatgaaacaggcccttgagttgggagcctgcttcactttgactttcccactgttgctggagacaaagacatcgtgatgagagaaagttcgcacaatctagtcggtaacagccactttccttgagaccaagagagtgcggtggggatgggggggagagcacgggtccccgtctgacagtggccgctgccatattcaggtgtagctaattgctctggtgtgggaatgcaggcctaatgacagaaatctggagaagccagaaatacagatttgtatgtgagatgtcctgattttttaagttgttggcagaaattaattcagaaatcaaatctgcaggccaaacaaggtgcaggacccagctttggccccatgcccctgtaggtccctctgggacagtcaccgctggggtcctggctgctctgtcattgagggatgctgggcactgctgccgggtggccagggtatggggcatgtgcccagcaatgtggctccttggccccgctggccagtgtcctgggcccctgacaggcgctggctgtgagtggtttgtacatgctacaataaatgcagctggcagcatt

SEQ ID NO: 190368 - DNA, 4229 bp, Homo sapiens
  Payload ID: 17608
  Gene Name: tetraspanin 18
  Uniprot ID: Q96SJ8
  ENST ID: ENST00000340160
  CDS Start-End: 240-986
agtgtatccagaagctactgtcaggaggacactgtaagagaaccttggcacctctgggcccaaagggaaagacaccagtggaaagaggtgagcatctcctggaccaccctcaagcttcaggtgagctgagcttctaacactaccatcaaagcaactggaaccccttgaatttgatttctggagacgcgagcataatccttttgcagacatctcaacgctggctctccaggtggagcaccatggaaggcgactgtctgagctgcatgaagtatctgatgtttgtattcaatttcttcatatttctgggcggggcctgcctgctggccatcggcatctgggtcatggtggaccccaccggcttccgggagatcgtggctgccaatcctctgctcctcacgggcgcctacatcctcctggccatggggggcctgctctttctgctcggcttcctgggctgctgcggggccgtccgtgagaacaagtgtctgctgctatttttcttcctgttcatcctgatcatcttcctggcagagctctcagcagccatcctggccttcatcttcagggaaaatctcacccgagaattcttcaccaaggagctcaccaagcactaccagggcaataacgacacagacgtcttctctgccacctggaactcggtcatgatcacatttggttgctgcggggtcaacgggcctgaagactttaagtttgcatctgtgtttcgactcctgaccctggatagtgaagaggtgccggaggcctgctgccggagggaaccccaaagtcgggacggggtcctgctgagccgggaggagtgcctcctgggaaggagcctattcctaaacaagcagggctgttacacggtgatcctcaacaccttcgagacctacgtctacttggccggagcccttgccatcggggtactggccatcgagcttttcgccatgatctttgccatgtgcctcttccggggcatccagtagagggtatggcctgaagcctgaagactcgccccacccaccactgcccagcacccagtgtcctcccgtgcccctccccgctgtcctcttggccccaggggagaagatgaggccatcagagatggccaggagaagggccaggggaatagagctatttttttaacaaaacaaaatgaagacaaaaatatggactgatgtatcctcgcctggactcagggcaggtgccgtgggttctccagagaccccagcaactggcccaggatgcaggctgctctagagaccaaaggaacaccaggcccagcgccctctttggtccagccagaccctgggccctctctcctcactgcaccaggacctgatgccaagaaagtgaggatttaggcaacaaggaggcaaaagcaaatctcagagaagtcatcaaagcccaggggctgcacggagattcagctgccatgtctttgaggactcggaacccacagcgcaatccctggtccactggaggatggactgttccccccttcaggccggggccaagagtgagctgctaacacggcatccaagaatggcccagctggtaggatccttgctttccccatctgttggaccaaataatctcaaaggcccagagaggacagtgaccatccacagacacacagcacaggcgtgacagttctgaaaagaagctgagttgtctccaggctgctgtcactgcatccaggactctgtcagctctgctgcccacatgcacccctggcctcagcatcccggttcccccagacaagagagggcaagtcagccaggaactgcctcctccctgctctacagctaagaaaacaccattccatgacttcccaccgcgccctcgctcctacctccccacacctctctctgagtccccaggaacacacagaggtgcacatcacattcccttgtccacactgcccgcctctcccacatgccacccccttccctgtccttccccaactccccagctccaagagtggaagaaatccccaagatcatctgggtctccctctccacacccagaactgaggcttggatatcttcttcaacatccttgccaagacttctccaccctcttgcatacctccagggacagagagcttactacctcccaaggcagcctcctgcctttggactgctctgactttagcatcagcttaatacacagaagaggtttctgtttttctgtggctctgtccatggcatcccacttgcccactctccttcctggagtgttgaggtcacacattgactcccctgagccctcttctctccaggctaaagaatcccgaaggcatcgaggccatttctgctgcaacaaggtttcctgtctcttcactgtccgcacatttcttagtattccctccaggcttgggcagggagactcgcagatgcacacccacaagtattcagttctcaaactctagacgagtgttggcaactggattgcaagatgctcctaccctgatagatcaggggtggctgctggaggctgtgctggggatctgaggtttggtctgggctcagtgggagacggcagtgcaatcctgatgagtgatgtctgccaggcaccgtaagtttgattagtgatgtctgccacgggcagggatggaaggagcagtgtgatgtctgctctcttctctcccctctgtccctcttcaggaagaaagagctcattctgtctcacaagccaccggcatcctgtatcagcttccagcctcccctcaggctttccagtcaccagggacactcggagccacagcctagagccccgtgttccctggcctgtgcgtctgcccccttctgagatgcagccagaagctctgtgcctgctgcaaagattcaggtggaccctcctctaatctcctcctgctgtgcccgccagtccttgccctcccaccaggtctctgagctcagtgttaccaaattcgccctttaacagcttgctctggcaaccccataaatgacacctgaggtccgtagaagctaagctcctgagacccagggggacctgccactggtaccgcggcccagcctggggcctgggggctgcccctcttgaaccacccacatgcttagccccagctttttggaagaggcaaatggctggtctgaggatgacacacaaaaacaaaaacaaaaaacaaaaaacccatgctgggcaggactgaggcaaattgcacagctttatggctctaatccaggggcatcccaggcttctggggcccacagaagtcagagggaggacccaagagaaagggctggtcatgaagggaaatctggctaaggtgggttcaagggcagacacaagactgcccctcagcagctttctacaaatgtgccaaggaaccctcaatcagccctgattcagctcgccagccagccactggccaccctcttaggctggaaagggaagacaggcagtttctgctcctgttggcattcgctcaggctggtagctatttgcaagactgcctgaggccattccttggaggcaaggcaaagaaagctcagcccaaatcaggcttgagcctccctccagagcacagggagaaacagggtttagctggcttggtccagatacaacccacagcaggttctggtggtggctggggttgtgggggaggggtgggcagggatacctctttgtttcttttcaccccgaaatacaacagcccataacagagacttcctcggaccccactaacagggcaaggaacaagaagactacaccgctcatcacaaaccctgcctgtatcgaaagccactttcctgctctgaagctactgcctcttagagaaagggaatagctctttatgggctgggggtgagggcccctccccagggtccctgttaatttctggccttggtgctcaggcctgtccacagcctcccttgtctatgtctctatccatgcttaaggggcccggacaggatttcccaaaccagccgaggccccagcacccgccgtctccccagaagccccctcctccttcccccatgggtcatatgttgaaagtctattttaaaaactatgttccttgccgtagattgcagagctaatttatcacgtttctctcctgtgagaccccccttttatatgatatatccagaggaagttttgtaatataaaacaggacgcccacactgatggttttgcactggtttttgtgaatgtttcttacaaaaagaaaaaggaacaaagaataaatagtgaccgtg

SEQ ID NO: 190369 - DNA, 871 bp, Homo sapiens
  Payload ID: 17608
  Gene Name: tetraspanin 18
  ENST ID: ENST00000520999
  CDS Start-End: 401-871
cgccgggaaggcagccggcgccgggcaagttgcgagcgcgcccctccgaccaggaaagtttccccccggccgccggcgggatttggcgcggggtccggcagccgccgctggaagagtgtatccagaagctactgtcaggaggacactgtaagagaaccttggcacctctgggcccaaagggaaagacaccagtggaaagaggtgagcatctcctggaccaccctcaagcttcaggtgagctgagcttctaacactaccatcaaagcaactggaaccccttgaatttgatttctggagacgcgagcataatccttttgcagacatctcaacgctggctctccagctgggccgataaaagaaatatacacaagcctcgctgacgggagagtctgtcctgctgatgcccgaagaactgcccaggtggagcaccatggaaggcgactgtctgagctgcatgaagtatctgatgtttgtattcaatttcttcatatttctgggcggggcctgcctgctggccatcggcatctgggtcatggtggaccccaccggcttccgggagatcgtggctgccaatcctctgctcctcacgggcgcctacatcctcctggccatggggggcctgctctttctgctcggcttcctgggctgctgcggggccgtccgtgagaacaagtgtctgctgctatttttcttcctgttcatcctgatcatcttcctggcagagctctcagcagccatcctggccttcatcttcagggaaaatctcacccgagaattcttcaccaaggagctcaccaagcactaccagggcaataacgacacagacgtcttctctgccacctggaactcggtcatgatcacagtgagtgac

SEQ ID NO: 190370 - DNA, 1184 bp, Homo sapiens
  Payload ID: 17608
  Gene Name: tetraspanin 18
  ENST ID: ENST00000518429
  CDS Start-End: 1-814
gtggagcaccatggaaggcgactgtctgagctgcatgaagtatctgatgtttgtattcaatttcttcatatttctgggcggggcctgcctgctggccatcggcatctgggtcatggtggaccccaccggcttccgggagatcgtggctgccaatcctctgctcctcacgggcgcctacatcctcctggccatggggggcctgctctttctgctcggcttcctgggctgctgcggggccgtccgtgagaacaagtgtctgctgctatttttcttcctgttcatcctgatcatcttcctggcagagctctcagcagccatcctggccttcatcttcagggaaaatctcacccgagaattcttcaccaaggagctcaccaagcactaccagggcaataacgacacagacgtcttctctgccacctggaactcggtcatgatcacatttggttgctgcggggtcaacgggcctgaagactttaagtttgcatctgtgtttcgactcctgaccctggatagtgaagaggtgccggaggcctgctgccggagggaaccccaaagtcgggacggggtcctgctgagccgggaggagtgcctcctgggaaggagcctattcctaaacaagcagggctgttacacggtgatcctcaacaccttcgagacctacgtctacttggccggagcccttgccatcggggtactggccatcgaggaagaaagagctcattctgtctcacaagccaccggcatcctgtatcagcttccagcctcccctcaggctttccagtcaccagggacactcggagccacagcctagagccccgtgttccctggcctgtgcgtctgcccccttctgagatgcagccagaagctctgtgcctgctgcaaagattcaggtggaccctcctctaatctcctcctgctgtgcccgccagtccttgccctcccaccaggtctctgagctcagtgttaccaaattcgccctttaacagcttgctctggcaaccccataaatgacacctgaggtccgtagaagctaagctcctgagacccagggggacctgccactggtaccgcggcccagcctggggcctgggggctgcccctcttgaaccacccacatgcttagccccagctttttggaagaggcaaatggctggtctgaggatgacacacaaaaacaaaaa

SEQ ID NO: 190371 - DNA, 3316 bp, Homo sapiens
  Payload ID: 17608
  Gene Name: tetraspanin 18
  Uniprot ID: Q96SJ8
  ENST ID: ENST00000520358
  CDS Start-End: 416-1162
cggccccgagccccgagcgagcgccgccgcctcgcgctgcgggtccccggacgcgccgccaccgccgggaaggcagccggcgccgggcaagttgcgagcgcgcccctccgaccaggaaagtttccccccggccgccggcgggatttggcgcggggtccggcagccgccgctggaagagtgtatccagaagctactgtcaggaggacactgtaagagaaccttggcacctctgggcccaaagggaaagacaccagtggaaagaggtgagcatctcctggaccaccctcaagcttcaggtgagctgagcttctaacactaccatcaaagcaactggaaccccttgaatttgatttctggagacgcgagcataatccttttgcagacatctcaacgctggctctccaggtggagcaccatggaaggcgactgtctgagctgcatgaagtatctgatgtttgtattcaatttcttcatatttctgggcggggcctgcctgctggccatcggcatctgggtcatggtggaccccaccggcttccgggagatcgtggctgccaatcctctgctcctcacgggcgcctacatcctcctggccatggggggcctgctctttctgctcggcttcctgggctgctgcggggccgtccgtgagaacaagtgtctgctgctatttttcttcctgttcatcctgatcatcttcctggcagagctctcagcagccatcctggccttcatcttcagggaaaatctcacccgagaattcttcaccaaggagctcaccaagcactaccagggcaataacgacacagacgtcttctctgccacctggaactcggtcatgatcacatttggttgctgcggggtcaacgggcctgaagactttaagtttgcatctgtgtttcgactcctgaccctggatagtgaagaggtgccggaggcctgctgccggagggaaccccaaagtcgggacggggtcctgctgagccgggaggagtgcctcctgggaaggagcctattcctaaacaagcagggctgttacacggtgatcctcaacaccttcgagacctacgtctacttggccggagcccttgccatcggggtactggccatcgagcttttcgccatgatctttgccatgtgcctcttccggggcatccagtagagggtatggcctgaagcctgaagactcgccccacccaccactgcccagcacccagtgtcctcccgtgcccctccccgctgtcctcttggccccaggggagaagatgaggccatcagagatggccaggagaagggccaggggaatagagctatttttttaacaaaacaaaatgaagacaaaaatatggactgatgtatcctcgcctggactcagggcaggtgccgtgggttctccagagaccccagcaactggcccaggatgcaggctgctctagagaccaaaggaacaccaggcccagcgccctctttggtccagccagaccctgggccctctctcctcactgcaccaggacctgatgccaagaaagtgaggatttaggcaacaaggaggcaaaagcaaatctcagagaagtcatcaaagcccaggggctgcacggagattcagctgccatgtctttgaggactcggaacccacagcgcaatccctggtccactggaggatggactgttccccccttcaggccggggccaagagtgagctgctaacacggcatccaagaatggcccagctggtaggatccttgctttccccatctgttggaccaaataatctcaaaggcccagagaggacagtgaccatccacagacacacagcacaggcgtgacagttctgaaaagaagctgagttgtctccaggctgctgtcactgcatccaggactctgtcagctctgctgcccacatgcacccctggcctcagcatcccggttcccccagacaagagagggcaagtcagccaggaactgcctcctccctgctctacagctaagaaaacaccattccatgacttcccaccgcgccctcgctcctacctccccacacctctctctgagtccccaggaacacacagaggtgcacatcacattcccttgtccacactgcccgcctctcccacatgccacccccttccctgtccttccccaactccccagctccaagagtggaagaaatccccaagatcatctgggtctccctctccacacccagaactgaggcttggatatcttcttcaacatccttgccaagacttctccaccctcttgcatacctccagggacagagagcttactacctcccaaggcagcctcctgcctttggactgctctgactttagcatcagcttaatacacagaagaggtttctgtttttctgtggctctgtccatggcatcccacttgcccactctccttcctggagtgttgaggtcacacattgactcccctgagccctcttctctccaggctaaagaatcccgaaggcatcgaggccatttctgctgcaacaaggtttcctgtctcttcactgtccgcacatttcttagtattccctccaggcttgggcagggagactcgcagatgcacacccacaagtattcagttctcaaactctagacgagtgttggcaactggattgcaagatgctcctaccctgatagatcaggggtggctgctggaggctgtgctggggatctgaggtttggtctgggctcagtgggagacggcagtgcaatcctgatgagtgatgtctgccaggcaccgtaagtttgattagtgatgtctgccacgggcagggatggaaggagcagtgtgatgtctgctctcttctctcccctctgtccctcttcaggaagaaagagctcattctgtctcacaagccaccggcatcctgtatcagcttccagcctcccctcaggctttccagtcaccagggacactcggagccacagcctagagccccgtgttccctggcctgtgcgtctgcccccttctgagatgcagccagaagctctgtgcctgctgcaaagattcaggtggaccctcctctaatctcctcctgctgtgcccgccagtccttgccctcccaccaggtctctgagctcagtgttaccaaattcgccctttaacagcttgctctggcaaccccataaatgacacctgaggtccgtagaagctaagctcctgagacccagggggacctgccactggtaccgcggcccagcctggggcctgggggctgcccctcttgaaccacccacatgcttagccccagctttttggaagaggcaaatggctggtctgaggatgacacacaaaaaca

SEQ ID NO: 190372 - DNA, 565 bp, Homo sapiens
  Payload ID: 17608
  Gene Name: tetraspanin 18
  ENST ID: ENST00000520837
  CDS Start-End: 338-565
agaaccaagaagcatttgtctgctgaggcccaagactgggtagaggtggtgagcatcgtcccccgtccgccaccacagcatgcaacaggctcctgctatgctcctggggctgctccagtctgacagctacagaagagggtgagcatctcctggaccaccctcaagcttcaggtgagctgagcttctaacactaccatcaaagcaactggaaccccttgaatttgatttctggagacgcgagcataatccttttgcagacatctcaacgctggctctccagctgggccgataaaagaaatatacacaagcctcgctgacgggagagtctgtcctgctgatgcccgaagaactgcccaggtggagcaccatggaaggcgactgtctgagctgcatgaagtatctgatgtttgtattcaatttcttcatatttctgggcggggcctgcctgctggccatcggcatctgggtcatggtggaccccaccggcttccgggagatcgtggctgccaatcctctgctcctcacgggcgcctacatcctcctggccatggggggcctgctcttt

SEQ ID NO: 190373 - DNA, 840 bp, Homo sapiens
  Payload ID: 17608
  Gene Name: tetraspanin 18
  ENST ID: ENST00000533080
  CDS Start-End: 425-840
ccccggtcccggccccgagccccgagcgagcgccgccgcctcgcgctgcgggtccccggacgcgccgccaccgccgggaaggcagccggcgccgggcaagttgcgagcgcgcccctccgaccaggaaagtttccccccggccgccggcgggatttggcgcggggtccggcagccgccgctggaagagtgtatccagaagctactgtcaggaggacactgtaagagaaccttggcacctctgggcccaaagggaaagacaccagtggaaagaggtgagcatctcctggaccaccctcaagcttcaggtgagctgagcttctaacactaccatcaaagcaactggaaccccttgaatttgatttctggagacgcgagcataatccttttgcagacatctcaacgctggctctccaggtggagcaccatggaaggcgactgtctgagctgcatgaagtatctgatgtttgtattcaatttcttcatatttttcttcctgttcatcctgatcatcttcctggcagagctctcagcagccatcctggccttcatcttcagggaaaatctcacccgagaattcttcaccaaggagctcaccaagcactaccagggcaataacgacacagacgtcttctctgccacctggaactcggtcatgatcacatttggttgctgcggggtcaacgggcctgaagactttaagtttgcatctgtgtttcgactcctgaccctggatagtgaagaggtgccggaggcctgctgccggagggaaccccaaagtcgggacggggtcctgctgagccgggaggagtgcctcctgggaaggagcctattcctaaacaa

SEQ ID NO: 190374 - DNA, 726 bp, Homo sapiens
  Payload ID: 17608
  Gene Name: tetraspanin 18
  ENST ID: ENST00000533786
  CDS Start-End: 289-726
tttcttatctgcaagtcagaggagggtgagttccccaggctttcaacagagtgtatccagaagctactgtcaggaggacactgtaagagaaccttggcacctctgggcccaaagggaaagacaccagtggaaagaggtgagcatctcctggaccaccctcaagcttcaggtgagctgagcttctaacactaccatcaaagcaactggaaccccttgaatttgatttctggagacgcgagcataatccttttgcagacatctcaacgctggctctccaggtggagcaccatggaaggcgactgtctgagctgcatgaagtatctgatgtttgtattcaatttcttcatatttctgggcggggcctgcctgctggccatcggcatctgggtcatggtggaccccaccggcttccgggagatcgtggctgccaatcctctgctcctcacgggcgcctacatcctcctggccatggggggcctgctctttctgctcggcttcctgggctgctgcggggccgtccgtgagaacaagtgtctgctgctatttttcttcctgttcatcctgatcatcttcctggcagagctctcagcagccatcctggccttcatcttcagggaaaatctcacccgagaattcttcaccaaggagctcaccaagcactaccagggcaataacgacacagacgtcttctctgccacctggaactcggtcatgatcacagtgagt

SEQ ID NO: 190375 - DNA, 549 bp, Homo sapiens
  Payload ID: 17608
  Gene Name: tetraspanin 18
  ENST ID: ENST00000533202
  CDS Start-End: 311-549
aggcgaggggcagcccgcagaggagacgcgcttctcggcagcaacggcgtctggagccgggaggggcggagagtgtatccagaagctactgtcaggaggacactgtaagagaaccttggcacctctgggcccaaagggaaagacaccagtggaaagaggtgagcatctcctggaccaccctcaagcttcaggtgagctgagcttctaacactaccatcaaagcaactggaaccccttgaatttgatttctggagacgcgagcataatccttttgcagacatctcaacgctggctctccaggtggagcaccatggaaggcgactgtctgagctgcatgaagtatctgatgtttgtattcaatttcttcatatttctgggcggggcctgcctgctggccatcggcatctgggtcatggtggaccccaccggcttccgggagatcgtggctgccaatcctctgctcctcacgggcgcctacatcctcctggccatggggggcctgctctttctgctcggcttcctgggctgctgcggggccgtccgtgagaa

SEQ ID NO: 190376 - DNA, 651 bp, Homo sapiens
  Payload ID: 17609
  Gene Name: tetraspanin 19
  ENST ID: ENST00000433494
  CDS Start-End: 102-263
aaacaatctcgattctaaattgaaacgaacgcagcatttcagggactggatgaggagcttacggttttttacagaatcatcaatatcttggaagaaaaagaatgttaagaaataacaaaacaataattattaagtactttcttaatctcattaatggagctttcttggttcttggacttttattcatgggatttggtgcatggctcttattagatagaaataattttttaacagcttttggtggagtctcgctctgtcactaggctggagtgcagtggcacgatctcggctcactgcaacctccacctcccggattcaagcgattctcctgcctcagattccgaagtagctggaattacagtatgcagtattgataacatggacctttgctgttcaggttgtactttcagcattcatcatcacaaagaaagaggaggttcagcaactatggcatgacaaaattgattttgtcatttctgagtatggatctaaagataagcctgaagatataaccaagtggactattctgaatgccttacagaaaacatgttgtggccaacataattacacagactggataaagaataagaacaaagaaaattcaggacaggtgccatgttcttgcacaaagtcaactttaagaaaatggtt

SEQ ID NO: 190377 - DNA, 998 bp, Homo sapiens
  Payload ID: 17609
  Gene Name: tetraspanin 19
  Uniprot ID: P0C672
  ENST ID: ENST00000532498
  CDS Start-End: 82-828
tgaaacgaacgcagcatttcagggactggatgaggagcttacggttttttacagaatcatcaatatcttggaagaaaaagaatgttaagaaataacaaaacaataattattaagtactttcttaatctcattaatggagctttcttggttcttggacttttattcatgggatttggtgcatggctcttattagatagaaataattttttaacagcttttgatgaaaataatcacttcatagtacctatttctcaaattttgattggaatgggatcttctactgttcttttttgtctattgggttatataggaattcacaacgaaatcagatggctcctaattgtgtatgcagtattgataacatggacctttgctgttcaggttgtactttcagcattcatcatcacaaagaaagaggaggttcagcaactatggcatgacaaaattgattttgtcatttctgagtatggatctaaagataagcctgaagatataaccaagtggactattctgaatgccttacagaaaacattacagtgttgtggccaacataattacacagactggataaagaataagaacaaagaaaattcaggacaggtgccatgttcttgcacaaagtcaactttaagaaaatggttttgtgatgagccactgaatgcaacttaccttgagggttgtgaaaataaaatcagtgcatggtataatgttaatgtgttaaccttaatcggaattaactttggacttttaacttcagaggttttccaagtctcattaacagtttgtttcttcaaaaacatcaagaatataatccatgcagaaatgtgacctttggatttcaatttgttcagaagaaaccagttaattcttaaaaaatcacattatattattttattccaaaaacgttttgaattgtattaaataacagatgtattcaaattattaattatatgtaatattgaattactgaatactataataaaacattcatgaaatta

SEQ ID NO: 190378 - DNA, 385 bp, Homo sapiens
  Payload ID: 17609
  Gene Name: tetraspanin 19
  ENST ID: ENST00000525452
  CDS Start-End: 1-209
agtgttgtggccaacataattacacagactggataaagaataagaacaaagaaaattcaggacaggtgccatgttcttgcacaaagtcaactttaagaaaatggttttgtgatgagccactgaatgcaacttaccttgaggttttccaagtctcattaacagtttgtttcttcaaaaacatcaagaatataatccatgcagaaatgtgacctttggatttcaatttgttcagaagaaaccagttaattcttaaaaaatcacattatattattttattccaaaaacgttttgaattgtattaaataacagatgtattcaaattattaattatatgtaatattgaattactgaatactataataaaacattcatgaaattatattaa

SEQ ID NO: 190379 - DNA, 463 bp, Homo sapiens
  Payload ID: 17609
  Gene Name: tetraspanin 19
  ENST ID: ENST00000547836
  CDS Start-End: 200-463
gaacgcagcatttcagggactggatgaggagcttacggttttttacagagacagggtctccctctgttgcccaggctggagtgcagtggtacaattattgctcactgtagcctccaactcttgtactcaagtaatcctcccgccttggcctcccaaagcactgggattatagaatcatcaatatcttggaagaaaaagaatgttaagaaataacaaaacaataattattaagtactttcttaatctcattaatggagctttcttggttcttggacttttattcatgggatttggtgcatggctcttattagatagaaataattttttaacagcttttgatgaaaataatcacttcatagtacctatttctcaaattttgattggaatgggatcttctactgttcttttttgtctattgggttatataggaattcacaacgaaatcagatggctcctaattgtg

SEQ ID NO: 190380 - DNA, 687 bp, Homo sapiens
  Payload ID: 17609
  Gene Name: tetraspanin 19
  ENST ID: ENST00000552392
  CDS Start-End: 77-556
cgaacgcagcatttcagggactggatgaggagcttacggttttttacagaatcatcaatatcttggaagaaaaagaatgttaagaaataacaaaacaataattattaagtactttcttaatctcattaatggagctttcttggttcttggacttttattcatgggatttggtgcatggctcttattagatagaaataattttttaacagcttttgatgaaaataatcacttcatagtacctatttctcaaattttgattggaatgggatcttctactgttcttttttgtctattgggttatataggaattcacaacgaaatcagatggctcctaattgtggtggagtctcgctctgtcactaggctggagtgcagtggcacgatctcggctcactgcaacctccacctcccggattcaagcgattctcctgcctcagattccgaagtagctggaattacagtatgcagtattgataacatggacctttgctgttcaggttgtactttcagcattcatcatcacaaagaaagaggaggttcagcaactatggcatgacaaaattgattttgtcatttctgagtatggatctaaagataagcctgaagatataaccaagtggactattctgaatgccttacagaaaacattacagtgttgtggccaacataattacacagactggataa

SEQ ID NO: 190381 - DNA, 793 bp, Homo sapiens
  Payload ID: 17610
  Gene Name: tetraspanin 2
  ENST ID: ENST00000369515
  CDS Start-End: 69-659
ggagcctgccgctccccgcgctcgtagcgcgggcctggggactggggatcccgccgccgggccgcagcatggggcgcttccgcgggggcctgcggtgcatcaagtacctgctgcttggcttcaacctgctcttctggctggctggatcggccgtcattgcttttggactatggtttcggttcggaggtgccataaaggagttatcatcagaggacaagtccccagagtatttctatgtggggctgtatgttctggttggagccggggccctgatgatggccgtggggttcttcgggtgctgcggagccatgcgggagtcgcaatgtgtgcttggatcagctatccgacatgttcagaccatgtatgaagaggcttacaatgattaccttaaagacaggggaaaaggcaatgggacactcatcaccttccactcaacatttcagtgctgtggaaaagaaagctccgaacaggtccaacctacatgcccaaaggagcttctaggacacaagaattgcatcgatgaaattgagaccataatcagtgttaagctccagctcattggaattgtcggtattggaattgcaggtctgacgatctttggcatgatattcagcatggtcctctgctgtgcgatacgaaactcacgagatgtgatatgaagctacttctacatgaaaattgcaatctaaagctttcataccaaatgtcacaggagctgtctcccagctcatttttaacactgaaatgacattaggatctaaaataatttgctgtcaattgtacatttgcatga

SEQ ID NO: 190382 - DNA, 3177 bp, Homo sapiens
  Payload ID: 17610
  Gene Name: tetraspanin 2
  Uniprot ID: O60636
  ENST ID: ENST00000369516
  CDS Start-End: 33-698
ggggactggggatcccgccgccgggccgcagcatggggcgcttccgcgggggcctgcggtgcatcaagtacctgctgcttggcttcaacctgctcttctggctggctggatcggccgtcattgcttttggactatggtttcggttcggaggtgccataaaggagttatcatcagaggacaagtccccagagtatttctatgtggggctgtatgttctggttggagccggggccctgatgatggccgtggggttcttcgggtgctgcggagccatgcgggagtcgcaatgtgtgcttggatcattttttacctgcctcctggtgatatttgctgctgaagtaaccactggagtatttgcttttataggcaagggggtagctatccgacatgttcagaccatgtatgaagaggcttacaatgattaccttaaagacaggggaaaaggcaatgggacactcatcaccttccactcaacatttcagtgctgtggaaaagaaagctccgaacaggtccaacctacatgcccaaaggagcttctaggacacaagaattgcatcgatgaaattgagaccataatcagtgttaagctccagctcattggaattgtcggtattggaattgcaggtctgacgatctttggcatgatattcagcatggtcctctgctgtgcgatacgaaactcacgagatgtgatatgaagctacttctacatgaaaattgcaatctaaagctttcataccaaatgtcacaggagctgtctcccagctcatttttaacactgaaatgacattaggatctaaaataatttgctgtcaattgtacatttgcatgagtacgtatgtttggctcattactggtttaccccttgagtgaatgcctgtttatgatgactgagagcatattcatgtgtgatctgcgtgtttctggaatatgctttatacgtaatgaaatctgtttgctgggaattcctgattcttgttatataagaagaacaacctatttcgctcccagaaaaaaaagatcaaagagctttcagaaactttgagaacttggctatttagaaaaagtgataatgggtcagtttctcagactgtagccattgaaaattagatgcagagaattcagagatttcttcttaatggaagtaataagctgtaagaattgagagatcacaatggagtgttaaaactgactgtgtctaagttgggtgtaagggtttcctgggtttttttatatacatgctctccccagaatacagtaaaccacagttttagaactaaacacatctgtaaaactaaatatagcatggaaaatccaatttgaataagtcatgctttcctagaatttaaaaataaaaaagtcttcctctggaaagagaagtcacacagacaatcatgtgccctataaaagtgagtgtttataggactaaaaaacttttaacaactttttaaggaaatatttttgttcttatacaaaaacatgtaaatattgctttattactttcattttctgaccctgctgtaaactactgcaaccctcacatcctcaaagggacttttatgtcaaactcttctgtttctccaaatataaggaaaaaagactaaagcaagagatctggcagttgaaaattgtgggaaagagaatttgtatgggcactgtatctatgaaatacctcataacttacgtttacatgttttcctaactttttgtatttttcttgtatagccacctagagaattcttcatagattaagaactacagttttcaccacttaacataagtaaaacaaagtccttcataatttaaccattagcatctttggccaaaccaaaataaagaaaagcatcttctcctagttgtgtgtgggcaacagaaacaagttaaggaaacaaaaatacttatatatacacagaacaaaaataatgttctttttatgcaaatcccctgtgaaaataaaattttcaatgtttttttggtcttaacgcttcattttaacttagtaaacccaaatttaggatttacattggcaaatttttcagtgatttttaacgtgttacatttagtaaaccatagattttttaaaaactacattttgtaaggccacacataagtgaaaatacggaaggctttggaaacccccagatgaacttctatacatgtgaaaacacaagtctttgagtgtgcactaaaagtgtcacactcccaaaaaactcacaaaacattttgctaaaaagatatgactgcttgaaatagtctctctcccatggagaaccacatttctctttctgccatacttgctactgctactgattttggaggaaatttttctagaagaacaaaggtcatatttgaggcaagctaaaaacttaattatacatggctactttactgtgtctgtagctaaagaaaaattattttacaaaaattacttcatgaaatatagtttgtaccccagtagttgagaaatgtgaccttttaggcaaagaacaggcagtccatctctcttagctttagtttatctctctgcctgaagacaggaaacaggcccaagtgcatactcgggttctttccaactcagaatcatctctgattccacaaaagtgagtttagtttcctatctgaattaacaactttaaaggagactataatagttaaaagtggaagaatagaaataaataaatttaaaatgaaattaattaaagtagaagagaagggttctgttccatgtacgattaatgtgccccttttggagataagctttccaaaatatgcgtatgagtaaaattagagaattccaccactaagcaacaatagattttatatgtgtgtgtggatatatatacacacacacacagaaagatgaatatatatatatatatatctgtatagacacacatataatatatatagatatataatccctatatatcttgaatctacaaatatctttatatgtatataatttgaatatatacatgtatgtatatacagatgtgtgtgtatatatatatatacatacacatatacataaattttcagctatttctgttcccctgaactaatttgagattagacccaaacatgcttttaaatgtctcatgccaaggcactgaattaagacttcttaatgttgaaatattttaagtgatttcatattaaattttctatatactgaaa

SEQ ID NO: 190383 - DNA, 671 bp, Homo sapiens
  Payload ID: 17610
  Gene Name: tetraspanin 2
  ENST ID: ENST00000433172
  CDS Start-End: 1-564
ggcctgcggtgcatcaagtacctgctgcttggcttcaacctgctcttctggctggctggatcggccgtcattgcttttggactatggtttcggttcggaggtgccataaaggagttatcatcagaggacaagtccccagagtatttctatgtggggctgtatgttctggttggagccggggccctgatgatggccgtggggttcttcgggtgctgcggagccatgcgggagtcgcaatgtgtgcttggatcattttttacctgcctcctggtgatatttgctgctgaagtaaccactggagtatttgcttttataggcaagggggtagctatccgacatgttcagaccatgtatgaagaggcttacaatgattaccttaaagacaggggaaaaggcaatgggacactcatcaccttccactcaacatttcagtgctgtggaaaagaaagctccgaacaggtccaacctacatgcccaaaggagcttctaggacacaagatctttggcatgatattcagcatggtcctctgctgtgcgatacgaaactcacgagatgtgatatgaagctacttctacatgaaaattgcaatctaaagctttcataccaaatgtcacaggagctgtctcccagctcatttttaacactgaaatgacattaggatctaaaataa

SEQ ID NO: 190384 - DNA, 6467 bp, Homo sapiens
  Payload ID: 17611
  Gene Name: tetraspanin 3
  Uniprot ID: O60637
  ENST ID: ENST00000267970
  CDS Start-End: 275-1036
ctgcagcctccgcagaggcgattggctgaagctaccggccgcgtggggcgggactcggttgccagggagcggcgcgggagccctgaggggactgcggcggctgcgcggaggagcgaggcacttgctggggtcggggctgcgcgacggcgcaggggctgcggggagcgccgcgcaggccgtgcagttcctagcgaggaggcgccgccgccattgccgctctctcggtgagcgcagccccgctctccgggccgggccttcgcgggccaccggcgccatgggccagtgcggcatcacctcctccaagaccgtgctggtctttctcaacctcatcttctggggggcagctggcattttatgctatgtgggagcctatgtcttcatcacttatgatgactatgaccacttctttgaagatgtgtacacgctcatccctgctgtagtgatcatagctgtaggagccctgcttttcatcattgggctaattggctgctgtgccacaatccgggaaagtcgctgtggacttgccacgtttgtcatcatcctgctcttggtttttgtcacagaagttgttgtagtggttttgggatatgtttacagagcaaaggtggaaaatgaggttgatcgcagcattcagaaagtgtataagacctacaatggaaccaaccctgatgctgctagccgggctattgattatgtacagagacagctgcattgttgtggaattcacaactactcagactgggaaaatacagattggttcaaagaaaccaaaaaccagagtgtccctcttagctgctgcagagagactgccagcaattgtaatggcagcctggcccacccttccgacctctatgctgaggggtgtgaggctctagtagtgaagaagctacaagaaatcatgatgcatgtgatctgggccgcactggcatttgcagctattcagctgctgggcatgctgtgtgcttgcatcgtgttgtgcagaaggagtagagatcctgcttacgagctcctcatcactggcggaacctatgcatagttgacaactcaagcctgagctttttggtcttgttctgatttggaaggtgaattgagcaggtctgctgctgttggcctctggagttcatttagttaaagcacatgtacactggtgttggacagagcagcttggcttttcatgtgcccacctacttacctactacctgcgactttctttttccttgttctagctgactcttcatgcccctaagattttaagtacgatggtgaacgttctaatttcagaaccaattgcgagtcatgtagtgtggtagaattaaaggaggacacgagcctgcttctgttacctccaagtggtaacaggactgatgccgaaatgtcaccaggtcctttcagtcttcacagtggagaactcttggccaaaggtttttgcggggaggaggaggaaaccagctttctggttaaggttaacaccagatggtgcccctcattggtgtccttttaaaaaatatttactgtagtccaataagatagcagctgtacaaaatgactaaaatagattgtaggatcatatggcgtatatcttggttcatcttcaaaatcagagactgagctttgaaactagtggtttttaatcaaagttggctttataggaggagtataatgtatgcactactgttttaaaagaattagtgtgagtgtgtttttgtatgaatgagcccattcatggtaagtcttaagcttgttggaaataatgtacccatgtagactagcaaaatagtatgtagatgtgatctcagttgtaaatagaaaaatctaattcaataaactctgtatcagcccccaacatattatttttcattatttgggggatatttcagttccagagcagcagtatcatgttttctttgttggtgctgtctatagttcatcatggtttacgtgtgttttcgttatagctgttgccagattctaaagggcttgatattcaaaaaaccacagatgctttcagtccagtatatcctagaaatatagagctctactttgtgcaatgcactggggatacagtggcgatactgtccttgtcttcaaggagttcggagtcctagtataggagacatacataggagaagataattttcacactgcagtggttgtagtaatagaatgggagtccaaaggggagttccggagaggtcaggggtgacttcctggaggagatgcccaagcttggaggctggataggctttgttgaaagatggtacacaagagtgtgaaacaaaattgtgtgtgcagggagcttaaaatacaaggctggggaaagaagttggagaagcaggaaagcccaggccctctagtgtcttacggaacatcctgtggaggtgagagctgacttgtaggtggaagcagctctttggaggtttgatttggaaggtgaactgagaagaaggtggtgatgcaagccggccgtgctgaagccaggatgaattggtgtgactgggcttcagttaggctggcatagcagttgagagagcttagcagtgggcagcagggcactgttgggggcggtggtgagcggtggattctggctgtttggaggcaggacagtggtggaattcgatcattgattggacgtgggacagagaagggagaagagaagactcatctaggatgagtcccaggtttctggctcagtcaactggggaaacaaagtcacagagctagggagtagttagagaacacatctgggggtgtgactcatggtcagttttgggctcgtcagttttgagatgcccaaatatcatgcagatctgtcccacctgaaaatggagaagacacgggaaaggagaggagtaaaaactaactccttttcacaaagtggaagttaccagaatgtgatttcagaggccccgggggatttatcatgtgactactgacccatcccacctcttgcccctgcctgttgcacagtgggcaagaatgtttgtgacctttcactaccaccacctcccccgagcatggtccccccagttttcaatatgaaccatcctgtgggtaccctgtcacaggctggccctgaggtgagcaatatttggactgtgatgttggttgttctccactctttctacaggacagaacagggcctctagagtgggaaatggctttgggaaatatgccaagcagtagccttgttcttcaacttgcccaagaggataattctccacacccttcctgtactcagtcctcagtttgcctggtgagagagcagcctcctcccgtgtgctctgccagctggacccagactggccatattaccagtgagaccaaaaagatggaggtggggaggtagctctgaggtctgggaaaccattccagctcctgccagttttaacttgtgtttaattcctggcacagttgtcctggaaatgcctttttctcttgcctgggaaccactagaaggggatgttgtctgtgttggccagggccatgcaaattcaacatcttgtttctgcccttcccccgtgtagctgaggctaggtgttggcattacccagtgcttgttcttcagagagcaaaagcactgctcgtcatgtctgaaatttagtgagtgagctcacccactaggctggtgtttcctgcccgtggctgcacattggaagcaccggggcactttgagaactacagatgcctgggtcccagagcatctaaggtgctctagggtgtgtccaggacacagccctggttgaggaccactgctatattgtatggcctcttttaaaaaagttaattttacttggaaatgatttcaaagctacagaaaagttgcaagaataaaaactgtacaaatgaggctcaaatatcctttgcccagatacacctattaacatttcgtcccattctatctgtcatgtgtgttctcaaatgtgtgtgcgttctctctcccttgcgccaaccccctgtctctccctctccctccctcctgctgcctccacacctgtcatggccttttacccctaatacctcagtgggtacttaccaagaagaagatactctctgacgactgcagtacagttgtcaaattccgtccatctaacactgatagaatacctcaccactcatattcccattggccgcatcgtgtcctctatagcacctttccctctgcggtgctggatctggtctggatcaggtaatcagttgagttgtcatgtctccttggtcttctttaatctggatcatttccatagctttgtctgtgatgataggaacagtttgtaaggatacagttcgttttaggtggtgctgcttatctgtgtttgtctgcgatttcctcgtgattagatttggttttgcattccaggtggctgaaccactacctgcgtcacgcggcctctcagggcatcgcatctcgaggcacacaatgcccatctgccccacagtggggatgttcgttttgatcatctagtccaaggaggaggaaatgtgaacaggaaggttttaatataagtaattgttaactgtgtagaaggtagttaactactaaaagggataaaaaagagctctaaagcagcttagcagagaacagccatcacccctagggctaagggaagagaaaacagagaaggaacgtggaaactcagaggaggttccccaaggtggagagacctccgaggggtggctgtggttgcctgggatatgctgcctgtcccatgctggagaatcaacttactggaggtgcccccccgccaagccacaggagcagagagctgtcacggtggggaatgctgctgggacccgtgcaggacgaaaggagacagaagaaaaaggccatcttcctcctctagccttgttagccccttcagagcccactgtgggtcaggctggcaaagggtaaaggagttttcagagccccctcttcagtgtgacaaggaagggcaaggtcagggaaatttggagttaagaggcaataaatgagtacctggcacacctagtcgaggtgtgtccactttctccatagcatggttactgtttttttcttttcaactaataagaaatctctggagacacactgtctccatgtacataccctgttcctcatgagactcttccccattccccgaccaggttcagcaaatgttgctgattctggcctgattcaatctttatgatgactgccaagcgacgtttctgcagcccagcactccttcctcatttgccagtcatccctcccttctccttcatttattttcatatatccactatggattcccattttttcaaaagtcgacttcatcattgacctttggggatgggggaagagttcctcagatagttcccgacttggccagcgagagccccttcgagtgcctcctatatcccagcatttttggaagcactcccctaatttctgatctaacaagatgttccaggcccctgggcaccagccatggatcagtgtttgtcccaggagccctggtccctggcactaggtgtgcttattgcagctggggtgtctttgcttcttgtcctatagatgattgacagagcttgtcttactgccttttttaagtgtatttttttaaacaaaagtaattggtgctttaaaaaatgtgaacaatacagacatctgtaaagaagtacccacagggaagcaagttcagcagttcagcaatggcatgtgtctttgcagactacatacacagaaacagacttggtattgggttttggtttttgctttttgctaataggaattttatcctacaagatcctctttctgtcttcacaacatagtctgatgctccttccatgtctaactgtaggatttgtcattccattgtgttagctgtgtgggtacattagtaccatgattaaccaaggtgtataaagggcaggcctgcaggctgcctccagtgcctccactactcgccacagtgatcatctctatacacacactgcagtcatttacaatttttaaaatgaaaacaatttttattgagatgcaattcacatggcataaaattaacgattttaaagtaaagaagttgccttgagtacattcaccatgctatagaaccactgcctgtatctagtttcaaagcactttcatcaccctgtgtcatgtatttttacatgaactccaagggtggattcttgttagttggatttactctggatggaaaagtcatgtttggctgggtgcagtggctcatgcctgtaatcatagcactttgggaggtcgagacaggtgggtcacttgagatcaggagttcaaaaccagcctggccaacatggtgaaacccatctctattaaaaatacaaaaaattagcagggcctggtggcatgcacctgtaatcccagctacttgggaggctgaggcaggagaatcgcttgaaccgggaggcagaggttgcagtgagccgagattatgccactgcactccagcctgggtgacagagcaagactctgtctc

SEQ ID NO: 190385 - DNA, 1647 bp, Homo sapiens
  Payload ID: 17611
  Gene Name: tetraspanin 3
  Uniprot ID: O60637
  ENST ID: ENST00000346495
  CDS Start-End: 156-842
acttgctggggtcggggctgcgcgacggcgcaggggctgcggggagcgccgcgcaggccgtgcagttcctagcgaggaggcgccgccgccattgccgctctctcggtgagcgcagccccgctctccgggccgggccttcgcgggccaccggcgccatgggccagtgcggcatcacctcctccaagaccgtgctggtctttctcaacctcatcttctggggggcagctggcattttatgctatgtgggagcctatgtcttcatcacttatgatgactatgaccacttctttgaagatgtgtacacgctcatccctgctgtagtgatcatagctgtaggagccctgcttttcatcattgggctaattggctgctgtgccacaatccgggaaagtcgctgtggacttgccacggtggaaaatgaggttgatcgcagcattcagaaagtgtataagacctacaatggaaccaaccctgatgctgctagccgggctattgattatgtacagagacagctgcattgttgtggaattcacaactactcagactgggaaaatacagattggttcaaagaaaccaaaaaccagagtgtccctcttagctgctgcagagagactgccagcaattgtaatggcagcctggcccacccttccgacctctatgctgaggggtgtgaggctctagtagtgaagaagctacaagaaatcatgatgcatgtgatctgggccgcactggcatttgcagctattcagctgctgggcatgctgtgtgcttgcatcgtgttgtgcagaaggagtagagatcctgcttacgagctcctcatcactggcggaacctatgcatagttgacaactcaagcctgagctttttggtcttgttctgatttggaaggtgaattgagcaggtctgctgctgttggcctctggagttcatttagttaaagcacatgtacactggtgttggacagagcagcttggcttttcatgtgcccacctacttacctactacctgcgactttctttttccttgttctagctgactcttcatgcccctaagattttaagtacgatggtgaacgttctaatttcagaaccaattgcgagtcatgtagtgtggtagaattaaaggaggacacgagcctgcttctgttacctccaagtggtaacaggactgatgccgaaatgtcaccaggtcctttcagtcttcacagtggagaactcttggccaaaggtttttgcggggaggaggaggaaaccagctttctggttaaggttaacaccagatggtgcccctcattggtgtccttttaaaaaatatttactgtagtccaataagatagcagctgtacaaaatgactaaaatagattgtaggatcatatggcgtatatcttggttcatcttcaaaatcagagactgagctttgaaactagtggtttttaatcaaagttggctttataggaggagtataatgtatgcactactgttttaaaagaattagtgtgagtgtgtttttgtatgaatgagcccattcatggtaagtcttaagcttgttggaaataatgtacccatgtagactagcaaaatagtatgtagatgtgatctcagttgtaaatagaaaaatctaattcaataaactctgtatcagccccc

SEQ ID NO: 190386 - DNA, 1530 bp, Homo sapiens
  Payload ID: 17611
  Gene Name: tetraspanin 3
  Uniprot ID: O60637
  ENST ID: ENST00000424443
  CDS Start-End: 156-725
acttgctggggtcggggctgcgcgacggcgcaggggctgcggggagcgccgcgcaggccgtgcagttcctagcgaggaggcgccgccgccattgccgctctctcggtgagcgcagccccgctctccgggccgggccttcgcgggccaccggcgccatgggccagtgcggcatcacctcctccaagaccgtgctggtctttctcaacctcatcttctggtttgtcatcatcctgctcttggtttttgtcacagaagttgttgtagtggttttgggatatgtttacagagcaaaggtggaaaatgaggttgatcgcagcattcagaaagtgtataagacctacaatggaaccaaccctgatgctgctagccgggctattgattatgtacagagacagctgcattgttgtggaattcacaactactcagactgggaaaatacagattggttcaaagaaaccaaaaaccagagtgtccctcttagctgctgcagagagactgccagcaattgtaatggcagcctggcccacccttccgacctctatgctgaggggtgtgaggctctagtagtgaagaagctacaagaaatcatgatgcatgtgatctgggccgcactggcatttgcagctattcagctgctgggcatgctgtgtgcttgcatcgtgttgtgcagaaggagtagagatcctgcttacgagctcctcatcactggcggaacctatgcatagttgacaactcaagcctgagctttttggtcttgttctgatttggaaggtgaattgagcaggtctgctgctgttggcctctggagttcatttagttaaagcacatgtacactggtgttggacagagcagcttggcttttcatgtgcccacctacttacctactacctgcgactttctttttccttgttctagctgactcttcatgcccctaagattttaagtacgatggtgaacgttctaatttcagaaccaattgcgagtcatgtagtgtggtagaattaaaggaggacacgagcctgcttctgttacctccaagtggtaacaggactgatgccgaaatgtcaccaggtcctttcagtcttcacagtggagaactcttggccaaaggtttttgcggggaggaggaggaaaccagctttctggttaaggttaacaccagatggtgcccctcattggtgtccttttaaaaaatatttactgtagtccaataagatagcagctgtacaaaatgactaaaatagattgtaggatcatatggcgtatatcttggttcatcttcaaaatcagagactgagctttgaaactagtggtttttaatcaaagttggctttataggaggagtataatgtatgcactactgttttaaaagaattagtgtgagtgtgtttttgtatgaatgagcccattcatggtaagtcttaagcttgttggaaataatgtacccatgtagactagcaaaatagtatgtagatgtgatctcagttgtaaatagaaaaatctaattcaataaactctgtatcagccccc

SEQ ID NO: 190387 - DNA, 1326 bp, Homo sapiens
  Payload ID: 17611
  Gene Name: tetraspanin 3
  ENST ID: ENST00000559494
  CDS Start-End: 81-575
ggaggcgccgccgccattgccgctctctcggtgagcgcagccccgctctccgggccgggccttcgcgggccaccggcgccatgggccagtgcggcatcacctcctccaagaccgtgctggtctttctcaacctcatcttctgggtggaaaatgaggttgatcgcagcattcagaaagtgtataagacctacaatggaaccaaccctgatgctgctagccgggctattgattatgtacagagacagctgcattgttgtggaattcacaactactcagactgggaaaatacagattggttcaaagaaaccaaaaaccagagtgtccctcttagctgctgcagagagactgccagcaattgtaatggcagcctggcccacccttccgacctctatgctgaggggtgtgaggctctagtagtgaagaagctacaagaaatcatgatgcatgtgatctgggccgcactggcatttgcagctattcagctgctgggcatgctgtgtgcttgcatcgtgttgtgcagaaggagtagagatcctgcttacgagctcctcatcactggcggaacctatgcatagttgacaactcaagcctgagctttttggtcttgttctgatttggaaggtgaattgagcaggtctgctgctgttggcctctggagttcatttagttaaagcacatgtacactggtgttggacagagcagcttggcttttcatgtgcccacctacttacctactacctgcgactttctttttccttgttctagctgactcttcatgcccctaagattttaagtacgatggtgaacgttctaatttcagaaccaattgcgagtcatgtagtgtggtagaattaaaggaggacacgagcctgcttctgttacctccaagtggtaacaggactgatgccgaaatgtcaccaggtcctttcagtcttcacagtggagaactcttggccaaaggtttttgcggggaggaggaggaaaccagctttctggttaaggttaacaccagatggtgcccctcattggtgtccttttaaaaaatatttactgtagtccaataagatagcagctgtacaaaatgactaaaatagattgtaggatcatatggcgtatatcttggttcatcttcaaaatcagagactgagctttgaaactagtggtttttaatcaaagttggctttataggaggagtataatgtatgcactactgttttaaaagaattagtgtgagtgtgtttttgtatgaatgagcccattcatggtaagtcttaagcttgttggaaataatgtacccatgtagactagcaaaatagtatgtagatg

SEQ ID NO: 190388 - DNA, 1592 bp, Homo sapiens
  Payload ID: 17611
  Gene Name: tetraspanin 3
  ENST ID: ENST00000561277
  CDS Start-End: 680-817
ggaggagcgaggcacttgctggggtcggggctgcgcgacggcgcaggggctgcggggagcgccgcgcaggccgtgcagttcctagcgaggaggcgccgccgccattgccgctctctcgggggcagctggcattttatgctatgtgggagcctatgtcttcatcacttatgatgactatgaccacttctttgaagatgtgtacacgctcatccctgctgtagtgatcatagctgtaggagccctgcttttcatcattgggctaattggctgctgtgccacaatccgggaaagtcgctgtggacttgccacgtttgtcatcatcctgctcttggtttttgtcacagaagttgttgtagtggttttgggatatgtttacagagcaaaggtggaaaatgaggttgatcgcagcattcagaaagtgtataagacctacaatggaaccaaccctgatgctgctagccgggctattgattatgtacagagacagctgcattgttgtggaattcacaactactcagactgggaaaatacagattggttcaaagaaaccaaaaaccagagtgtccctcttagctgctgcagagagactgccagcaattgtaatggcagcctggcccacccttccgacctctatgctgaggggtgtgaggctctagtagtgaagaagctacaagaaatcatgatgcatgtgatctgggccgcactggcatttgcagctattcagctgctgggcatgctgtgtgcttgcatcgtgttgtgcagaaggagtagagatcctgcttacgagctcctcatcactggcggaacctatgcatagttgacaactcaagcctgagctttttggtcttgttctgatttggaaggtgaattgagcaggtctgctgctgttggcctctggagttcatttagttaaagcacatgtacactggtgttggacagagcagcttggcttttcatgtgcccacctacttacctactacctgcgactttctttttccttgttctagctgactcttcatgcccctaagattttaagtacgatggtgaacgttctaatttcagaaccaattgcgagtcatgtagtgtggtagaattaaaggaggacacgagcctgcttctgttacctccaagtggtaacaggactgatgccgaaatgtcaccaggtcctttcagtcttcacagtggagaactcttggccaaaggtttttgcggggaggaggaggaaaccagctttctggttaaggttaacaccagatggtgcccctcattggtgtccttttaaaaaatatttactgtagtccaataagatagcagctgtacaaaatgactaaaatagattgtaggatcatatggcgtatatcttggttcatcttcaaaatcagagactgagctttgaaactagtggtttttaatcaaagttggctttataggaggagtataatgtatgcactactgttttaaaagaattagtgtgagtgtgtttttgtatgaatgagcccattcatggtaagtcttaagcttgttggaaataatgtacccatgtagactagcaaaatagtatgtagatgtgatctcagttgtaaatagaaaaa

SEQ ID NO: 190389 - DNA, 1340 bp, Homo sapiens
  Payload ID: 17611
  Gene Name: tetraspanin 3
  ENST ID: ENST00000558745
  CDS Start-End: 700-837
gactgggtaggtggcaagcctgagtgatcggagagaagccgggacggatgcaaatgcagagcccgctggcagaggcgcagaggcaccgaccgaccgaccaaccggagcgaggaggcccccagagacagccgccgccctggggcagctggcattttatgctatgtgggagcctatgtcttcatcacttatgatgactatgaccacttctttgaagatgtgtacacgctcatccctgctgtagtgatcatagctgtaggagccctgcttttcatcattgggctaattggctgctgtgccacaatccgggaaagtcgctgtggacttgccacgtttgtcatcatcctgctcttggtttttgtcacagaagttgttgtagtggttttgggatatgtttacagagcaaaggtggaaaatgaggttgatcgcagcattcagaaagtgtataagacctacaatggaaccaaccctgatgctgctagccgggctattgattatgtacagagacagctgcattgttgtggaattcacaactactcagactgggaaaatacagattggttcaaagaaaccaaaaaccagagtgtccctcttagctgctgcagagagactgccagcaattgtaatggcagcctggcccacccttccgacctctatgctgaggggtgtgaggctctagtagtgaagaagctacaagaaatcatgatgcatgtgatctgggccgcactggcatttgcagctattcagctgctgggcatgctgtgtgcttgcatcgtgttgtgcagaaggagtagagatcctgcttacgagctcctcatcactggcggaacctatgcatagttgacaactcaagcctgagctttttggtcttgttctgatttggaaggtgaattgagcaggtctgctgctgttggcctctggagttcatttagttaaagcacatgtacactggtgttggacagagcagcttggcttttcatgtgcccacctacttacctactacctgcgactttctttttccttgttctagctgactcttcatgcccctaagattttaagtacgatggtgaacgttctaatttcagaaccaattgcgagtcatgtagtgtggtagaattaaaggaggacacgagcctgcttctgttacctccaagtggtaacaggactgatgccgaaatgtcaccaggtcctttcagtcttcacagtggagaactcttggccaaaggtttttgcggggaggaggaggaaaccagctttctggttaaggttaacaccagatggtgcccctcattggtgtccttttaaaaaatatttactgtagtccaataagatagcagctgtac

SEQ ID NO: 190390 - DNA, 1849 bp, Homo sapiens
  Payload ID: 17612
  Gene Name: tetraspanin 31
  Uniprot ID: Q12999
  ENST ID: ENST00000257910
  CDS Start-End: 275-907
agttttaagtttcgcccaatgaaaaaacaaaaggagagggacagaaggcgggtcggtgacgtaatgcgggttgattggcatgcaggccttggacgtccaggattagccacgcatttcgccaatccagaggcaggggagggacggtgcaggcgcagagtattgggtttggctggcctcgatttaaagagacagaagctgtcggggtcctggaagacggtccccaataccctccccccaagtccttgggaccacttgggtccccagagctggggagatggtttgtggcggctttgcctgctccaagaatgcgctttgcgctctcaacgtggtctacatgctggtgagcttgttgctcattggagtggctgcttggggcaagggcctgggtctggtgtccagcatccacatcatcggcggagtcattgctgtgggagtcttccttctccttattgcagtggctggactggtgggtgctgtcaaccaccaccaagtcctgctgttcttttacatgatcatccttggtttggtcttcatcttccaatttgtaatctcttgctcatgtctggctattaaccgaagcaaacagacagatgtcatcaatgcttcttggtgggtcatgagcaacaagactcgggatgaactggaaagaagttttgattgttgtggcttattcaacctcacaaccctgtatcaacaagattatgatttctgcactgcaatctgcaagagccagagccccacatgccagatgtgtggagaaaagtttcttaagcattcagacgaagccctgaaaatcctagggggtgttggactcttctttagctttacagagatccttggtgtttggctagcaatgagatttcggaatcagaaggatcctagagccaaccccagtgcctttctatgagactttggatccttctgacttttcttctgctctctctaagctttctcttcctcccttagggaatatctagggtctgtaaccgttttggtttgagaaaaaggaaaggccccttgtcacatcctctaaaattgatggaatagcaagactttatgccttgacatattttagtgggagccagactataaggaataaaaggaaaaactttcttcctctctctccaagaggatatgggaagcttctgtgagtgcataggatgggggctggagtcattcttagctgtttcccttcctctgtccatatactggatcacctcaacataccctggtgtggctctaagggtaaatcagggatagggccaaggagaaaacaaccaagaactctttcctgtaataagcaggatccagtttgagaaagtttagcgaatataaaagtaaaagccatttaaaaatctatattctttttttttttttgacacagagtcttgctctgttgcccaggctggagtgcaatggcatgatctcggctcaccgcaacctctgcctcccgggttcaagcgatcctcctgcctcagtctcccaagtagctgggattacaggtgtgcaccaccacgcctgactaattttgtatttttagtagagacagggtttcaccatgttagtcaggctggtctcgaactcctgacctcaggtgatccacccgcgttggcctcccaacgtgctgggattataggcgtgagccaccacgccccgcctaaaatccatattcaaagaagcaatttcagttcctttctaagctttgtcagtcaaggggctccactgacttcctaggccctgtaatttaaccagtctttaaggttttgcaggaaagtcccttcttccaagtggtttttccaaatcgcacaatggcaaagccaaacagaggaagaaacattaaaaaaaaaaa

SEQ ID NO: 190391 - DNA, 820 bp, Homo sapiens
  Payload ID: 17612
  Gene Name: tetraspanin 31
  ENST ID: ENST00000553089
  CDS Start-End: 117-503
attgggtttggctggcctcgatttaaagagacagaagctgtcggggtcctggaagacggtccccaataccctccccccaagtccttgggaccacttgggtccccagagctggggagatggtttgtggcggctttgcctgctccaagaatgcgctttgcgctctcaacgtggtctacatgctggtgagcttgttgctcattggagtggctgcttggggcaagggcctgggtctggtgtccagcatccacatcatcggcggagtcattgctgtgggagtcttccttctccttattgcagtggctggactggtgggtgctgtcaaccaccaccaagtcctgctgttcttttacatgatcatccttggtttggtcttcatcttccaatttgtaatctcttgctcatgtctggctattaaccgaagcaaacagatcatccttaggtgcactgcttctggcctcttgggctatttgcttcctctgggatgtctggttaattttccatgaggatgatctagagaacctcaaaagacagatgtcatcaatgcttcttggtgggtcatgagcaacaagactcgggatgaactggaaagaagttttgattgttgtggcttattcaacctcacaaccctgtatcaacaagattatgatttctgcactgcaatctgcaagagccagagccccacatgccagatgtgtggagaaaagtttcttaagcattcagacgaagccctgaaaatcctagggggtgttggactcttctttagctttacagaggtaacattctccagttccctcacacacatcctttttgagactgagaa

SEQ ID NO: 190392 - DNA, 3434 bp, Homo sapiens
  Payload ID: 17612
  Gene Name: tetraspanin 31
  ENST ID: ENST00000547992
  CDS Start-End: 133-513
ggtgcaggcgcagagtattgggtttggctggcctcgatttaaagagacagaagctgtcggggtcctggaagacggtccccaataccctccccccaagtccttgggaccacttgggtccccagagctggggagatggtttgtggcggctttgcctgctccaagaatgcgctttgcgctctcaacgtggtctacatgctggtgagcttgttgctcattggagtggctgcttggggcaagggcctgggtctggtgtccagcatccacatcatcggcggagtcattgctgtgggagtcttccttctccttattgcagtggctggactgatctgcaagagccagagccccacatgccagatgtgtggagaaaagtttcttaagcattcagacgaagccctgaaaatcctagggggtgttggactcttctttagctttacagagatccttggtgtttggctagcaatgagatttcggaatcagaaggatcctagagccaaccccagtgcctttctatgagactttggatccttctgacttttcttctgctctctctaagctttctcttcctcccttagggaatatctagggtctgtaaccgttttggtttgagaaaaaggaaaggccccttgtcacatcctctaaaattgatggaatagcaagactttatgccttgacatattttagtgggagccagactataaggaataaaaggaaaaactttcttcctctctctccaagaggatatgggaagcttctgtgagtgcataggatgggggctggagtcattcttagctgtttcccttcctctgtccatatactggatcacctcaacataccctggtgtggctctaagggtaaatcagggatagggccaaggagaaaacaaccaagaactctttcctgtaataagcaggatccagtttgagaaagtttagcgaatataaaagtaaaagccatttaaaaatctatattctttttttttttttgacacagagtcttgctctgttgcccaggctggagtgcaatggcatgatctcggctcaccgcaacctctgcctcccgggttcaagcgatcctcctgcctcagtctcccaagtagctgggattacaggtgtgcaccaccacgcctgactaattttgtatttttagtagagacagggtttcaccatgttagtcaggctggtctcgaactcctgacctcaggtgatccacccgcgttggcctcccaacgtgctgggattataggcgtgagccaccacgccccgcctaaaatccatattcaaagaagcaatttcagttcctttctaagctttgtcagtcaaggggctccactgacttcctaggccctgtaatttaaccagtctttaaggttttgcaggaaagtcccttcttccaagtggtttttccaaatcgcacaatggcaaagccaaacagaggaagaaacattaaaaaaaaaaaaaagaccattatttctttgttttgtttttcctgtataaaaaaggaccccaaatataaaggtagggaaagggacaagagggaacataccccttagtgtagagaaatgggaaggagaaggagaagcctcaaaaggagaggtgggaggggaatgtcattaaggcagcaaagtaatctctgtagaaagatggaggaggaccctccatagcctcagagataaaggcaaagattgccctctcagtgtccagaagggaaatggcagcttttcttccttccatggcagccactccattgctcactccggattaccttcatccttatgtagataagagtgctgcagagctcgaaaggcagagattcgcttgtgtgggttaaaagtcagcatttcctgaggggagaggcaaaggtcagaaaaccatgaagaaaacagacttctgcccacccacaacaatacctgggatgagctttcttcttttttctttttttttttttttgagacggagtctcgctctatcacccaggctggagtgcaatggtatgatctcagctcactgcaacctccgcctcctgagttgaagtgattctcctatctcagcctcccaagtagctgagattacaggcgtgtgccaccacccccggcttatttttgtacttttagtagagacgaggtttcaccatgttggccaggctggtctcgaactcctgacctcaggtgatacgcccaccttggcctcccaaagtgctgggattacaggcgtgagccaccgtgcccagccaggatgggttctcttctatatccttctctgtgggtggctatttgcagctgtaataaaaactacagcccatctaccaaccaagtttcattaaccacagtggccagggccctgcatactgctctatttctttccccagtctctatttctttccctgtgcccacagccatctccagtaccagcagcagctgtgctcccgactcctccatctcaggtaccaccgactgcactgggcggggccctctggggggaaaggctccacggggcagggatacatctcgaggccagtcatcctctggaggcagcccaatcaggctgtgggggacaggagaactctggtcaggagggtcctccagttcccatccccatgggcagagccagttgccatcctgggttcagcagaaagaggactcagaatagaaaatctttttctcccatgttggtcacttactcaaagattttgcccaactggtcggcttcagagtttccacagaagagaggcctaaggtgagaagggatataaggtagcagtcattttcaaagatatcttagttgaatggttactgcttagtggctcaaaataggaagtatagggaataaaggccaacaattccagcactttgggatgctgaggtgagaggactgcttgagcccaggagttctagatcagcctgggcaagcaagaccttgtctctttttttaaaaaaaaagaaatgccaggtgcagcggctcacgcctgtaatcctagcactttgggagtctgatgtgggtggatcatgaggtcaagagatcgagaccatcctggccaacatggtgaaaccctgtcattactaaaagtacaaaaattagctgagcatggtggcgtgcacctgtggtcccagctacttgggaggctgagtcaagagaattgcttgaatctgggaggtggaggttgcagtgagcagagatcgcactactgcactccagcctggcgacagagcaagactccatctaaaaaaaaaaaaagccagtcatggtggcgtgcacctgtagtctcagctactcaagaggctgagatgggaggattgctttagcccaggaggtagaggctacagtgagctgtaattgggccactgcactccagcctgggtgacagagtgaaaccttatctcaataaataaataaataaataaataaataaataaataaataaataaaaaataaagagaa

SEQ ID NO: 190393 - DNA, 488 bp, Homo sapiens
  Payload ID: 17612
  Gene Name: tetraspanin 31
  ENST ID: ENST00000548167
  CDS Start-End: 230-488
ttccggttgattaagggggtttgtctgagggtgggggaatgaactgaaggccgtgggcctggtgagcttgttgctcattggagtggctgcttggggcaagggcctgggtctggtgtccagcatccacatcatcggcggagtcattgctgtgggagtcttccttctccttattgcagtggctggactggtgggtgctgtcaaccaccaccaagtcctgctgttcttttacatgatcatccttggtttggtcttcatcttccaatttgtaatctcttgctcatgtctggctattaaccgaagcaaacagacagatgtcatcaatgcttcttggtgggtcatgagcaacaagactcgggatgaactggaaagaagttttgattgttgtggcttattcaacctcacaaccctgtatcaacaagattatgatttctgcactgcaatctgcaagagccagagccccacatgccagatgtgtggagaaaagtttc

SEQ ID NO: 190394 - DNA, 475 bp, Homo sapiens
  Payload ID: 17612
  Gene Name: tetraspanin 31
  ENST ID: ENST00000547472
  CDS Start-End: 90-473
gagacagaagctgtcggggtcctggaagacggtccccaataccctccccccaagtccttgggaccacttgggtccccagagctggggagatggtttgtggcggctttgcctgctccaagaatgcgctttgcgctctcaacgtggtctacatgacagatgtcatcaatgcttcttggtgggtcatgagcaacaagactcgggatgaactggaaagaagttttgattgttgtggcttattcaacctcacaaccctgtatcaacaagattatgatttctgcactgcaatctgcaagagccagagccccacatgccagatgtgtggagaaaagtttcttaagcattcagacgaagccctgaaaatcctagggggtgttggactcttctttagctttacagagatccttggtgtttggctagcaatgagatttcggaatcagaaggatcctagagccaaccccagtgcctttctatgaga

SEQ ID NO: 190395 - DNA, 582 bp, Homo sapiens
  Payload ID: 17612
  Gene Name: tetraspanin 31
  ENST ID: ENST00000552816
  CDS Start-End: 365-582
attgggtttggctggcctcgatttaaagagacagaagctgtcggggtcctggaagacggtccccaataccctccccccaagtccttgggaccacttgggtccccagagctggggagatggtttgtggcggctttgcctgctccaagaatgcgctttgcgctctcaacgtggtctacatggtgaggttttggagctggtgagcttgttgctcattggagtggctgcttggggcaagggcctgggtctggtgtccagcatccacatcatcggcggagtcattgctgtgggagtcttccttctccttattgcagtggctggactggtgggtgctgtcaaccaccaccaagtcctgctgttcttttacatgatcatccttggtttggtcttcatcttccaatttgtaatctcttgctcatgtctggctattaaccgaagcaaacagacagatgtcatcaatgcttcttggtgggtcatgagcaacaagactcgggatgaactggaaagaagttttgattgttgtggcttattcaacctcacaaccctgtatcaacaagattatgatttctgcactgcaatctgcaa

SEQ ID NO: 190396 - DNA, 1100 bp, Homo sapiens
  Payload ID: 17612
  Gene Name: tetraspanin 31
  ENST ID: ENST00000549052
  CDS Start-End: 106-447
ctggcctcgatttaaagagacagaagctgtcggggtcctggaagacggtccccaataccctccccccaagtccttgggaccacttgggtccccagagctggggagatggtttgtggcggctttgcctgctccaagaatgcgctttgcgctctcaacgtggtctacatgctggtgagcttgttgctcattggagtggctgcttggggcaagggcctgggtctggtgtccagcatccacatcatcggcggagtcattgctgtgggagtcttccttctccttattgcagtggctggactggtgggtgctgtcaaccaccaccaagtcctgctgttcttttacatgatcatccttggtttggtcttcatcttccaatttgtaatctcttgctcatgtctggctattaaccgaagcaaacagatgtcatcaatgcttcttggtgggtcatgagcaacaagactcgggatgaactggaaagaagttttgattgttgtggcttattcaacctcacaaccctgtatcaacaagattatgatttctgcactgcaatctgcaagagccagagccccacatgccagatgtgtggagaaaagtttcttaagcattcagacgaagccctgaaaatcctagggggtgttggactcttctttagctttacagagatccttggtgtttggctagcaatgagatttcggaatcagaaggatcctagagccaaccccagtgcctttctatgagactttggatccttctgacttttcttctgctctctctaagctttctcttcctcccttagggaatatctagggtctgtaaccgttttggtttgagaaaaaggaaaggccccttgtcacatcctctaaaattgatggaatagcaagactttatgccttgacatattttagtgggagccagactataaggaataaaaggaaaaactttcttcctctctctccaagaggatatgggaagcttctgtgagtgcataggatgggggctggagtcattcttagctgtttcccttcctctgtccatatactggatcacctcaacataccctggtgtggctctaagggtaaatcagggatagggccaaggagaaa

SEQ ID NO: 190397 - DNA, 1318 bp, Homo sapiens
  Payload ID: 17613
  Gene Name: tetraspanin 32
  Uniprot ID: Q96QS1
  ENST ID: ENST00000182290
  CDS Start-End: 138-1100
agggcgatgttgacagacagacagaggggcggatgcagcctacctcctgggcagtgagctgcggtctgaggcccctgcccagctggaaaccacagggaggggaagggaggggaggagaggagaggagaggaaccgtcatggggccttggagtcgagtcagggttgccaaatgccagatgctggtcacctgcttctttatcttgctgctgggcctctctgtggccaccatggtgactcttacctacttcggggcccactttgctgtcatccgccgagcgtccctggagaagaacccgtaccaggctgtgcaccaatgggccttctctgcggggttgagcctggtgggcctcctgactctgggagccgtgctgagcgctgcagccaccgtgagggaggcccagggcctcatggcagggggcttcctgtgcttctccctggcgttctgcgcacaggtgcaggtggtgttctggagactccacagccccacccaggtggaggacgccatgctggacacctacgacctggtatatgagcaggcgatgaaaggtacgtcccacgtccggcggcaggagctggcggccatccaggacgtgtttctgtgctgtgggaagaagtctcctttcagccgtctggggagcacagaggctgacctgtgtcagggagaggaggcggcgagagaggactgccttcagggcatccggagcttcctgaggacacaccagcaggtcgcctccagcctgaccagcatcggcctggccctcacggtgtccgccttgctcttcagctccttcctgtggtttgccatccgctgtggctgcagcttggaccgcaagggcaaatacaccctgaccccacgagcatgtggccgccagccccaggagcccagcctcttgagatgctcccagggtggacccacacattgtctccactccgaagcagttgctattggtccaagaggatgctcgggtagtcttcggtggctgcaggagagcgatgctgcgcctctgcccctctcctgccacctggctgcccacagagctctccagggcagaagtcgcggtgggctcagtgggtgccctgagcggggtctctcagactgacgtcaggccttggtgggctgcactctcacctggaggctccggggaagcatctgcctccaggaccattcaggctgttgacaagtcaactcctcatggctgtaggactgaggttcccaagtccttgtccctggtcctgtggtccctccaccttcaaaccagcaatggtgcattgagcaaattgtggtcaaatatacatcacatcaaatttaccatcttaa

SEQ ID NO: 190398 - DNA, 1202 bp, Homo sapiens
  Payload ID: 17613
  Gene Name: tetraspanin 32
  ENST ID: ENST00000339046
  CDS Start-End: 104-535
cgggaatccctgcagctgagcctgtctctcacgggaccgggaagctggagagagccccaaccctgcccgctggggccgagctccctgctcctgcagcagtcccatgccccacactctgagtctgccctatccacagctgctgggcctctctgtggccaccatggtgactcttacctacttcggggcccactttgctgtcatccgccgagcgtccctggagaagaacccgtaccaggctgtgcaccaatgggccttctctgcggggttgagcctggtgggcctcctgactctgggagccgtgctgagcgctgcagccaccgtgagggaggcccagggcctcatggcagggggcttcctgtgcttctccctggcgttctgcgcacaggtgcaggtggtgttctggagactccacagccccacccaggtggaggacgccatgctggacacctacgacctggtatatgagcaggcgatgaaagtttctgtgctgtgggaagaagtctcctttcagccgtctggggagcacagaggctgacctgtgtcagggagaggaggcggcgagagaggactgccttcagggcatccggagcttcctgaggacacaccagcaggtcgcctccagcctgaccagcatcggcctggccctcacggtgtccgccttgctcttcagctccttcctgtggtttgccatccgctgtggctgcagcttggaccgcaagggcaaatacaccctgaccccacgcatgtggccgccagccccaggagcccagcctcttgagatgctcccagggtggacccacacattgtctccactccgaagcagttgctattggtccaagaggatgctcgggtagtcttcggtggctgcaggagagcgatgctgcgcctctgcccctctcctgccacctggctgcccacagagctctccagggcagaagtcgcggtgggctcagtgggtgccctgagcggggtctctcagactgacgtcaggccttggtgggctgcactctcacctggaggctccggggaagcatctgcctccaggaccattcaggctgttgacaagtcaactcctcatggctgtaggactgaggttcccaagtccttgtccctggtcctgtggtccctccaccttcaaaccagcaatggtgcattgagcaaattgtggtcaaatatacatcacatcaaatttaccatcttaa

SEQ ID NO: 190399 - DNA, 798 bp, Homo sapiens
  Payload ID: 17613
  Gene Name: tetraspanin 32
  ENST ID: ENST00000381117
  CDS Start-End: 1-798
atggtgactcttacctacttcggggcccactttgctgtcatccgccgagcgtccctggagaagaacccgtaccaggctgtgcaccaatgggccttctctgcggggttgagcctggtgggcctcctgactctgggagccgtgctgagcgctgcagccaccgtgagggaggcccagggcctcatggcaggggtggaggacgccatgctggacacctacgacctggtatatgagcaggcgatgaaaggtacgtcccacgtccggcggcaggagctggcggccatccaggacgtgtttctgtgctgtgggaagaagtctcctttcagccgtctggggagcacagaggctgacctgtgtcagggagaggaggcggcgagagaggactgccttcagggcatccggagcttcctgaggacacaccagcaggtcgcctccagcctgaccagcatcggcctggccctcacggtgtccgccttgctcttcagctccttcctgtggtttgccatccgctgtggctgcagcttggaccgcaagggcaaatacaccctgaccccacgagcatgtggccgccagccccaggagcccagcctcttgagatgctcccagggtggacccacacattgtctccactccgaagcagttgctattggtccaagaggatgctcgggtagtcttcggtggctgcaggagagcgatgctgcgcctctgcccctctcctgccacctggctgcccacagagctctccagggcagaagtcgcggtgggctcagtgggtgccctgagcggggtctctcagactga

SEQ ID NO: 190400 - DNA, 999 bp, Homo sapiens
  Payload ID: 17613
  Gene Name: tetraspanin 32
  Uniprot ID: Q96QS1
  ENST ID: ENST00000381121
  CDS Start-End: 1-762
atggggccttggagtcgagtcagggttgccaaatgccagatgctggtcacctgcttctttatcttgctgctgggcctctctgtggccaccatggtgactcttacctacttcggggcccactttgctgtcatccgccgagcgtccctggagaagaacccgtaccaggctgtgcaccaatgggccttctctgcggggttgagcctggtgggcctcctgactctgggagccgtgctgagcgctgcagccaccgtgagggaggcccagggcctcatggcagggggcttcctgtgcttctccctggcgttctgcgcacaggtgcaggtggtgttctggagactccacagccccacccaggtggaggacgccatgctggacacctacgacctggtatatgagcaggcgatgaaaggtacgtcccacgtccggcggcaggagctggcggccatccaggacgtgtttctgtgctgtgggaagaagtctcctttcagccgtctggggagcacagaggctgacctgtgtcagggagaggaggcggcgagagaggactgccttcagggcatccggagcttcctgaggacacaccagcaggtcgcctccagcctgaccagcatcggcctggccctcacggtgtccgccttgctcttcagctccttcctgtggtttgccatccgctgtggctgcagcttggaccgcaagggcaaatacaccctgaccccacgctctccagggcagaagtcgcggtgggctcagtgggtgccctgagcggggtctctcagactgacgtcaggccttggtgggctgcactctcacctggaggctccggggaagcatctgcctccaggaccattcaggctgttgacaagtcaactcctcatggctgtaggactgaggttcccaagtccttgtccctggtcctgtggtccctccaccttcaaaccagcaatggtgcattgagcaaattgtggtcaaatatacatcacatcaaatttaccatcttaa

SEQ ID NO: 190401 - DNA, 1262 bp, Homo sapiens
  Payload ID: 17613
  Gene Name: tetraspanin 32
  Uniprot ID: Q96QS1
  ENST ID: ENST00000446063
  CDS Start-End: 138-914
agggcgatgttgacagacagacagaggggcggatgcagcctacctcctgggcagtgagctgcggtctgaggcccctgcccagctggaaaccacagggaggggaagggaggggaggagaggagaggagaggaaccgtcatggggccttggagtcgagtcagggttgccaaatgccagatgctggtcacctgcttctttatcttgctgctgggcctctctgtggccaccatggtgactcttacctacttcggggcccactttgctgtcatccgccgagcgtccctggagaagaacccgtaccaggctgtgcaccaatgggccttctctgcggggttgagcctggtgggcctcctgactctgggagccgtgctgagcgctgcagccaccgtgagggaggcccagggcctcatggcagggggcttcctgtgcttctccctggcgttctgcgcacaggtgcaggtggtgttctggagactccacagccccacccaggtggaggacgccatgctggacacctacgacctggtatatgagcaggcgatgaaaggtacgtcccacgtccggcggcaggagctggcggccatccaggacgtgtttctgtgctgtgggaagaagtctcctttcagccgtctggggagcacagaggctgacctgtgtcagggagaggaggcggcgagagaggactgccttcagggcatccggagcttcctgaggacacaccagcaggtcgcctccagcctgaccagcatcggcctggccctcacgcttggaccgcaagggcaaatacaccctgaccccacgagcatgtggccgccagccccaggagcccagcctcttgagatgctcccagggtggacccacacattgtctccactccgaagcagttgctattggtccaagaggatgctcgggtagtcttcggtggctgcaggagagcgatgctgcgcctctgcccctctcctgccacctggctgcccacagagctctccagggcagaagtcgcggtgggctcagtgggtgccctgagcggggtctctcagactgacgtcaggccttggtgggctgcactctcacctggaggctccggggaagcatctgcctccaggaccattcaggctgttgacaagtcaactcctcatggctgtaggactgaggttcccaagtccttgtccctggtcctgtggtccctccaccttcaaaccagcaatggtgcattgagcaaattgtggtcaaatatacatcacatcaaatttaccatcttaa

SEQ ID NO: 190402 - DNA, 734 bp, Homo sapiens
  Payload ID: 17613
  Gene Name: tetraspanin 32
  ENST ID: ENST00000437313
  CDS Start-End: 154-567
ccagcagctcggtcctagggcgatgttgacagacagacagaggggcggatgcagcctacctcctgggcagtgagctgcggtctgaggcccctgcccagctggaaaccacagggaggggaagggaggggaggagaggagaggagaggaaccgtcatggggccttggagtcgagtcagggttgccaaatgccagatgctggtcacctgcttctttatcttggtaacagctgctgggcctctctgtggccaccatggtgactcttacctacttcggggcccactttgctgtcatccgccgagcgtccctggagaagaacccgtaccaggctgtgcaccaatgggccttctctgcggggttgagcctggtgggcctcctgactctgggagccgtgctgagcgctgcagccaccgtgagggaggcccagggcctcatggcagggggcttcctgtgcttctccctggcgttctgcgcacaggtgcaggtggtgttctggagactccacagccccacccagcacccatccttccgtcctggatgctgacctgcctggaggagggtccggcctagctgaccgtgggcaggggccaagggcgtccccgtggaaaggccagcagcttggagaggaaggaggcctccctggcccagcagagaatgagagctcggtagcagagccagccccaccttccccttgagagccagacctggcccagaaggatcccagaggggctgagccc

SEQ ID NO: 190403 - DNA, 1236 bp, Homo sapiens
  Payload ID: 17613
  Gene Name: tetraspanin 32
  ENST ID: ENST00000451520
  CDS Start-End: 89-1018
ctgagcctgtctctcacgggaccgggaagctggagagagccccaaccctgcccgctggggccgagctccctgctcctgcagcagtcccatgccccacactctgagtctgccctatccacagctgctgggcctctctgtggccaccatggtgactcttacctacttcggggcccactttgctgtcatccgccgagcgtccctggagaagaacccgtaccaggctgtgcaccaatgggccttctctgcggggttgagcctggtgggcctcctgactctgggagccgtgctgagcgctgcagccaccgtgagggaggcccagggcctcatggcagggggcttcctgtgcttctccctggcgttctgcgcacaggtgcaggtggtgttctggagactccacagccccacccaggtggaggacgccatgctggacacctacgacctggtatatgagcaggcgatgaaaggtacgtcccacgtccggcggcaggagctggcggccatccaggacgtgtttctgtgctgtgggaagaagtctcctttcagccgtctggggagcacagaggctgacctgtgtcagggagaggaggcggcgagagaggactgccttcagggcatccggagcttcctgaggacacaccagcaggtcgcctccagcctgaccagcatcggcctggccctcacggtgtccgccttgctcttcagctccttcctgtggtttgccatccgctgtggctgcagcttggaccgcaagggcaaatacaccctgaccccacgagcatgtggccgccagccccaggagcccagcctcttgagatgctcccagggtggacccacacattgtctccactccgaagcagttgctattggtccaagaggatgctcgggtagtcttcggtggctgcaggagagcgatgctgcgcctctgcccctctcctgccacctggctgcccacagagctctccagggcagaagtcgcggtgggctcagtgggtgccctgagcggggtctctcagactgacgtcaggccttggtgggctgcactctcacctggaggctccggggaagcatctgcctccaggaccattcaggctgttgacaagtcaactcctcatggctgtaggactgaggttcccaagtccttgtccctggtcctgtggtccctccaccttcaaaccagcaatggtgcattgagcaaattgtggtcaaatatacatcacatcaaatttaccatcttaa

SEQ ID NO: 190404 - DNA, 1301 bp, Homo sapiens
  Payload ID: 17613
  Gene Name: tetraspanin 32
  ENST ID: ENST00000612299
  CDS Start-End: 228-1025
agggcgatgttgacagacagacagaggggcggatgcagcctacctcctgggcagtgagctgcggtctgaggcccctgcccagctggaaaccacagggaggggaagggaggggaggagaggagaggagaggaaccgtcatggggccttggagtcgagtcagggttgccaaatgccagatgctggtcacctgcttctttatcttgctgctgggcctctctgtggccaccatggtgactcttacctacttcggggcccactttgctgtcatccgccgagcgtccctggagaagaacccgtaccaggctgtgcaccaatgggccttctctgcggggttgagcctggtgggcctcctgactctgggagccgtgctgagcgctgcagccaccgtgagggaggcccagggcctcatggcaggggtggaggacgccatgctggacacctacgacctggtatatgagcaggcgatgaaaggtacgtcccacgtccggcggcaggagctggcggccatccaggacgtgtttctgtgctgtgggaagaagtctcctttcagccgtctggggagcacagaggctgacctgtgtcagggagaggaggcggcgagagaggactgccttcagggcatccggagcttcctgaggacacaccagcaggtcgcctccagcctgaccagcatcggcctggccctcacggtgtccgccttgctcttcagctccttcctgtggtttgccatccgctgtggctgcagcttggaccgcaagggcaaatacaccctgaccccacgagcatgtggccgccagccccaggagcccagcctcttgagatgctcccagggtggacccacacattgtctccactccgaagcagttgctattggtccaagaggatgctcgggtagtcttcggtggctgcaggagagcgatgctgcgcctctgcccctctcctgccacctggctgcccacagagctctccagggcagaagtcgcggtgggctcagtgggtgccctgagcggggtctctcagactgacgtcaggccttggtgggctgcactctcacctggaggctccggggaagcatctgcctccaggaccattcaggctgttgacaagtcaactcctcatggctgtaggactgaggttcccaagtccttgtccctggtcctgtggtccctccaccttcaaaccagcaatggtgcattgagcaaattgtggtcaaatatacatcacatcaaatttaccatcttaaccattgttaagtgtatggtttgtggcattaaatacattcacattgttgtgcaaccatc

SEQ ID NO: 190405 - DNA, 1863 bp, Homo sapiens
  Payload ID: 17614
  Gene Name: tetraspanin 33
  Uniprot ID: Q86UF1
  ENST ID: ENST00000486685
  CDS Start-End: 90-941
ctcggctcatgcccccgggcgcggggcacacaggccggccggcagccgctgggaaataggcccccgggggcggtggcggcggcggggccatggcgcggagaccccgggcgccggccgcctccggggaggagttctccttcgtcagcccgctggtgaaatacctgctcttcttcttcaacatgctcttctgggtgatttccatggtgatggtggctgtgggtgtctacgctcggctaatgaagcatgcagaagcagccctagcctgcctggcagtggaccctgccatcctgctgatcgtggtgggtgtcctcatgttcctgctcaccttctgtggctgcattgggtccctccgcgagaacatctgcctcctgcagacgttctccctctgcctcaccgctgtgttcctgctgcagctggccgctgggatcctgggcttcgtcttctcagacaaggctcgagggaaagtgagtgagatcatcaacaatgccattgtgcactaccgagatgacttggatctgcagaacctcattgattttggccagaaaaagtttagctgctgtggagggatttcctacaaggactggtctcagaacatgtatttcaactgctcagaagacaaccccagtcgagagcgctgctctgtgccttactcctgttgcttgcctactcctgaccaggcagtgatcaacactatgtgtggccaaggtatgcaggcctttgactacttggaagctagcaaagtcatctacaccaatggctgtattgacaagttggtcaactggatacacagcaacctattcttacttggtggtgtggctctaggcctggccatcccccagctggtgggaattctgctgtcccagatcctagtgaatcagatcaaagatcagatcaagctacagctctacaaccagcagcaccgggctgacccatggtactgagaatccatcctgcacctcctcaccatggaaactggcaagcctcataaacgaacagcagtgggtgctgaaagcagcaccaaatggagatttggattccagccccccagtgacagcccagtgggaagaagcaaactccagatgggcagaaggcagggtgcacaggtggctccagtctcaggaggatgcgcctcctctcccccatcccagccctcagcattgtgccagagtgatacccttaagtgtttgggtttatgttttcagttttgtttgggaaacagcagttgcacagagagttgggggtactgctgctgccttttcaccgaggcactgccaccaccagctctagcagggatgctcctgagcttggcggacatacttagatcctaacgtgccagtgagacctggctgtggagagtagcactggcagccctgcctggactccacttggcatgataccagctccagaagggaagggagtggagcaggcagtgaggagagagcctgggggtcggctggggacagccgtatgtgctaggtaggagtggagggagatatgtttaccaaatgcctgtcctgccatcctcccaggtagtcagagtgagctacatcctgccccgccttcatttccatggaaacatggcagctaggacacggggtacaacagcagccaaattcttccccacctcccttacttcgaaaaaaagtttggaaccctggtccctatactctgcagtcagaagtgggactgagccatacatgcccttgaattcctccctgtctggccctccctctccagcaagcagggttttctttaacttggcagtgtgcagaggagaagtggtaacacccccaccccattcccctgcatcggagctcagtattcctacagggtaagaggtaggaatcttgctgggacgagggg

SEQ ID NO: 190406 - DNA, 882 bp, Homo sapiens
  Payload ID: 17615
  Gene Name: tetraspanin 4
  ENST ID: ENST00000346501
  CDS Start-End: 122-736
gcagagcttggggcttccttggtcgcacccaccacctgcctgcccactggtcagccttcagggaccctgagcaccgcctggtctctttcctgtggccagcccagaactgaagcgctgcggcatggcgcgcgcctgcctccaggccgtcaagtacctcatgttcgccttcaacctgctcttctggctgggaggctgtggcgtgctgggtgtcggcatctggctggccgccacacaggggagcttcgccacgctgtcctcttccttcccgtccctgtcggctgccaacttgctcatcatcaccggcgcctttgtcatggccatcggcttcgtgggctgcctgggtgccatcaaggagaacaagtgcctcctgctcactttcttcctgctgctgctgctggtgttcctgctggaggccaccatcgccatcctcttcttcgcctacacggacaagttccgctgctgtggcgtctccaactacactgactggttcgaggtgtacaacgccacgcgggtacctgactcctgctgcttggagttcagtgagagctgtgggctgcacgcccccggcacctggtggaaggcgccgtgctacgagacggtgaaggtgtggcttcaggagaacctgctggctgtgggcatctttgggctgtgcacggcgctggtgcagatcctgggcctgaccttcgccatgaccatgtactgccaagtggtcaaggcagacacctactgcgcgtaggccgcccaccgcccgcttctctgccaaaaggacgcccacggggagatggccgcacccacagctgcctttcccaccaccagcctcggtgctctgccccatgctgggaggagggagggagggacaggtgcctggagcccccggaaccc

SEQ ID NO: 190407 - DNA, 1332 bp, Homo sapiens
  Payload ID: 17615
  Gene Name: tetraspanin 4
  ENST ID: ENST00000397396
  CDS Start-End: 322-846
aaagctgcggcggcggttcgcgtttctcgtgtccgcttgactgacagctgcgcggcgggagcgggcggcgcgagcgggaggcggcggcgcagagcttggggcttccttggtcgcacccaccacctgcctgcccactggtcagccttcagggaccctgagcaccgcctggtctctttcctgtggccagcccagctgggaggctgtggcgtgctgggtgtcggcatctggctggccgccacacaggggagcttcgccacgctgtcctcttccttcccgtccctgtcggctgccaacttgctcatcatcaccggcgcctttgtcatggccatcggcttcgtgggctgcctgggtgccatcaaggagaacaagtgcctcctgctcactttcttcctgctgctgctgctggtgttcctgctggaggccaccatcgccatcctcttcttcgcctacacggacaagattgacaggtatgcccagcaagacctgaagaaaggcttgcacctgtacggcacgcagggcaacgtgggcctcaccaacgcctggagcatcatccagaccgacttccgctgctgtggcgtctccaactacactgactggttcgaggtgtacaacgccacgcgggtacctgactcctgctgcttggagttcagtgagagctgtgggctgcacgcccccggcacctggtggaaggcgccgtgctacgagacggtgaaggtgtggcttcaggagaacctgctggctgtgggcatctttgggctgtgcacggcgctggtgcagatcctgggcctgaccttcgccatgaccatgtactgccaagtggtcaaggcagacacctactgcgcgtaggccgcccaccgcccgcttctctgccaaaaggacgcccacggggagatggccgcacccacagctgcctttcccaccaccagcctcggtgctctgccccatgctgggaggagggagggagggacaggtgcctggagcccccggaaccctgtttctggaaggccctagctcaggtggcttcagggcctccggaccccccctgggaggggtggccacgtgctggctgcggaacccagggcaggggtgggaggggcctccagcactttttatatttacgtattctccaaagcagtgttcacacgggagccagcctgtggcccccagcctcctggaaaacaggttggcgctggaggagccgggtcttggcatcctggaggtggccccactggtcctggtgctccaggcggggccgtggacccctcacctacattccatagtgggcccgtggggctcctggtgcatcttaataaagtgtgagcagcaaccttg

SEQ ID NO: 190408 - DNA, 1423 bp, Homo sapiens
  Payload ID: 17615
  Gene Name: tetraspanin 4
  Uniprot ID: O14817
  ENST ID: ENST00000397397
  CDS Start-End: 226-942
gtctgagcagggccgtaaagctgcggcggcggttcgcgtttctcgtgtccgcttgactgacagctgcgcggcgggagcgggcggcgcgagcgggaggcggcggcgcagagcttggggcttccttggtcgcacccaccacctgcctgcccactggtcagccttcagggaccctgagcaccgcctggtctctttcctgtggccagcccagaactgaagcgctgcggcatggcgcgcgcctgcctccaggccgtcaagtacctcatgttcgccttcaacctgctcttctggctgggaggctgtggcgtgctgggtgtcggcatctggctggccgccacacaggggagcttcgccacgctgtcctcttccttcccgtccctgtcggctgccaacttgctcatcatcaccggcgcctttgtcatggccatcggcttcgtgggctgcctgggtgccatcaaggagaacaagtgcctcctgctcactttcttcctgctgctgctgctggtgttcctgctggaggccaccatcgccatcctcttcttcgcctacacggacaagattgacaggtatgcccagcaagacctgaagaaaggcttgcacctgtacggcacgcagggcaacgtgggcctcaccaacgcctggagcatcatccagaccgacttccgctgctgtggcgtctccaactacactgactggttcgaggtgtacaacgccacgcgggtacctgactcctgctgcttggagttcagtgagagctgtgggctgcacgcccccggcacctggtggaaggcgccgtgctacgagacggtgaaggtgtggcttcaggagaacctgctggctgtgggcatctttgggctgtgcacggcgctggtgcagatcctgggcctgaccttcgccatgaccatgtactgccaagtggtcaaggcagacacctactgcgcgtaggccgcccaccgcccgcttctctgccaaaaggacgcccacggggagatggccgcacccacagctgcctttcccaccaccagcctcggtgctctgccccatgctgggaggagggagggagggacaggtgcctggagcccccggaaccctgtttctggaaggccctagctcaggtggcttcagggcctccggaccccccctgggaggggtggccacgtgctggctgcggaacccagggcaggggtgggaggggcctccagcactttttatatttacgtattctccaaagcagtgttcacacgggagccagcctgtggcccccagcctcctggaaaacaggttggcgctggaggagccgggtcttggcatcctggaggtggccccactggtcctggtgctccaggcggggccgtggacccctcacctacattccatagtgggcccgtggggctcctggtgcatcttaataaagtgtgagcagcaa

SEQ ID NO: 190409 - DNA, 1462 bp, Homo sapiens
  Payload ID: 17615
  Gene Name: tetraspanin 4
  Uniprot ID: O14817
  ENST ID: ENST00000397404
  CDS Start-End: 260-976
actgccccagcctcaggctctgtgcatctcccccgagcccccaccacatatgtgcggaggcccctgggggcccaggcctgtcctcagtcccgactgggctctacctgaggaccctggggagcctgggcctggccctcctcagagcttggggcttccttggtcgcacccaccacctgcctgcccactggtcagccttcagggaccctgagcaccgcctggtctctttcctgtggccagcccagaactgaagcgctgcggcatggcgcgcgcctgcctccaggccgtcaagtacctcatgttcgccttcaacctgctcttctggctgggaggctgtggcgtgctgggtgtcggcatctggctggccgccacacaggggagcttcgccacgctgtcctcttccttcccgtccctgtcggctgccaacttgctcatcatcaccggcgcctttgtcatggccatcggcttcgtgggctgcctgggtgccatcaaggagaacaagtgcctcctgctcactttcttcctgctgctgctgctggtgttcctgctggaggccaccatcgccatcctcttcttcgcctacacggacaagattgacaggtatgcccagcaagacctgaagaaaggcttgcacctgtacggcacgcagggcaacgtgggcctcaccaacgcctggagcatcatccagaccgacttccgctgctgtggcgtctccaactacactgactggttcgaggtgtacaacgccacgcgggtacctgactcctgctgcttggagttcagtgagagctgtgggctgcacgcccccggcacctggtggaaggcgccgtgctacgagacggtgaaggtgtggcttcaggagaacctgctggctgtgggcatctttgggctgtgcacggcgctggtgcagatcctgggcctgaccttcgccatgaccatgtactgccaagtggtcaaggcagacacctactgcgcgtaggccgcccaccgcccgcttctctgccaaaaggacgcccacggggagatggccgcacccacagctgcctttcccaccaccagcctcggtgctctgccccatgctgggaggagggagggagggacaggtgcctggagcccccggaaccctgtttctggaaggccctagctcaggtggcttcagggcctccggaccccccctgggaggggtggccacgtgctggctgcggaacccagggcaggggtgggaggggcctccagcactttttatatttacgtattctccaaagcagtgttcacacgggagccagcctgtggcccccagcctcctggaaaacaggttggcgctggaggagccgggtcttggcatcctggaggtggccccactggtcctggtgctccaggcggggccgtggacccctcacctacattccatagtgggcccgtggggctcctggtgcatcttaataaagtgtgagcagcaaccttg

SEQ ID NO: 190410 - DNA, 1426 bp, Homo sapiens
  Payload ID: 17615
  Gene Name: tetraspanin 4
  Uniprot ID: O14817
  ENST ID: ENST00000397406
  CDS Start-End: 224-940
tggacgcacatcctgctctgggcagaagggcaggacaggggccctgagtaacggtggcctggggtcagagccaggttcagctgcgaggctgctggtggctgtggagagcttggggcttccttggtcgcacccaccacctgcctgcccactggtcagccttcagggaccctgagcaccgcctggtctctttcctgtggccagcccagaactgaagcgctgcggcatggcgcgcgcctgcctccaggccgtcaagtacctcatgttcgccttcaacctgctcttctggctgggaggctgtggcgtgctgggtgtcggcatctggctggccgccacacaggggagcttcgccacgctgtcctcttccttcccgtccctgtcggctgccaacttgctcatcatcaccggcgcctttgtcatggccatcggcttcgtgggctgcctgggtgccatcaaggagaacaagtgcctcctgctcactttcttcctgctgctgctgctggtgttcctgctggaggccaccatcgccatcctcttcttcgcctacacggacaagattgacaggtatgcccagcaagacctgaagaaaggcttgcacctgtacggcacgcagggcaacgtgggcctcaccaacgcctggagcatcatccagaccgacttccgctgctgtggcgtctccaactacactgactggttcgaggtgtacaacgccacgcgggtacctgactcctgctgcttggagttcagtgagagctgtgggctgcacgcccccggcacctggtggaaggcgccgtgctacgagacggtgaaggtgtggcttcaggagaacctgctggctgtgggcatctttgggctgtgcacggcgctggtgcagatcctgggcctgaccttcgccatgaccatgtactgccaagtggtcaaggcagacacctactgcgcgtaggccgcccaccgcccgcttctctgccaaaaggacgcccacggggagatggccgcacccacagctgcctttcccaccaccagcctcggtgctctgccccatgctgggaggagggagggagggacaggtgcctggagcccccggaaccctgtttctggaaggccctagctcaggtggcttcagggcctccggaccccccctgggaggggtggccacgtgctggctgcggaacccagggcaggggtgggaggggcctccagcactttttatatttacgtattctccaaagcagtgttcacacgggagccagcctgtggcccccagcctcctggaaaacaggttggcgctggaggagccgggtcttggcatcctggaggtggccccactggtcctggtgctccaggcggggccgtggacccctcacctacattccatagtgggcccgtggggctcctggtgcatcttaataaagtgtgagcagcaaccttg

SEQ ID NO: 190411 - DNA, 1430 bp, Homo sapiens
  Payload ID: 17615
  Gene Name: tetraspanin 4
  Uniprot ID: O14817
  ENST ID: ENST00000397408
  CDS Start-End: 228-944
cgtgcggccagggtcccgtggccggaggtgtccgaccgggagcggctggagccggacgcgagcggggcgcgcgagttcgagcccagagccgacacgcagcaacaagtgggagcttggggcttccttggtcgcacccaccacctgcctgcccactggtcagccttcagggaccctgagcaccgcctggtctctttcctgtggccagcccagaactgaagcgctgcggcatggcgcgcgcctgcctccaggccgtcaagtacctcatgttcgccttcaacctgctcttctggctgggaggctgtggcgtgctgggtgtcggcatctggctggccgccacacaggggagcttcgccacgctgtcctcttccttcccgtccctgtcggctgccaacttgctcatcatcaccggcgcctttgtcatggccatcggcttcgtgggctgcctgggtgccatcaaggagaacaagtgcctcctgctcactttcttcctgctgctgctgctggtgttcctgctggaggccaccatcgccatcctcttcttcgcctacacggacaagattgacaggtatgcccagcaagacctgaagaaaggcttgcacctgtacggcacgcagggcaacgtgggcctcaccaacgcctggagcatcatccagaccgacttccgctgctgtggcgtctccaactacactgactggttcgaggtgtacaacgccacgcgggtacctgactcctgctgcttggagttcagtgagagctgtgggctgcacgcccccggcacctggtggaaggcgccgtgctacgagacggtgaaggtgtggcttcaggagaacctgctggctgtgggcatctttgggctgtgcacggcgctggtgcagatcctgggcctgaccttcgccatgaccatgtactgccaagtggtcaaggcagacacctactgcgcgtaggccgcccaccgcccgcttctctgccaaaaggacgcccacggggagatggccgcacccacagctgcctttcccaccaccagcctcggtgctctgccccatgctgggaggagggagggagggacaggtgcctggagcccccggaaccctgtttctggaaggccctagctcaggtggcttcagggcctccggaccccccctgggaggggtggccacgtgctggctgcggaacccagggcaggggtgggaggggcctccagcactttttatatttacgtattctccaaagcagtgttcacacgggagccagcctgtggcccccagcctcctggaaaacaggttggcgctggaggagccgggtcttggcatcctggaggtggccccactggtcctggtgctccaggcggggccgtggacccctcacctacattccatagtgggcccgtggggctcctggtgcatcttaataaagtgtgagcagcaaccttg

SEQ ID NO: 190412 - DNA, 1025 bp, Homo sapiens
  Payload ID: 17615
  Gene Name: tetraspanin 4
  Uniprot ID: O14817
  ENST ID: ENST00000397411
  CDS Start-End: 122-838
gagcagggccgtaaagctgcggcggcggttcgcgtttctcgtgtccgcttgactgacagctgcgcggcgggagcgggcggcgcgagcgggaggcggcggcgcagaactgaagcgctgcggcatggcgcgcgcctgcctccaggccgtcaagtacctcatgttcgccttcaacctgctcttctggctgggaggctgtggcgtgctgggtgtcggcatctggctggccgccacacaggggagcttcgccacgctgtcctcttccttcccgtccctgtcggctgccaacttgctcatcatcaccggcgcctttgtcatggccatcggcttcgtgggctgcctgggtgccatcaaggagaacaagtgcctcctgctcactttcttcctgctgctgctgctggtgttcctgctggaggccaccatcgccatcctcttcttcgcctacacggacaagattgacaggtatgcccagcaagacctgaagaaaggcttgcacctgtacggcacgcagggcaacgtgggcctcaccaacgcctggagcatcatccagaccgacttccgctgctgtggcgtctccaactacactgactggttcgaggtgtacaacgccacgcgggtacctgactcctgctgcttggagttcagtgagagctgtgggctgcacgcccccggcacctggtggaaggcgccgtgctacgagacggtgaaggtgtggcttcaggagaacctgctggctgtgggcatctttgggctgtgcacggcgctggtgcagatcctgggcctgaccttcgccatgaccatgtactgccaagtggtcaaggcagacacctactgcgcgtaggccgcccaccgcccgcttctctgccaaaaggacgcccacggggagatggccgcacccacagctgcctttcccaccaccagcctcggtgctctgccccatgctgggaggagggagggagggacaggtgcctggagcccccggaaccctgtttctggaaggccctagctcaggtggcttcagggcctcc

SEQ ID NO: 190413 - DNA, 1031 bp, Homo sapiens
  Payload ID: 17615
  Gene Name: tetraspanin 4
  Uniprot ID: O14817
  ENST ID: ENST00000409543
  CDS Start-End: 88-804
aggggccctgagtaacggtggcctggggtcagagccaggttcagctgcgaggctgctggtggctgtggagaactgaagcgctgcggcatggcgcgcgcctgcctccaggccgtcaagtacctcatgttcgccttcaacctgctcttctggctgggaggctgtggcgtgctgggtgtcggcatctggctggccgccacacaggggagcttcgccacgctgtcctcttccttcccgtccctgtcggctgccaacttgctcatcatcaccggcgcctttgtcatggccatcggcttcgtgggctgcctgggtgccatcaaggagaacaagtgcctcctgctcactttcttcctgctgctgctgctggtgttcctgctggaggccaccatcgccatcctcttcttcgcctacacggacaagattgacaggtatgcccagcaagacctgaagaaaggcttgcacctgtacggcacgcagggcaacgtgggcctcaccaacgcctggagcatcatccagaccgacttccgctgctgtggcgtctccaactacactgactggttcgaggtgtacaacgccacgcgggtacctgactcctgctgcttggagttcagtgagagctgtgggctgcacgcccccggcacctggtggaaggcgccgtgctacgagacggtgaaggtgtggcttcaggagaacctgctggctgtgggcatctttgggctgtgcacggcgctggtgcagatcctgggcctgaccttcgccatgaccatgtactgccaagtggtcaaggcagacacctactgcgcgtaggccgcccaccgcccgcttctctgccaaaaggacgcccacggggagatggccgcacccacagctgcctttcccaccaccagcctcggtgctctgccccatgctgggaggagggagggagggacaggtgcctggagcccccggaaccctgtttctggaaggccctagctcaggtggcttcagggcctccggaccccccctgggaggggtggccacgtgctggctgcgga

SEQ ID NO: 190414 - DNA, 1339 bp, Homo sapiens
  Payload ID: 17615
  Gene Name: tetraspanin 4
  ENST ID: ENST00000409531
  CDS Start-End: 85-858
agaggcgtggggtaggctgcagggcacagctgggggcctctgtccccatctccggctgtgggaggtgtgtgcgcatccggcgtgatgacacccaggagtgcaggcacatctgcgcacggggccgaactgaagcgctgcggcatggcgcgcgcctgcctccaggccgtcaagtacctcatgttcgccttcaacctgctcttctggctgggaggctgtggcgtgctgggtgtcggcatctggctggccgccacacaggggagcttcgccacgctgtcctcttccttcccgtccctgtcggctgccaacttgctcatcatcaccggcgcctttgtcatggccatcggcttcgtgggctgcctgggtgccatcaaggagaacaagtgcctcctgctcactttcttcctgctgctgctgctggtgttcctgctggaggccaccatcgccatcctcttcttcgcctacacggacaagattgacaggtatgcccagcaagacctgaagaaaggcttgcacctgtacggcacgcagggcaacgtgggcctcaccaacgcctggagcatcatccagaccgacttccgctgctgtggcgtctccaactacactgactggttcgaggtgtacaacgccacgcgggtacctgactcctgctgcttggagttcagtgagagctgtgggctgcacgcccccggcacctggtggaaggcgccgtgctacgagacggtgaaggtgtggcttcaggagaacctgctggctgtgggcatctttgggctgtgcacggcgctggtgcagatcctgggcctgaccttcgccatgaccatgtactgccaagtggtcaaggcagacacctactgcgcgtaggccgcccaccgcccgcttctctgccaaaaggacgcccacggggagatggccgcacccacagctgcctttcccaccaccagcctcggtgctctgccccatgctgggaggagggagggagggacaggtgcctggagcccccggaaccctgtttctggaaggccctagctcaggtggcttcagggcctccggaccccccctgggaggggtggccacgtgctggctgcggaacccagggcaggggtgggaggggcctccagcactttttatatttacgtattctccaaagcagtgttcacacgggagccagcctgtggcccccagcctcctggaaaacaggttggcgctggaggagccgggtcttggcatcctggaggtggccccactggtcctggtgctccaggcggggccgtggacccctcacctacattccatagtgggcccgtggggctcctggtgcatcttaataaagtgtgagcagcaa

SEQ ID NO: 190415 - DNA, 834 bp, Homo sapiens
  Payload ID: 17615
  Gene Name: tetraspanin 4
  ENST ID: ENST00000525201
  CDS Start-End: 264-788
aggttcagctgcgaggctgctggtggctgtggagagcttggggcttccttggtcgcacccaccacctgcctgcccactggtcagccttcagggaccctgagcaccgcctggtctctttcctgtggccagcccagctgggaggctgtggcgtgctgggtgtcggcatctggctggccgccacacaggggagcttcgccacgctgtcctcttccttcccgtccctgtcggctgccaacttgctcatcatcaccggcgcctttgtcatggccatcggcttcgtgggctgcctgggtgccatcaaggagaacaagtgcctcctgctcactttcttcctgctgctgctgctggtgttcctgctggaggccaccatcgccatcctcttcttcgcctacacggacaagattgacaggtatgcccagcaagacctgaagaaaggcttgcacctgtacggcacgcagggcaacgtgggcctcaccaacgcctggagcatcatccagaccgacttccgctgctgtggcgtctccaactacactgactggttcgaggtgtacaacgccacgcgggtacctgactcctgctgcttggagttcagtgagagctgtgggctgcacgcccccggcacctggtggaaggcgccgtgctacgagacggtgaaggtgtggcttcaggagaacctgctggctgtgggcatctttgggctgtgcacggcgctggtgcagatcctgggcctgaccttcgccatgaccatgtactgccaagtggtcaaggcagacacctactgcgcgtaggccgcccaccgcccgcttctctgccaaaaggacgcccacggggaga

SEQ ID NO: 190416 - DNA, 860 bp, Homo sapiens
  Payload ID: 17615
  Gene Name: tetraspanin 4
  ENST ID: ENST00000525334
  CDS Start-End: 561-860
tcccgggtcccggctctgctggctgctcgccgtcccgagctcccgacgctcagacgcgcctctgagcacggggagaggggacccgggagggaggtcggggagggagtcgtggaagaggtgctttttgagctgaacctggaagaccccggcacaggggatccctgggcagactcccggaggctgcactggcaggaccccctgaaggcctcagctctggcttgccctggagctcagggcctacggacgacgagggacgaggagcccgtgtctctcggatggagtgcgggggggctggcaccagcacccttcttgctgtgcccctggggtggggagcttggggcttccttggtcgcacccaccacctgcctgcccactggtcagccttcagggaccctgagcaccgcctggtctctttcctgtggccagcccagctgggaggctgtggcgtgctgggtgtcggcatctggctggccgccacacaggggagcttcgccacgctgtcctcttccttcccgtccctgtcggctgccaacttgctcatcatcaccggcgcctttgtcatggccatcggcttcgtgggctgcctgggtgccatcaaggagaacaagtgcctcctgctcactttcttcctgctgctgctgctggtgttcctgctggaggccaccatcgccatcctcttcttcgcctacacggacaagattgacaggtatgcccagcaagacctgaagaaaggcttgcacctgtacggcacgcagggcaacgtgggcctcaccaacgcctggagcatcatccagaccgacttccgctgctgtggcgtctccaactacactgactggttcgaggtgtacaacgccacgcgg

SEQ ID NO: 190417 - DNA, 518 bp, Homo sapiens
  Payload ID: 17615
  Gene Name: tetraspanin 4
  ENST ID: ENST00000532375
  CDS Start-End: 122-518
gcagagcttggggcttccttggtcgcacccaccacctgcctgcccactggtcagccttcagggaccctgagcaccgcctggtctctttcctgtggccagcccagaactgaagcgctgcggcatggcgcgcgcctgcctccaggccgtcaagtacctcatgttcgccttcaacctgctcttctggttcttcctgctgctgctgctggtgttcctgctggaggccaccatcgccatcctcttcttcgcctacacggacaagattgacaggtatgcccagcaagacctgaagaaaggcttgcacctgtacggcacgcagggcaacgtgggcctcaccaacgcctggagcatcatccagaccgacttccgctgctgtggcgtctccaactacactgactggttcgaggtgtacaacgccacgcgggtacctgactcctgctgcttggagttcagtgagagctgtgggctgcacgcccccggcacctggtggaaggcgccgtgctacgagacggtgaaggtgt

SEQ ID NO: 190418 - DNA, 968 bp, Homo sapiens
  Payload ID: 17615
  Gene Name: tetraspanin 4
  ENST ID: ENST00000527644
  CDS Start-End: 490-968
cggggtcgggggcgcgggggccgcagcgcgcgggccgggcagatgtttgggttccgccgccggggtccgagcggatccgcgcgacccgctgccaccgcgggggccagagcgggagcaggagcggggccggagcaggcgccggccggcgggatggggcgttccggggcggcgggtgcggggcgctgagcggcggccccggcacacccgggcgcgatgcgccgctccagcacggacgagtccacgtaccggcgcagcccctctccggagggcaaggagccggacttcgcgcgcggcggccccttccggcgctacagcagcctatacgggcgcgcgggcggcggggacgccgggggctccttcttcggcctgcacgcgaaccccggccccaaggcggcccaggcgcgctacacgtcgcccaagggcaacaagtacgtggttttctacctggacctctccttcatcttcctcctagaactgaagcgctgcggcatggcgcgcgcctgcctccaggccgtcaagtacctcatgttcgccttcaacctgctcttctggctgggaggctgtggcgtgctgggtgtcggcatctggctggccgccacacaggggagcttcgccacgctgtcctcttccttcccgtccctgtcggctgccaacttgctcatcatcaccggcgcctttgtcatggccatcggcttcgtgggctgcctgggtgccatcaaggagaacaagtgcctcctgctcactttcttcctgctgctgctgctggtgttcctgctggaggccaccatcgccatcctcttcttcgcctacacggacaagattgacaggtatgcccagcaagacctgaagaaaggcttgcacctgtacggcacgcagggcaacgtgggcctcaccaacgcctggagcatcatccagaccgacttccgctgctgtggcgtctccaactacactgactggttcgaggtgta

SEQ ID NO: 190419 - DNA, 818 bp, Homo sapiens
  Payload ID: 17615
  Gene Name: tetraspanin 4
  ENST ID: ENST00000530404
  CDS Start-End: 564-818
cgggaatggggtcggggtgcgccctcccgggtcccggctctgctggctgctcgccgtcccgagctcccgacgctcagacgcgcctctgagcacggggagaggggacccgggagggaggtcggggagggagtcgtggaagaggtgctttttgagctgaacctggaagaccccggcacaggggatccctgggcagactcccggaggctgcactggcaggaccccctgaaggcctcagctctggcttgccctggagctcagggcctacggacgacgagggacgaggagcccgtgtctctcggatggagtgcgggggggctggcaccagcacccttcttgctgtgcccctggggtgggggtgaggaaatggggggtcggtgtgcagtgagaggcaaagaaggctccttggaggtgcgagggctccactctgcccatctttccttttgcagagcttggggcttccttggtcgcacccaccacctgcctgcccactggtcagccttcagggaccctgagcaccgcctggtctctttcctgtggccagcccagaactgaagcgctgcggcatggcgcgcgcctgcctccaggccgtcaagtacctcatgttcgccttcaacctgctcttctggctgggaggctgtggcgtgctgggtgtcggcatctggctggccgccacacaggggagcttcgccacgctgtcctcttccttcccgtccctgtcggctgccaacttgctcatcatcaccggcgcctttgtcatggccatcggcttcgtgggctgcctgggtgccatcaaggagaacaagtgcctcctgctcact

SEQ ID NO: 190420 - DNA, 3365 bp, Homo sapiens
  Payload ID: 17616
  Gene Name: tetraspanin 5
  Uniprot ID: P62079
  ENST ID: ENST00000305798
  CDS Start-End: 404-1210
gcgaacgggcgggcgagcaagcgagcggcgtctccaccagcatctgccgcggccgcctttgcccgaagcccggggacgaaccgacggaccgaccgcctggcgcacggacgcgggcgctcgctttgtgttcggggctagcgtcggcgaggcttgagcttgcagcgcgcggcttccctgctttctcgcggccaccccggctccggcggcctcggcgcgcgaggggctggaggtgcgggagccgctctccgccggtcggtccccgcgcggctgagcccaggccgccagcgccgcggccccgtgcggtgtccctgagctcctgctccccgccgggctgctccgagcaacggtgcttcggagctccaaactcgggctgccggggcaagtgtcttcatgaacccagaggatgtccgggaagcactacaagggtcctgaagtcagttgttgcatcaaatacttcatatttggcttcaatgtcatattttggtttttgggaataacatttcttggaattggactgtgggcatggaatgaaaaaggagttctgtccaacatctcttccatcaccgatctcggcggctttgacccagtttggctcttccttgtggtgggaggagtgatgttcattttgggatttgcagggtgcattggagcgctacgggaaaacactttccttctcaagtttttttctgtgttcctgggaattattttcttcctggagctcactgccggagttctagcatttgttttcaaagactggatcaaagaccagctgtatttctttataaacaacaacatcagagcatatcgggatgacattgatttgcaaaacctcatagacttcacccaggaatattggcagtgctgtggggcttttggagctgatgattggaacctaaatatttacttcaattgcacagattccaatgcaagtcgagagcgatgtggcgttccattctcctgctgcactaaagatcccgcagaagatgtcatcaacactcagtgtggctatgatgccaggcaaaaaccagaagttgaccagcagattgtaatctacacgaaaggctgtgtgccccagtttgagaagtggttgcaggacaatttaaccatcgttgctggtattttcataggcattgcattgctgcagatatttgggatatgcctggcccagaatttggttagcgatatcgaagctgtcagggcgagctggtagaccccctgcaaccgctgctgcaagacactggacagacccagctttcgggaccctcccgcgtgccgaactgatcttcgagctgcatggacctaatcacagatgcagcctgcagtctcgcctaatggagctgccattaggggagtgtaaaactgggaaatgctgctcactgacagaattaaaaaaaaaaataaccagtatgaaagtcgttgcgccgtgaatctctactgtagccatgaatttatggacagttagatgcttaccaaaaaagaaaaaaagggagggtaggggacccagatgtacttgaatgtgcagaaaatacattcttgtcctcatcttccgtaattggagggctgggagaggcagctttgctcttcaccacaccttggacggaccaccttctttctgttccatggcctgaaggagtgcatctcctcaaagactcagcccctcacctgggagggcagtggtttgtgggcatccctccatgtacattttaggaaacacttgcaactctcatctgaagaagaaaacaactcatctttgggttcagattttgtgatggtattcagcaagtcacttgggcgagcacacttggtctatcctggaaagtctccttataagagaagttgtgtatttcatgtgcaccgagcaagggcattggaagacgtcatgaggctgtattttagcaggactgatcgtttttctaagtagacctgagctttgtttatcagtgaaattcaaggagaaaatgaggttaatgaagaggtatcagttaaatatccccttcttctcaccctgccaaaattagcagttggatttttggaaactctggaatattctgggtcattttgttttgtatgtttgttgtttttcgtcttccaaaggtgaaagctatgatacagttccacttaaattttagtgttttcttactcagctcaagcattaatttttgattaagtcttaatctgcatgacctgtgaatctgaatccatcatctccctttcctgccagcttttctacaaacattgaaatatgttatttggtcagcacttatttcctaggttcacagccttgggaggttgtggcatgtcctcccagtctggctgggaagagaccagctgtaccatccaaatgcttccctggtcttgatgatctcttccagagtcgatctgagtggccttttctgcaccctccccttctttctctttgaatggaattaaacccaatttggaaacaacattgacccagtcaaaagcttctaatggtttctttttcttcctccagttttagtttgcttttattaaaaaaagaaaatagtgcatggccatagctccttcagttctcttattgcagactaaccatcaggatggtatcaaagcacaaatactttggaggggaatgcgttgaactggggcaagtactctgtaacacaaagtgggaaaccacttcctggtgctgccgctcctgcccccactttaggtgggagggacgagttttgccctctagattttaatccagctggtgtccaccggatgttgccctcctggggagcagatatcagtctgtggaactctgggaaaaccacaggcacatttttcggtgcggacagatttgccagcacataactgggcagccagctagaatactttgtggaaattaagcgaggttttccatttcagccccatggtgcatggtggtggccgatgaatgtgtcagtctgctcagagaaaggacaaaaaggaaattattttcaaaactgtgttcactgtttgggtgtgtgtatggctctgcatgtgtgtgtttttgtctctgtataggtagaggtattcacatcttactccgactgtaaggttgtcttacttcatctctgcccccaccacagttgccattttgtaatgtccttccaacatggagaagacacgagctctctccagttggcatcatttgtcttttttgttgattgcctcattctccagtgaactccatctggccaattgattcagaatcaggcaagatccctgccctttggcacatccactgaaaggccaaacagcaagtccgagtgagttttaaatattaattaatcaccctttattttttacacttgagagtgattgtaataaaggctgtcattaataaacttggttctacctta

SEQ ID NO: 190421 - DNA, 3242 bp, Homo sapiens
  Payload ID: 17616
  Gene Name: tetraspanin 5
  ENST ID: ENST00000508798
  CDS Start-End: 345-926
tgcccgaagcccggggacgaaccgacggaccgaccgcctggcgcacggacgcgggcgctcgctttgtgttcggggctagcgtcggcgaggcttgagcttgcagcgcgcggcttccctgctttctcgcggccaccccggctccggcggcctcggcgcgcgaggggctggaggtgcgggagccgctctccgccggtcggtccccgcgcggctgagcccaggccgccagcgccgcggccccgtgcggtgtccctgagctcctgctccccgccgggctgctccgagcaacggtgcttcggagctccaaactcgggctgccggggcaagtgtcttcatgaacccagaggatgtccgggaagcactacaagggtcctgaagtcagttgttgcatcaaatacttcatatttggcttcaatgtcatattttggtttttgggaataacatttcttggaattggactgtgggcatggaatgaaaaaggagttctgtccaacatctcttccatcaccgatctcggcggctttgacccagtttggctcttccttgtggtgggaggagtgatgttcattttgggatttgcagggtgcattggagcgctacgggaaaacactttccttctcaagtttttttctgtgttcctgggaattattttcttcctggagctcactgccggagttctagcatttgttttcaaagactggatcaaagaccagctgtatttctttataaacaacaacatcagagcatatcgggatgacattgatttgcaaaacctcatagacttcacccaggaatatattccaatgcaagtcgagagcgatgtggcgttccattctcctgctgcactaaagatcccgcagaagatgtcatcaacactcagtgtggctatgatgccaggcaaaaaccagaagttgaccagcagattgtaatctacacgaaaggctgtgtgccccagtttgagaagtggttgcaggacaatttaaccatcgttgctggtattttcataggcattgcattgctgcagatatttgggatatgcctggcccagaatttggttagcgatatcgaagctgtcagggcgagctggtagaccccctgcaaccgctgctgcaagacactggacagacccagctttcgggaccctcccgcgtgccgaactgatcttcgagctgcatggacctaatcacagatgcagcctgcagtctcgcctaatggagctgccattaggggagtgtaaaactgggaaatgctgctcactgacagaattaaaaaaaaaaataaccagtatgaaagtcgttgcgccgtgaatctctactgtagccatgaatttatggacagttagatgcttaccaaaaaagaaaaaaagggagggtaggggacccagatgtacttgaatgtgcagaaaatacattcttgtcctcatcttccgtaattggagggctgggagaggcagctttgctcttcaccacaccttggacggaccaccttctttctgttccatggcctgaaggagtgcatctcctcaaagactcagcccctcacctgggagggcagtggtttgtgggcatccctccatgtacattttaggaaacacttgcaactctcatctgaagaagaaaacaactcatctttgggttcagattttgtgatggtattcagcaagtcacttgggcgagcacacttggtctatcctggaaagtctccttataagagaagttgtgtatttcatgtgcaccgagcaagggcattggaagacgtcatgaggctgtattttagcaggactgatcgtttttctaagtagacctgagctttgtttatcagtgaaattcaaggagaaaatgaggttaatgaagaggtatcagttaaatatccccttcttctcaccctgccaaaattagcagttggatttttggaaactctggaatattctgggtcattttgttttgtatgtttgttgtttttcgtcttccaaaggtgaaagctatgatacagttccacttaaattttagtgttttcttactcagctcaagcattaatttttgattaagtcttaatctgcatgacctgtgaatctgaatccatcatctccctttcctgccagcttttctacaaacattgaaatatgttatttggtcagcacttatttcctaggttcacagccttgggaggttgtggcatgtcctcccagtctggctgggaagagaccagctgtaccatccaaatgcttccctggtcttgatgatctcttccagagtcgatctgagtggccttttctgcaccctccccttctttctctttgaatggaattaaacccaatttggaaacaacattgacccagtcaaaagcttctaatggtttctttttcttcctccagttttagtttgcttttattaaaaaaagaaaatagtgcatggccatagctccttcagttctcttattgcagactaaccatcaggatggtatcaaagcacaaatactttggaggggaatgcgttgaactggggcaagtactctgtaacacaaagtgggaaaccacttcctggtgctgccgctcctgcccccactttaggtgggagggacgagttttgccctctagattttaatccagctggtgtccaccggatgttgccctcctggggagcagatatcagtctgtggaactctgggaaaaccacaggcacatttttcggtgcggacagatttgccagcacataactgggcagccagctagaatactttgtggaaattaagcgaggttttccatttcagccccatggtgcatggtggtggccgatgaatgtgtcagtctgctcagagaaaggacaaaaaggaaattattttcaaaactgtgttcactgtttgggtgtgtgtatggctctgcatgtgtgtgtttttgtctctgtataggtagaggtattcacatcttactccgactgtaaggttgtcttacttcatctctgcccccaccacagttgccattttgtaatgtccttccaacatggagaagacacgagctctctccagttggcatcatttgtcttttttgttgattgcctcattctccagtgaactccatctggccaattgattcagaatcaggcaagatccctgccctttggcacatccactgaaaggccaaacagcaagtccgagtgagttttaaatattaattaatcaccctttattttttacacttgagagtgattgtaataaaggctgtcattaataaacttggttctacctta

SEQ ID NO: 190422 - DNA, 605 bp, Homo sapiens
  Payload ID: 17616
  Gene Name: tetraspanin 5
  ENST ID: ENST00000515440
  CDS Start-End: 1-263
aagtcagttgttgcatcaaatacttcatatttggcttcaatgtcatattttggtttttgggaataacatttcttggaattggactgtgggcatggaatgaaaaaggagttctgtccaacatctcttccatcaccgatctcggcggctttgacccagtttggctcttccttgtggtgggaggagtgatgttcattttgggatttgcagggtgcattggagcgctacgggaaaacactttccttctcaagtttgacaaacaataaaaacttgcctggaataatcttcgaacagaaggtatgagataagtattttctgtgttcctgggaattattttcttcctggagctcactgccggagttctagcatttgttttcaaagactggatcaaagaccagctgtatttctttataaacaacaacatcagagcatatcgggatgacattgatttgcaaaacctcatagacttcacccaggaatattggcagtgctgtggggcttttggagctgatgattggaacctaaatatttacttcaattgcacagattccaatgcaagtcgagagcgatgtggcgttccattctcctgctgcactaaagatcccgca

SEQ ID NO: 190423 - DNA, 581 bp, Homo sapiens
  Payload ID: 17616
  Gene Name: tetraspanin 5
  ENST ID: ENST00000511800
  CDS Start-End: 241-357
accatctcgggctttgtgtaggatgcagatgccgtggtatatggtcctgtaattgcacgtaaataacgtttcctgcacgctctcctcttcagctggaaagcgctcccttttttgggaataacatttcttggaattggactgtgggcatggaatgaaaaaggagttctgtccaacatctcttccatcaccgatctcggcggctttgacccagtttggctcttccttgtggtgggaggagtgatgttcattttgggatttgcagggtgcattggagcgctacgggaaaacactttccttctcaagtttttgaagagtccagtgttaactgaacaggcagaaaactacacatttctctaaatcagcaccttaatttataaagtctcatgttggaaatgaagagaattgtgttgtttcttggcttttaagacttggaaaatatcttaaatggcctctctccatttaggacaaacaataaaaacttgcctggaataatcttcgaacagaagttttctgtgttcctgggaattattttcttcctggagctcactgccggagttctagcatttgttttcaaagactgg

SEQ ID NO: 190424 - DNA, 574 bp, Homo sapiens
  Payload ID: 17616
  Gene Name: tetraspanin 5
  ENST ID: ENST00000515287
  CDS Start-End: 244-574
tttgtgtaggatgcagatgccgtggtatatggtcctgtaattgcacgtaaataacgtttcctgcacgctctcctcttcagctggaaagcgctccctgtgcgtaatggactgtttttgggaataacatttcttggaattggactgtgggcatggaatgaaaaaggagttctgtccaacatctcttccatcaccgatctcggcggctttgacccagtttggctcttccttgtggtgggaggagtgatgttcattttgggatttgcagggtgcattggagcgctacgggaaaacactttccttctcaagtttttttctgtgttcctgggaattattttcttcctggagctcactgccggagttctagcatttgttttcaaagactggatcaaagaccagctgtatttctttataaacaacaacatcagagcatatcgggatgacattgatttgcaaaacctcatagacttcacccaggaatattggcagtgctgtggggcttttggagctgatgattggaacctaaatatttacttcaattgcacagattccaatgcaagtcgagagcgatgtggcg

SEQ ID NO: 190425 - DNA, 1191 bp, Homo sapiens
  Payload ID: 17616
  Gene Name: tetraspanin 5
  ENST ID: ENST00000505184
  CDS Start-End: 286-879
gttgccgcggctggtctgtgccatgctcagcgtgtatcttcttgcaccatctcgggctttgtgtaggatgcagatgccgtggtatatggtcctgtaattgcacgtaaataacgtttcctgcacgctctcctcttcagctggaaagcgctcccttttttgggaataacatttcttggaattggactgtgggcatggaatgaaaaaggagttctgtccaacatctcttccatcaccgatctcggcggctttgacccagtttggctcttccttgtggtgggaggagtgatgttcattttgggatttgcagggtgcattggagcgctacgggaaaacactttccttctcaagtttttttctgtgttcctgggaattattttcttcctggagctcactgccggagttctagcatttgttttcaaagactggatcaaagaccagctgtatttctttataaacaacaacatcagagcatatcgggatgacattgatttgcaaaacctcatagacttcacccaggaatattggcagtgctgtggggcttttggagctgatgattggaacctaaatatttacttcaattgcacagattccaatgcaagtcgagagcgatgtggcgttccattctcctgctgcactaaagatcccgcagaagatgtcatcaacactcagtgtggctatgatgccaggcaaaaaccagaagttgaccagcagattgtaatctacacgaaaggctgtgtgccccagtttgagaagtggttgcaggacaatttaaccatcgttgctggtattttcataggcattgcattgctgcagatatttgggatatgcctggcccagaatttggttagcgatatcgaagctgtcagggcgagctggtagaccccctgcaaccgctgctgcaagacactggacagacccagctttcgggaccctcccgcgtgccgaactgatcttcgagctgcatggacctaatcacagatgcagcctgcagtctcgcctaatggagctgccattaggggagtgtaaaactgggaaatgctgctcactgacagaattaaaaaaaaaaataaccagtatgaaagtcgttgcgccgtgaatctctactgtagccatgaatttatggacagttagatgcttaccaaaaaagaaaaaaagggagggtaggggacccagatgtacttgaatgtgcag

SEQ ID NO: 190426 - DNA, 710 bp, Homo sapiens
  Payload ID: 17616
  Gene Name: tetraspanin 5
  ENST ID: ENST00000511651
  CDS Start-End: 531-710
gcaccatctcgggctttgtgtaggatgcagatgccgtggtatatggtcctgtaattgcacgtaaataacgtttcctgcacgctctcctcttcagctggaaagcgctccctgaggacttaaatgcattggacagtggacaaagaccatttaaatggattacaaaaagcagacttcaccaggcagagcggcctctaacttcttcagtaatgttgccatttaccatgtgtctgttggggatcaggtccgtcgctaggcacccttcgtgcttttaggacattgccgtggaaggaaggggagaaaccttgatagggcccttggatgaagcactgcagcttatgctaagaagatcaaggccctgttagactggaaacattcattgtaagacctagtgccataagtttttgggaataacatttcttggaattggactgtgggcatggaatgaaaaaggagttctgtccaacatctcttccatcaccgatctcggcggctttgacccagtttggctcttccttgtggtgggaggagtgatgttcattttgggatttgcagggtgcattggagcgctacgggaaaacactttccttctcaagtttttttctgtgttcctgggaattattttcttcctggagctcactgccggagttctagcatttgttttcaaagactggatcaaagaccagctgtatttctttataaacaacaacatc

SEQ ID NO: 190427 - DNA, 2206 bp, Homo sapiens
  Payload ID: 17617
  Gene Name: tetraspanin 6
  Uniprot ID: O43657
  ENST ID: ENST00000373020
  CDS Start-End: 113-850
agttgtggacgctcgtaagttttcggcagtttccggggagactcggggactccgcgtctcgctctctgtgttccaatcgcccggtgcggtggtgcagggtctcgggctagtcatggcgtccccgtctcggagactgcagactaaaccagtcattacttgtttcaagagcgttctgctaatctacacttttattttctggatcactggcgttatccttcttgcagttggcatttggggcaaggtgagcctggagaattacttttctcttttaaatgagaaggccaccaatgtccccttcgtgctcattgctactggtaccgtcattattcttttgggcacctttggttgttttgctacctgccgagcttctgcatggatgctaaaactgtatgcaatgtttctgactctcgtttttttggtcgaactggtcgctgccatcgtaggatttgttttcagacatgagattaagaacagctttaagaataattatgagaaggctttgaagcagtataactctacaggagattatagaagccatgcagtagacaagatccaaaatacgttgcattgttgtggtgtcaccgattatagagattggacagatactaattattactcagaaaaaggatttcctaagagttgctgtaaacttgaagattgtactccacagagagatgcagacaaagtaaacaatgaaggttgttttataaaggtgatgaccattatagagtcagaaatgggagtcgttgcaggaatttcctttggagttgcttgcttccaactgattggaatctttctcgcctactgcctctctcgtgccataacaaataaccagtatgagatagtgtaacccaatgtatctgtgggcctattcctctctacctttaaggacatttagggtcccccctgtgaattagaaagttgcttggctggagaactgacaacactacttactgatagaccaaaaaactacaccagtaggttgattcaatcaagatgtatgtagacctaaaactacaccaataggctgattcaatcaagatccgtgctcgcagtgggctgattcaatcaagatgtatgtttgctatgttctaagtccaccttctatcccattcatgttagatcgttgaaaccctgtatccctctgaaacactggaagagctagtaaattgtaaatgaagtaatactgtgttcctcttgactgttatttttcttagtagggggcctttggaaggcactgtgaatttgctattttgatgtagtgttacaagatggaaaattgattcctctgactttgctattgatgtagtgtgatagaaaattcacccctctgaactggctccttcccagtcaaggttatctggtttgattgtataatttgcaccaagaagttaaaatgttttatgactctctgttctgctgacaggcagagagtcacattgtgtaatttaatttcagtcagtcaatagatggcatccctcatcagggttgccagatggtgataacagtgtaaggccttgggtctaaggcatccacgactggaagggactactgatgttctgtgatacatcaggtttcagcacacaacttacatttctttgcctccaaattgaggcatttattatgatgttcatactttccctcttgtttgaaagtttctaattattaaatggtgtcggaattgttgtattttccttaggaattcagtggaacttatcttcattaaatttagctggtaccaggttgatatgacttgtcaatattatggtcaactttaagtcttagttttcgtttgtgcctttgattaataagtataactcttatacaataaatactgctttcctctaaaaagatcgtgtttaaattaacttgtagaaaatctgctggaatggttgttgttttccactgagaaagctaagccctacatttctattcagagtactgtttttagatgtgaaatataagcctgcggccttaactctgtattaaaaaaaatgtttttgtttaaaaaaaactgttcccataggtgcagcaaaccaccatggcacatgtatacctatgtaacaaacctgcacattctgcacatgtatcccagaacttaatgtaaacaaaaaaatcttaaagtgcaaatattaaaaaaaactgttctctgtgaaaaaaattatattccatgttataaagtagcatatgactagtgttctcctag

SEQ ID NO: 190428 - DNA, 3796 bp, Homo sapiens
  Payload ID: 17617
  Gene Name: tetraspanin 6
  ENST ID: ENST00000612152
  CDS Start-End: 490-879
ggcaccaggggccagggaggcccaatctcagagcgctgcgggctctgctggtgatagaaacaatatggtgaagttataaggagaggggaggggtggggggcgggaaagattccttaggatagaaaaaaaacaatgaagaaagctccacttgaagacctatgaaatttccgacactagaacctttgtatatagttttcggtaaccttcggcagggggcgctctgaaattgttgccactttccggacagcctcccatactttaccctctacaaaattgtacagtgtttccggcccttctcagttgtggacgctcatcactggcgttatccttcttgcagttggcatttggggcaaggtgagcctggagaattacttttctcttttaaatgagaaggccaccaatgtccccttcgtgctcattgctactggtaccgtcattattcttttgggcacctttggttgttttgctacctgccgagcttctgcatggatgctaaaactgtatgcaatgtttctgactctcgtttttttggtcgaactggtcgctgccatcgtaggatttgttttcagacatgagattaagaacagctttaagaataattatgagaaggctttgaagcagtataactctacaggagattatagaagccatgcagtagacaagatccaaaatacgttgcattgttgtggtgtcaccgattatagagattggacagatactaattattactcagaaaaaggatttcctaagagttgctgtaaacttgaagattgtactccacagagagatgcagacaaagtaaacaatgaactgattggaatctttctcgcctactgcctctctcgtgccataacaaataaccagtatgagatagtgtaacccaatgtatctgtgggcctattcctctctacctttaaggacatttagggtcccccctgtgaattagaaagttgcttggctggagaactgacaacactacttactgatagaccaaaaaactacaccagtaggttgattcaatcaagatgtatgtagacctaaaactacaccaataggctgattcaatcaagatccgtgctcgcagtgggctgattcaatcaagatgtatgtttgctatgttctaagtccaccttctatcccattcatgttagatcgttgaaaccctgtatccctctgaaacactggaagagctagtaaattgtaaatgaagtaatactgtgttcctcttgactgttatttttcttagtagggggcctttggaaggcactgtgaatttgctattttgatgtagtgttacaagatggaaaattgattcctctgactttgctattgatgtagtgtgatagaaaattcacccctctgaactggctccttcccagtcaaggttatctggtttgattgtataatttgcaccaagaagttaaaatgttttatgactctctgttctgctgacaggcagagagtcacattgtgtaatttaatttcagtcagtcaatagatggcatccctcatcagggttgccagatggtgataacagtgtaaggccttgggtctaaggcatccacgactggaagggactactgatgttctgtgatacatcaggtttcagcacacaacttacatttctttgcctccaaattgaggcatttattatgatgttcatactttccctcttgtttgaaagtttctaattattaaatggtgtcggaattgttgtattttccttaggaattcagtggaacttatcttcattaaatttagctggtaccaggttgatatgacttgtcaatattatggtcaactttaagtcttagttttcgtttgtgcctttgattaataagtataactcttatacaataaatactgctttcctctaaaaagatcgtgtttaaattaacttgtagaaaatctgctggaatggttgttgttttccactgagaaagctaagccctacatttctattcagagtactgtttttagatgtgaaatataagcctgcggccttaactctgtattaaaaaaaatgtttttgtttaaaaaaaactgttcccataggtgcagcaaaccaccatggcacatgtatacctatgtaacaaacctgcacattctgcacatgtatcccagaacttaatgtaaacaaaaaaatcttaaagtgcaaatattaaaaaaaactgttctctgtgaaaaaaattatattccatgttataaagtagcatatgactagtgttctcctagagatcagacttttttgattgtatagtttgcattaaaaagttgtacagggagggatgtaacctgtatcttcaggataatagggaaattaataaggaaaataataattactaaaatttgagttgaagtcagggaattatttctttggttttgagtctctttatacatccattagtagaacctgtctagtctgattgccacagtccttgaattgatggtaagggggagtcagttacagttagaaaaaaacctgggcaaaaactactagttaaatgatcatgaattttgagtatgtgttttaaaatgcttggagttattgcagaaaaatgatattctccattagaacatttgatgtgtgacttttgacataggataaggtgataagaaaattaagttgaaaaatagtgactcaagtacagcaaatcagatttttggctactgagattaaagaagcaaatatttaaaggattatcagcaattttcaaatacatatttttcactgcagtggttttgaagaatgttttaaggttatatttagagtttttaaaaaagttttccctcagccagccatggtggctcacatctgtaatcccagcactttgagaggctgaggcgggcggatcacctgaggtcaggagttctagaccagcctggccaacatggtaaaacaccgtctctaataaaaatgcaaaaattagctgggtgtggtggcaagcacctgtaatcccagctacttgggagactgaggcaggagaatcacttgaatccaggagtcagaggttgcagtgagccgagatcacaccactgcactccagcctgggcgataagagtgaacctgcatctcagaaaaaaaaaaaaagttttccctcattattaaaaaggaaaaattatagaaaattaaaatatagaatgtagaaagaggaaaaacaccacacatcactcgtcaggtggattggtttgtttatttttaagatgggtttattttggatagccagttagaaaacgcccttatagctgatgtgtgcttgtgcatactgaattgtatacttaattctgaaagtaatgaggaaacatttcacctaatgataactggtacaaaggaaagttcacgtgtctttaatagtttgctaattagactagctggttagaaagagggatcactagattggagagagagatccagtttccactggaggcagtaggtctgctcatttccatggtgacaatcctaatggcagagggagtgagtttcccttagtggcacaggctgggggttttgagcttttaagttttgttttatagaaatctggagaattttacattttacttcactatatatctatgtttaaaataattcatttttgatgtcccaaaattgatgtgggttgccttatttccaggcaccaggttgctcactgcaaggtgacattttgagaagcagaaatctctaggtatatcttaagtgtgaaaagcttgttagatttccatggcctattccaggtgggttgttgggtttatgttgtaagcatcaaacttttgtggaaataaatacctaatacaaggt

SEQ ID NO: 190429 - DNA, 900 bp, Homo sapiens
  Payload ID: 17617
  Gene Name: tetraspanin 6
  ENST ID: ENST00000614008
  CDS Start-End: 490-900
ggcaccaggggccagggaggcccaatctcagagcgctgcgggctctgctggtgatagaaacaatatggtgaagttataaggagaggggaggggtggggggcgggaaagattccttaggatagaaaaaaaacaatgaagaaagctccacttgaagacctatgaaatttccgacactagaacctttgtatatagttttcggtaaccttcggcagggggcgctctgaaattgttgccactttccggacagcctcccatactttaccctctacaaaattgtacagtgtttccggcccttctcagttgtggacgctcatcactggcgttatccttcttgcagttggcatttggggcaaggtgagcctggagaattacttttctcttttaaatgagaaggccaccaatgtccccttcgtgctcattgctactggtaccgtcattattcttttgggcacctttggttgttttgctacctgccgagcttctgcatggatgctaaaactgtatgcaatgtttctgactctcgtttttttggtcgaactggtcgctgccatcgtaggatttgttttcagacatgagattaagaacagctttaagaataattatgagaaggctttgaagcagtataactctacaggagattatagaagccatgcagtagacaagatccaaaatacgttgcattgttgtggtgtcaccgattatagagattggacagatactaattattactcagaaaaaggatttcctaagagttgctgtaaacttgaagattgtactccacagagagatgcagacaaagtaaacaatgaaggttgttttataaaggtgatgaccattatagagtcagaaatgggagtcgttgcaggaatttcctttggagttgcttgcttccaagacatt

SEQ ID NO: 190430 - DNA, 1270 bp, Homo sapiens
  Payload ID: 17618
  Gene Name: tetraspanin 7
  ENST ID: ENST00000286824
  CDS Start-End: 4-804
agtatggcatcgaggagaatggagaccaaacctgtgataacctgtctcaaaaccctcctcatcatctactccttcgtcttctggaaagaaaaggctgcaggattttgtggcagacaggatgtggctatggctttgatcactggggtgatcctgctggctgttggagtctggggcaaacttactctgggcacctatatctcccttattgccgagaactccacaaatgctccctatgtgctcatcggaactggcaccactattgttgtctttggcctgtttggatgctttgctacatgtcgtggtagcccatggatgctgaaactgtatgccatgtttctgtccctggtgttcctggctgagctcgtagctggcatttcagggtttgtgtttcgtcatgagatcaaggacaccttcctgaggacttacacggacgctatgcagacttacaatggcaatgatgagaggagccgggcagtggaccatgtgcagcgcagcctgagctgctgtggtgtgcagaactacaccaactggagcaccagcccctacttcctggagcatggcatcccccccagctgctgcatgaacgaaactgattgtaatccccaggatctacacaatctgactgtggccgccaccaaagttaaccagaagggttgttatgatctggtaactagtttcatggagactaacatgggaatcatcgctggagtggcgtttggaatcgcattctcccagttaattggcatgctgctggcctgctgtctgtcccggttcatcacggccaatcagtatgagatggtgtaaggagaagtctttcaagaatgacggaataagagacctgttttaaaaaggaactgcagcaatctttgaaagacttccaaagaatgttagagcacagtacataatacacttgccctgctccctctcccccttaccccacaacgtgcaactgacactcccacccagtctctgctccacctttcagcccacgtcacgtgtagtgtccattttgtgaagccctgttgtgccacagagtgtagccaggtccccctgcagctagtcctagtgaacctcaccccgaggccctgcatgggccagcccctccatctgtacttggtccaactgcaactcatcatcggtgactggttatcacaccatcgctggcccctttgggccctgcatgtagtgtgggaggctcctgttagctcctcactgtggtaaatgccacacacctttaagtagataagcagacgatagttatctgttcttt

SEQ ID NO: 190431 - DNA, 1909 bp, Homo sapiens
  Payload ID: 17618
  Gene Name: tetraspanin 7
  Uniprot ID: P41732
  ENST ID: ENST00000378482
  CDS Start-End: 178-927
gtaggagccccgcgcggtgcgcgctcacgcacgcgcacggcctcgcctgcgcgctcacgaggcctctcgcggcacgcgcccccgccccgcgccgccccgccccgccccgcctcttccccctcccgcgcgcccgcccgccgcctgccgccgccgccgccgccgccggagctctgtagtatggcatcgaggagaatggagaccaaacctgtgataacctgtctcaaaaccctcctcatcatctactccttcgtcttctggatcactggggtgatcctgctggctgttggagtctggggcaaacttactctgggcacctatatctcccttattgccgagaactccacaaatgctccctatgtgctcatcggaactggcaccactattgttgtctttggcctgtttggatgctttgctacatgtcgtggtagcccatggatgctgaaactgtatgccatgtttctgtccctggtgttcctggctgagctcgtagctggcatttcagggtttgtgtttcgtcatgagatcaaggacaccttcctgaggacttacacggacgctatgcagacttacaatggcaatgatgagaggagccgggcagtggaccatgtgcagcgcagcctgagctgctgtggtgtgcagaactacaccaactggagcaccagcccctacttcctggagcatggcatcccccccagctgctgcatgaacgaaactgattgtaatccccaggatctacacaatctgactgtggccgccaccaaagttaaccagaagggttgttatgatctggtaactagtttcatggagactaacatgggaatcatcgctggagtggcgtttggaatcgcattctcccagttaattggcatgctgctggcctgctgtctgtcccggttcatcacggccaatcagtatgagatggtgtaaggagaagtctttcaagaatgacggaataagagacctgttttaaaaaggaactgcagcaatctttgaaagacttccaaagaatgttagagcacagtacataatacacttgccctgctccctctcccccttaccccacaacgtgcaactgacactcccacccagtctctgctccacctttcagcccacgtcacgtgtagtgtccattttgtgaagccctgttgtgccacagagtgtagccaggtccccctgcagctagtcctagtgaacctcaccccgaggccctgcatgggccagcccctccatctgtacttggtccaactgcaactcatcatcggtgactggttatcacaccatcgctggcccctttgggccctgcatgtagtgtgggaggctcctgttagctcctcactgtggtaaatgccacacacctttaagtagataagcagacgatagttatctgttcttttgacttaatctcatttggtttgattttccctctactaaggctttcctaccttcttcaggctgcctaagacatgtaacgaaacacttcaataattgtccatgaggagaaaaaaagcatgtgtcatgcatgaaggaaactgaacttgaggtggcctccttgcttgttacatacctgggtatgtgtaggcagtttagtgcatctttgcctctcggttgaaacctgtataaccctgttacaaagctgtgttgttgcttcttgtgaaggccatgatattttgtttttccccaattaattgctattgtgttattttactacttctctctgtattttttcttgcattgacattatagacattgaggacctcatccaaacaatttaaaaatgagtgtgaagggggaacaagtcaaaatatttttaaaagatcttcaaaagtaatgcctctgtctagcatgccaacaagaatgcattgatattgtgaacatttgtgatatatgtattaataaatagagcaattac

SEQ ID NO: 190432 - DNA, 1224 bp, Homo sapiens
  Payload ID: 17618
  Gene Name: tetraspanin 7
  ENST ID: ENST00000475216
  CDS Start-End: 4-141
agtatggcatcgaggagaatggagaccaaacctgtgataacctgtctcaaaaccctcctcatcatctactccttcgtcttctggccttgcctactgaagagaataagaagctgggtttctcctcatttacataacaagtaatatggtatggaagatggaaccgaagatttgaggtcagaagacctaagttctatggcttttctacaacctagatgatcactggggtgatcctgctggctgttggagtctggggcaaacttactctgggcacctatatctcccttattgccgagaactccacaaatgctccctatgtgctcatcggaactggcaccactattgttgtctttggcctgtttggatgctttgctacatgtcgtggtagcccatggatgctgaaactgtatgccatgtttctgtccctggtgttcctggctgagctcgtagctggcatttcagggtttgtgtttcgtcatgagatcaaggacaccttcctgaggacttacacggacgctatgcagacttacaatggcaatgatgagaggagccgggcagtggaccatgtgcagcgcagcctgagctgctgtggtgtgcagaactacaccaactggagcaccagcccctacttcctggagcatggcatcccccccagctgctgcatgaacgaaactgattgtaatccccaggatctacacaatctgactgtggccgccaccaaagttaaccagaagggttgttatgatctggtaactagtttcatggagactaacatgggaatcatcgctggagtggcgtttggaatcgcattctcccagttaattggcatgctgctggcctgctgtctgtcccggttcatcacggccaatcagtatgagatggtgtaaggagaagtctttcaagaatgacggaataagagacctgttttaaaaaggaactgcagcaatctttgaaagacttccaaagaatgttagagcacagtacataatacacttgccctgctccctctcccccttaccccacaacgtgcaactgacactcccacccagtctctgctccacctttcagcccacgtcacgtgtagtgtccattttgtgaagccctgttgtgccacagagtgtagccaggtccccctgcagctagtcctagtgaacctcaccccgaggccctgcatgggccagcccctccatctgtacttggtccaactgcaactcatcatcggtgact

SEQ ID NO: 190433 - DNA, 1210 bp, Homo sapiens
  Payload ID: 17618
  Gene Name: tetraspanin 7
  ENST ID: ENST00000471410
  CDS Start-End: 6-197
gtagtatggcatcgaggagaatggagaccaaacctgtgataacctgtctcaaaaccctcctcatcatctactccttcgtcttctggccctatttttgctttgaaactggagcacagtgctgtatgaggtaccgagaatcagctagatggcaaaccggactgtttgcaatggtcaaggaagaagcagagatttattgaggatcaaaaatattcctaatgcacccggacatttccttatcgctggcgttggtggttcttcaagtcagggaaggtctatagaagaggagggaaaaacacacctaggaatcactggggtgatcctgctggctgttggagtctggggcaaacttactctgggcacctatatctcccttattgccgagaactccacaaatgctccctatgtgctcatcggaactggcaccactattgttgtctttggcctgtttggatgctttgctacatgtcgtggtagcccatggatgctgaaactgtatgccatgtttctgtccctggtgttcctggctgagctcgtagctggcatttcagggtttgtgtttcgtcatgagatcaaggacaccttcctgaggacttacacggacgctatgcagacttacaatggcaatgatgagaggagccgggcagtggaccatgtgcagcgcagcctgagctgctgtggtgtgcagaactacaccaactggagcaccagcccctacttcctggagcatggcatcccccccagctgctgcatgaacgaaactgattgtaatccccaggatctacacaatctgactgtggccgccaccaaagttaaccagaagggttgttatgatctggtaactagtttcatggagactaacatgggaatcatcgctggagtggcgtttggaatcgcattctcccagttaattggcatgctgctggcctgctgtctgtcccggttcatcacggccaatcagtatgagatggtgtaaggagaagtctttcaagaatgacggaataagagacctgttttaaaaaggaactgcagcaatctttgaaagacttccaaagaatgttagagcacagtacataatacacttgccctgctccctctcccccttaccccacaacgtgcaactgacactcccacccagtctctgctccacctttcagcccacgtcacgtgtagtgtccattttgtgaagccctgttgtgccacagagtgtagc

SEQ ID NO: 190434 - DNA, 553 bp, Homo sapiens
  Payload ID: 17618
  Gene Name: tetraspanin 7
  ENST ID: ENST00000480976
  CDS Start-End: 4-135
agtatggcatcgaggagaatggagaccaaacctgtgataacctgtctcaaaaccctcctcatcatctactccttcgtcttctggattcattcccatccaaaattcacgaggacacagccaataaaagggagctgaatttgaagaagagctcgtcactaagattcattctgtatttattgagctgattctgtttgatggatattaggacagaatatttgaacagcatgttgtcttggaaaatcagatcactggggtgatcctgctggctgttggagtctggggcaaacttactctgggcacctatatctcccttattgccgagaactccacaaatgctccctatgtgctcatcggaactggcaccactattgttgtctttggcctgtttggatgctttgctacatgtcgtggtagcccatggatgctgaaactgtatgccatgtttctgtccctggtgttcctggctgagctcgtagctggcatttcagggtttgtgtttcgtcatgagatcaaggacaccttcctgaggacttacacggacgctatgcagact

SEQ ID NO: 190435 - DNA, 1227 bp, Homo sapiens
  Payload ID: 17619
  Gene Name: tetraspanin 8
  Uniprot ID: P19075
  ENST ID: ENST00000247829
  CDS Start-End: 280-993
gtgccattctcttgcctgatccagtgccattcccttcacttgatatctgtttactttagaggaggcagtttttgagaaaggatcataaatatcctggcccagtgccccaggagctatgacaagcaaaggaacatacttgcctggagatagcctttgcgatatttaaatgtccgtggatacagaaatctctgcaggcaagttgctccagagcatattgcaggacaagcctgtaacgaatagttaaattcacggcatctggattcctaatccttttccgaaatggcaggtgtgagtgcctgtataaaatattctatgtttaccttcaacttcttgttctggctatgtggtatcttgatcctagcattagcaatatgggtacgagtaagcaatgactctcaagcaatttttggttctgaagatgtaggctctagctcctacgttgctgtggacatattgattgctgtaggtgccatcatcatgattctgggcttcctgggatgctgcggtgctataaaagaaagtcgctgcatgcttctgttgtttttcataggcttgcttctgatcctgctcctgcaggtggcgacaggtatcctaggagctgttttcaaatctaagtctgatcgcattgtgaatgaaactctctatgaaaacacaaagcttttgagcgccacaggggaaagtgaaaaacaattccaggaagccataattgtgtttcaagaagagtttaaatgctgcggtttggtcaatggagctgctgattggggaaataattttcaacactatcctgaattatgtgcctgtctagataagcagagaccatgccaaagctataatggaaaacaagtttacaaagagacctgtatttctttcataaaagacttcttggcaaaaaatttgattatagttattggaatatcatttggactggcagttattgagatactgggtttggtgttttctatggtcctgtattgccagatcgggaacaaatgaatctgtggatgcatcaacctatcgtcagtcaaacccctttaaaatgttgctttggctttgtaaatttaaatatgtaagtgctatataagtcaggagcagctgtctttttaaaatgtctcggctagctagaccacagatatcttctagacatattgaacacatttaagatttgagggatataagggaaaatgatatgaatgtgtatttttactcaaaataaaagtaactgtttac

SEQ ID NO: 190436 - DNA, 1516 bp, Homo sapiens
  Payload ID: 17619
  Gene Name: tetraspanin 8
  Uniprot ID: P19075
  ENST ID: ENST00000393330
  CDS Start-End: 554-1267
gctttgtagtagagatagctgttcaggaggaggaaatgtgaattctgagagcgtgatcatttaggagagatttccattcctggaacgatatcactaccacatgcacgagtgcaattgaagggaaacctggtggggaaacagttttaacattctttcagaaaaagaatcactacctagtggaaaatgttgtgcaagcctcttcatgtttcttccctccagaaaacaactaaacagatggaagaactggttcacaaacatcccaactctctcctgccaaggtccagtgggcttgttgctccagacctcatgccttctggacccagacatctctgcaatctcggaactggaatacaccacttcttgtcaaggtactagcaagttgactatgaactgctgggagataagaccatctgatttatccgtgtacatacagcagctagcacaccgtggatacagaaatctctgcaggcaagttgctccagagcatattgcaggacaagcctgtaacgaatagttaaattcacggcatctggattcctaatccttttccgaaatggcaggtgtgagtgcctgtataaaatattctatgtttaccttcaacttcttgttctggctatgtggtatcttgatcctagcattagcaatatgggtacgagtaagcaatgactctcaagcaatttttggttctgaagatgtaggctctagctcctacgttgctgtggacatattgattgctgtaggtgccatcatcatgattctgggcttcctgggatgctgcggtgctataaaagaaagtcgctgcatgcttctgttgtttttcataggcttgcttctgatcctgctcctgcaggtggcgacaggtatcctaggagctgttttcaaatctaagtctgatcgcattgtgaatgaaactctctatgaaaacacaaagcttttgagcgccacaggggaaagtgaaaaacaattccaggaagccataattgtgtttcaagaagagtttaaatgctgcggtttggtcaatggagctgctgattggggaaataattttcaacactatcctgaattatgtgcctgtctagataagcagagaccatgccaaagctataatggaaaacaagtttacaaagagacctgtatttctttcataaaagacttcttggcaaaaaatttgattatagttattggaatatcatttggactggcagttattgagatactgggtttggtgttttctatggtcctgtattgccagatcgggaacaaatgaatctgtggatgcatcaacctatcgtcagtcaaacccctttaaaatgttgctttggctttgtaaatttaaatatgtaagtgctatataagtcaggagcagctgtctttttaaaatgtctcggctagctagaccacagatatcttctagacatattgaacacatttaagatttgagggatataagggaaaatgatatgaatgtgtatttttactcaaaataaaagtaactgtttacgttggtgcttttcta

SEQ ID NO: 190437 - DNA, 1168 bp, Homo sapiens
  Payload ID: 17619
  Gene Name: tetraspanin 8
  Uniprot ID: P19075
  ENST ID: ENST00000546561
  CDS Start-End: 222-935
gtgtgggttaatagcctttgcgatatttaaatgtgtgggttaatttttttatccagtttaataactttttattcctccctctacttctttgctttctctttctgctctgaagccgtggatacagaaatctctgcaggcaagttgctccagagcatattgcaggacaagcctgtaacgaatagttaaattcacggcatctggattcctaatccttttccgaaatggcaggtgtgagtgcctgtataaaatattctatgtttaccttcaacttcttgttctggctatgtggtatcttgatcctagcattagcaatatgggtacgagtaagcaatgactctcaagcaatttttggttctgaagatgtaggctctagctcctacgttgctgtggacatattgattgctgtaggtgccatcatcatgattctgggcttcctgggatgctgcggtgctataaaagaaagtcgctgcatgcttctgttgtttttcataggcttgcttctgatcctgctcctgcaggtggcgacaggtatcctaggagctgttttcaaatctaagtctgatcgcattgtgaatgaaactctctatgaaaacacaaagcttttgagcgccacaggggaaagtgaaaaacaattccaggaagccataattgtgtttcaagaagagtttaaatgctgcggtttggtcaatggagctgctgattggggaaataattttcaacactatcctgaattatgtgcctgtctagataagcagagaccatgccaaagctataatggaaaacaagtttacaaagagacctgtatttctttcataaaagacttcttggcaaaaaatttgattatagttattggaatatcatttggactggcagttattgagatactgggtttggtgttttctatggtcctgtattgccagatcgggaacaaatgaatctgtggatgcatcaacctatcgtcagtcaaacccctttaaaatgttgctttggctttgtaaatttaaatatgtaagtgctatataagtcaggagcagctgtctttttaaaatgtctcggctagctagaccacagatatcttctagacatattgaacacatttaagatttgagggatataagggaaaatgatatgaatgtgtatttttactcaaaataaaagtaactgttta

SEQ ID NO: 190438 - DNA, 4323 bp, Homo sapiens
  Payload ID: 17620
  Gene Name: tetraspanin 9
  Uniprot ID: O75954
  ENST ID: ENST00000011898
  CDS Start-End: 162-881
ctgtttccgctggcggcggcggcggcggcggtgccggagcgcgagcagagcggagacccccaggtcctgcgggcgcggaatatcctggaaccttcttttgtttgtcagcagccaaggtgtttccaggaagttcagagagaacagaatttaagaagtgcaacatggccaggggctgcctctgctgcttgaagtacatgatgttcctcttcaatttgatattctggctctgtggctgtgggctgctgggagtgggcatctggctctccgtgtcccaaggcaactttgccaccttctcccccagcttcccttcgttgtctgcagccaacctggtcattgccataggcaccattgtcatggtgacgggcttcctcggctgcctgggggccatcaaggaaaacaagtgcctcctcctcagctttttcatcgtcctgttggtcatcctcctagcagagctgatcttactcatcctcttctttgtctacatggacaaggtgaacgagaacgccaagaaggacctgaaggaaggcctgctgctgtaccacaccgagaacaacgtggggctgaagaacgcctggaacatcatccaggctgagatgcgatgctgtggtgtcactgactacacagactggtacccagtgctgggggagaacacggttcccgaccgctgctgcatggagaactcccagggctgcgggcgcaacgccaccacgcctttgtggagaacgggctgctatgaaaaggtgaagatgtggttcgatgacaataagcacgtgctgggcacggtggggatgtgcatcctcatcatgcagatcctgggcatggccttctccatgaccctcttccagcacatccaccggactggtaagaagtacgacgcatgagcgggctggccgggagtgcccaccccgccctgctgccctgtggagggaagaggattgagctttgtgtcacctgcctgcgctctccagatatgacccctgcacccaccccccacagcctgccctaccccacctaccctgcctcagcctcggacttctcagtgggtggagtgccagggaggaggaggcacacggagacctggggctcggggcccctggattcctgcatctgcatatgcgtatttgccaaagacgacagggtgggctggggtgcgctccggaggaacccccggcactgatgggcttctgcccctgcccttcctcacactgacactttgtccccacatggggtggggagcagagtgcccgccccgtggagataccgccccagcgggggctgcgacatccatggccaccatggggcacctggcggggcgggggtctgccggcctctgggcaaggcccctggagcatctcgcccaggctttttataccttacaatgtaacttttttattttattttactctatgattattcaggaatattatctctcagataagtttagggttagatttctgatttgtaactttttactgtgttgatttctttaatggtttgactttttttccctgagggtgagggatgggtgggaagagaggacatctgtccagtctcaatcaggacagaccaccgtgcgacacccaggaggctctcggatggggcgcgcctgcgccctcagaacgtgtgggaaggagggggcgtggacaggacacgggaccttgccaggcctggtgtctgaggacaggagcctgggagaggcgggtggagcgtgaagcaggctggaggtgcccctgcacgggaggtggcgtttgctaaccaatcgagctggaaatgccagggcaggggggccccacggtgctgtggcagagctagaggggtccttagacttttcactgatgagcagttgttggttttttctttctcccttcctcccgctctctgctggcacgcgaggcttccccttccaccccatgtgggtattcccacaacaggttctgcacaccccagttatttcacagacattcctgctagaaactgtcagacaaatacctctctagttcggatgctgctcactttcccccttgcttctggaaggggaagcagtccttaggttttgctgtgctgggacagtggcaggggacccacaggggtgaggacccacggtcctccccgccagccttgctcagctgtgggttgccctgctgggaaggagggaatcacgtccacctgggtcccaagatcttcgcctccttccctggggccacggacatcagcagtgggttgggtggcgattatatcatctgtgatcccaaggagaagaaatacagaaaacccaagagaggtcagactggctcttgttaccggagccacgggaagaaagcagccggagtcacgcacgtgcagagctgggcatgggagagaaacgggctggggagtgaggccaggagtgggattcagctgcagcagggcgccccctccaaactgcagctggtctggcttactgttttgccgttcaaaaaggtcgcgaatccgtgggactgagcacggggacctcacccgctagccagcgtctgctgcacttgatcaggtggggccttggtgggcggctgcctttcctatacagtttgtcttgtcaccctggtttcccactggggccaggtctcttctccagcctccacctgcctgtctgatccaagagctgagacacggccacccagcaccagtcactcctctgttcaccttaagtaacacacaaatcgggaacaggaggacagaaccgttggcattatcaggattcgtgttttgtgggggtgggagtggagagtagggtggtcttgtgagttgtgcagggtgaagaccgcttccctgagacaggggcagtggtgctgatggaatgtgggggaggcccacatttgagcaaagctgccctgcccttgtcccctggcctggcttcctggtaaggagtttcagccgcctccgcaggaacccccaaagtgcagattccggagcagacacatccgggcggagagactcagcagacaagtgctgcagttgcacggtgggacccggggcctcgtgcgttttttgctgtgggtggggtgggtgggttggtttatgcctatcaatgcaatttttaatttttgttaatatcaacagcaaaagcctagtgcattgggagatgtgcaacctccctgaaaatcttttctgtttctggagtacttcaggggtggcctctggccccagagcctttgccacagtgctcccaccagcccccacctcatccgtctgtttgcagagcctcatctacaggtccccacgctgccttctttactcactctgcgcttggccgttttgttatttggcttagtctacattgggcggaagtctgtgtgcacagagtgggtgttccttcgagccccttccactcagagggccacacccagcgatgccagtgaaggtggcacagcctctcttcagtttctcctgactgtgatctcactggggtagaattcccctgagagaattccctcactcacggctccctttgccagagtcagttcaatcaggtctgatgtgagcaatttacacacttgtctcagaaagtccctcagggtttgtagaggactgcaggggggcatccgctgcagactcagcctttctctgcagccatcctgcagtgggggtgagcgggcacaggctgagaactgctcttgggtggtggaagcaggtgtcacggtgcaagtctccccctgcacccctcccccagcttgagccgtgtcacccccctctccctccagcatgggcctgtgtctcaggctctctggaaggtggccctgccccggaccctcttgcaggtgtcctggtttgacttggaactagatggccatctttccaggctttggtggcccaagagcagtctgggtggatggaagtggctgtcccctcctctccagcccctgcccacccactggtggaggtgctaactagcagggacgtggcataggatgggagctgggcgtgaggtgcttggggtccattctttgtccctcagcttctcagagtccggccagcccttgtgttcccgtgccccacactttcctcctccccactgcagtgagtcaatagtccagggtggggcctggcctccctgccctgattggggactcaggaggtgaggcctggggggcttcctgccccctccttgcccacctgcctgcccccgggcagcacgggagggagagcagggtgagcacgcttgttggtttcagatgcactttctgcttgcattgccgtatctgtgcgttccttcatcctggtcctggctttatggaacaccatgtttttagcatgtttttaaataaaaacggataaagtgtcaaaagc

SEQ ID NO: 190439 - DNA, 958 bp, Homo sapiens
  Payload ID: 17620
  Gene Name: tetraspanin 9
  ENST ID: ENST00000407263
  CDS Start-End: 20-835
agaatttaagaagtgcaacatggccaggggctgcctctgctgcttgaagtacatgatgttcctcttcaatttgatattctggctctgtggctgtgggctgctgggagtgggcatctggctctccgtgtcccaaggcaactttgccaccttctcccccagcttcccttcgttgtctgcagccaacctggtcattgccataggcaccattgtcatggtgacgggcttcctcggctgcctgggggccatcaaggaaaacaagtgcctcctcctcagctttttcatcgtcctgttggtcatcctcctagcagagctgatcttactcatcctcttctttgtctacatggacaaggtgaacgagaacgccaagaaggacctgaaggaaggcctgctgctgtaccacaccgagaacaacgtggggctgaagaacgcctggaacatcatccaggctgagatgcgatgctgtggtgtcactgactacacagactggtacccagtgctgggggagaacacggttcccgaccgctgctgcatggagaactcccagggctgcgggcgcaacgccaccacgcctttgtggagaacgggctgctatgaaaaggtgaagatgtggttcgatgacaataagcacgtgctgggcacggtggggatgtgcatcctcatcatgcaggtaagaggggcgtccccagcagcctcacccaccctgctggcctcagcctcagagggaaggaagcacagagaagtgaaagcagtgttggtacacggcggagggtctggaattcatcacagctattcaagcttagcagctgtgcctgccaccgtttccgcagagctctgatatgagagcacgtgtctactcagcactgagagtggtgctcagggctgcctgtggccaggcccaggctgggatattgaagctggagtcaacccccgtgggttcccccagttctgcccaaacctt

SEQ ID NO: 190440 - DNA, 570 bp, Homo sapiens
  Payload ID: 17620
  Gene Name: tetraspanin 9
  ENST ID: ENST00000444315
  CDS Start-End: 162-341
ctgtttccgctggcggcggcggcggcggcggtgccggagcgcgagcagagcggagacccccaggtcctgcgggcgcggaatatcctggaaccttcttttgtttgtcagcagccaaggtgtttccaggaagttcagagagaacagaatttaagaagtgcaacatggccaggggctgcctctgctgcttgaagtacatgatgttcctcttcaatttgatattctgggatcctccagttggtgagaatgggctgactgggctcgcagagggcggatcagttttctcgtgccaggaagtcgtggaatcgggaggtcatctggctcgtcctgcgctgagcatttgaacacagggctgtcaagggagagctctgtggctgtgggctgctgggagtgggcatctggctctccgtgtcccaaggcaactttgccaccttctcccccagcttcccttcgttgtctgcagccaacctggtcattgccataggcaccattgtcatggtgacgggcttcctcggctgcctgggggccatcaaggaaaacaagtgcctcctcctcagctttttcatcgtcctg

SEQ ID NO: 190441 - DNA, 4284 bp, Homo sapiens
  Payload ID: 17620
  Gene Name: tetraspanin 9
  Uniprot ID: O75954
  ENST ID: ENST00000537971
  CDS Start-End: 117-836
attcccgggcaggccccgccccctgtttccgctggcggcggcggcggcggcggtgccggagcgcgagcagagcggagacccccaggtcctgcgggcgcgaatttaagaagtgcaacatggccaggggctgcctctgctgcttgaagtacatgatgttcctcttcaatttgatattctggctctgtggctgtgggctgctgggagtgggcatctggctctccgtgtcccaaggcaactttgccaccttctcccccagcttcccttcgttgtctgcagccaacctggtcattgccataggcaccattgtcatggtgacgggcttcctcggctgcctgggggccatcaaggaaaacaagtgcctcctcctcagctttttcatcgtcctgttggtcatcctcctagcagagctgatcttactcatcctcttctttgtctacatggacaaggtgaacgagaacgccaagaaggacctgaaggaaggcctgctgctgtaccacaccgagaacaacgtggggctgaagaacgcctggaacatcatccaggctgagatgcgatgctgtggtgtcactgactacacagactggtacccagtgctgggggagaacacggttcccgaccgctgctgcatggagaactcccagggctgcgggcgcaacgccaccacgcctttgtggagaacgggctgctatgaaaaggtgaagatgtggttcgatgacaataagcacgtgctgggcacggtggggatgtgcatcctcatcatgcagatcctgggcatggccttctccatgaccctcttccagcacatccaccggactggtaagaagtacgacgcatgagcgggctggccgggagtgcccaccccgccctgctgccctgtggagggaagaggattgagctttgtgtcacctgcctgcgctctccagatatgacccctgcacccaccccccacagcctgccctaccccacctaccctgcctcagcctcggacttctcagtgggtggagtgccagggaggaggaggcacacggagacctggggctcggggcccctggattcctgcatctgcatatgcgtatttgccaaagacgacagggtgggctggggtgcgctccggaggaacccccggcactgatgggcttctgcccctgcccttcctcacactgacactttgtccccacatggggtggggagcagagtgcccgccccgtggagataccgccccagcgggggctgcgacatccatggccaccatggggcacctggcggggcgggggtctgccggcctctgggcaaggcccctggagcatctcgcccaggctttttataccttacaatgtaacttttttattttattttactctatgattattcaggaatattatctctcagataagtttagggttagatttctgatttgtaactttttactgtgttgatttctttaatggtttgactttttttccctgagggtgagggatgggtgggaagagaggacatctgtccagtctcaatcaggacagaccaccgtgcgacacccaggaggctctcggatggggcgcgcctgcgccctcagaacgtgtgggaaggagggggcgtggacaggacacgggaccttgccaggcctggtgtctgaggacaggagcctgggagaggcgggtggagcgtgaagcaggctggaggtgcccctgcacgggaggtggcgtttgctaaccaatcgagctggaaatgccagggcaggggggccccacggtgctgtggcagagctagaggggtccttagacttttcactgatgagcagttgttggttttttctttctcccttcctcccgctctctgctggcacgcgaggcttccccttccaccccatgtgggtattcccacaacaggttctgcacaccccagttatttcacagacattcctgctagaaactgtcagacaaatacctctctagttcggatgctgctcactttcccccttgcttctggaaggggaagcagtccttaggttttgctgtgctgggacagtggcaggggacccacaggggtgaggacccacggtcctccccgccagccttgctcagctgtgggttgccctgctgggaaggagggaatcacgtccacctgggtcccaagatcttcgcctccttccctggggccacggacatcagcagtgggttgggtggcgattatatcatctgtgatcccaaggagaagaaatacagaaaacccaagagaggtcagactggctcttgttaccggagccacgggaagaaagcagccggagtcacgcacgtgcagagctgggcatgggagagaaacgggctggggagtgaggccaggagtgggattcagctgcagcagggcgccccctccaaactgcagctggtctggcttactgttttgccgttcaaaaaggtcgcgaatccgtgggactgagcacggggacctcacccgctagccagcgtctgctgcacttgatcaggtggggccttggtgggcggctgcctttcctatacagtttgtcttgtcaccctggtttcccactggggccaggtctcttctccagcctccacctgcctgtctgatccaagagctgagacacggccacccagcaccagtcactcctctgttcaccttaagtaacacacaaatcgggaacaggaggacagaaccgttggcattatcaggattcgtgttttgtgggggtgggagtggagagtagggtggtcttgtgagttgtgcagggtgaagaccgcttccctgagacaggggcagtggtgctgatggaatgtgggggaggcccacatttgagcaaagctgccctgcccttgtcccctggcctggcttcctggtaaggagtttcagccgcctccgcaggaacccccaaagtgcagattccggagcagacacatccgggcggagagactcagcagacaagtgctgcagttgcacggtgggacccggggcctcgtgcgttttttgctgtgggtggggtgggtgggttggtttatgcctatcaatgcaatttttaatttttgttaatatcaacagcaaaagcctagtgcattgggagatgtgcaacctccctgaaaatcttttctgtttctggagtacttcaggggtggcctctggccccagagcctttgccacagtgctcccaccagcccccacctcatccgtctgtttgcagagcctcatctacaggtccccacgctgccttctttactcactctgcgcttggccgttttgttatttggcttagtctacattgggcggaagtctgtgtgcacagagtgggtgttccttcgagccccttccactcagagggccacacccagcgatgccagtgaaggtggcacagcctctcttcagtttctcctgactgtgatctcactggggtagaattcccctgagagaattccctcactcacggctccctttgccagagtcagttcaatcaggtctgatgtgagcaatttacacacttgtctcagaaagtccctcagggtttgtagaggactgcaggggggcatccgctgcagactcagcctttctctgcagccatcctgcagtgggggtgagcgggcacaggctgagaactgctcttgggtggtggaagcaggtgtcacggtgcaagtctccccctgcacccctcccccagcttgagccgtgtcacccccctctccctccagcatgggcctgtgtctcaggctctctggaaggtggccctgccccggaccctcttgcaggtgtcctggtttgacttggaactagatggccatctttccaggctttggtggcccaagagcagtctgggtggatggaagtggctgtcccctcctctccagcccctgcccacccactggtggaggtgctaactagcagggacgtggcataggatgggagctgggcgtgaggtgcttggggtccattctttgtccctcagcttctcagagtccggccagcccttgtgttcccgtgccccacactttcctcctccccactgcagtgagtcaatagtccagggtggggcctggcctccctgccctgattggggactcaggaggtgaggcctggggggcttcctgccccctccttgcccacctgcctgcccccgggcagcacgggagggagagcagggtgagcacgcttgttggtttcagatgcactttctgcttgcattgccgtatctgtgcgttccttcatcctggtcctggctttatggaacaccatgtttttagcatgtttttaaataaaaacggataaagtgtcaaaagcacagca

SEQ ID NO: 190442 - DNA, 10481 bp, Homo sapiens
  Payload ID: 17621
  Gene Name: tetratricopeptide repeat and ankyrin repeat containing 1
  Uniprot ID: O15050
  ENST ID: ENST00000429976
  CDS Start-End: 249-9026
cttggaataggtctgcggctgcacaccgcccggacgccggggttcctgcgtcccccgccccctctgatcgcggctgggtagccgagccgcaggcagctgggggcccccgaacgccgcctctgcatcgcgccgcccctgccccgggctccggtagctttcgggcttccgcactgcccgccgcgccctgcccacagggaagcgcttccccaggcggcggcggtcctggtgcggaccctccggccgcagccatgtgggacccgcgggcagctagggttcccccgagggacttggctgtgctgctgtgcaacaaatcaaatgcatttttcagccttgggaagtggaatgaggcatttgttgctgccaaggaatgtctccaatgggatccaacctacgtgaagggatactaccgagctggttattccttgctgaggttgcaccagccttacgaagccgctcgcatgttttttgagggtctgcgacttgtgcagagaagccaagaccaggcaccggttgctgatttccttgttggagtcttcaccactatgagcagtgactccattgttttgcaaagtttcttgccttgctttgatcatattttcacaactggattcccaacagaagtgtggcaatctgtaatagaaaagttggcaaagaaaggattatggcattcatttctgcttctgtcagcaaaaaaagaccgattaccaagaaatattcatgtcccagagttatcactgaaaagtctctttgagaaatacgttttcattggactttatgagaagatggaacaagtgcccaagttagtccagtggctcatctccattggtgcaagtgttgagactataggaccgtatccccttcatgccctcatgcgactctgtatccaagccagagaaaaccatcttttccggtggttaatggatcacaagcccgagtggaaaggccgcattaaccagaaggatggggatggctgcactgtcctgcacgtcgtcgctgcccactccccaggatacctcgttaagcgacaaacagaggatgtgcagatgctcctgcgctttggggcagatcccactttgctggatcgacagtctcggtctgttgtggatgtcctgaagaggaataagaacttcaaagccatcgagaaaatcaacagtcacttagaaaagctagctacgtgttctaaggacctatcaggattcagcaatggtgatggacccactagtgaaaacgacattttcaggaaggtcttggagcagctggtgaagtatatgaactcaggaaaccggttattgcataaaaactttctgaagcaggaagtagttcagaggttcttgcgtctcctttctactctgcaagaaattcctcctgacctggtctgtgatattaatcaagactgtgccaccaccgtcttcaaattcttattggaaaaacagagatggcctgaggtgcttctgctgctgacccgcaaagtaagtggagaaccaccgcttggggattgcctcatcaaagactgcaacttctcagacctcgacatctgtaccatcatcccccatctcagcacctgggaccagcggaagaaacagcttctgggctgcctgatagacagtggagccttgcctgatggtcttcaggagagccaggagaggccagttgtcacgtgcctgaaacatgaggacttcgagttggctttccttctcttgaccaagggcgcagacccccgtgctatttctctcacggaaggtgatactcctttgcatgcagcactccacatctttctagagattaaagctgacattggttttagcttcctcagccatctgttggatctgttttggtccaaccccactgaattcgactacctcaaccccaatgtccaggacagcaatgggaacacgctgatgcacatcctcttccagaagggcatgctaaagcgcgtgaagaagctgttagacctgctggtgaagtttgacatcaacttcaatctgaagaacaaagagggcaaagatgcacggcaccggattaagaagaacgactctctgctcttggcctggaacaaagctctgatggagaacaggaggaggagccggcaggactctgctgcccacctggggaagctctcaaagtccactgcccctggtcacacatctcagctcaagtcccagggttcattcaagtcagtgccatgtggtgccactgccagaacactgcctgaaggaagtgcagtccctgacagctgggagactctcccaggtacccaggtgaccaggaaggagcctggagctctcaggccctgctcgctgagagactgccttatgcaggacatcacagttttgattcagcaggttgaagtggatccgtctttcccagaggactgtcttcagagctctgagcctctggaggcaggagctggcaaagaaggaaagaaagatgacaagccgactctgggtgcaggggcccctgactgtagtgaggtgggggaaggacatgctcaggtgggccttggggccttgcagcttgtgcctgatgataacagggggaaggagggcaatgatgatcaggatgactggagcacgcaggagattgaggcctgcctccaggacttcgataacatgacctgggagatcgagtgcacttcagaaatgctgaagaagctgtctagtaaggtaatgaccaaggtcatcaagaagaaaatcatccttgccattcagcagctgggaaatggcgagtggacccagggcctgcagaagcgactgaagcacctgaaaggaagcatccagctcttcgaagctaagctggacaaaggagcccggatgctctgggagctcgccattgacttctcccctcgatgcagtgagaaccctgagaagatcattgccacggagcagaacacgtgtgcaatggagaaatcagggcggatctacacggaaatcatccggatttgggacatcgtcttagatcactgcaaactggctgattccatcaaggccatctgcaatgcctacaaccggggcttgtcctgtgtcctgcggaagaagctgaaaggtatcaataaaggccaagtgtcagctaacatgaaaattcaaaagcgtatacctcgctgctatgtggaggacacagaggccgagaagggcagggagcatgtcaatcctgagtactttcccccagccagtgcagtggagacagaatataacatcatgaagttccacagcttcagcaccaacatggcctttaacatcctcaatgacacgacagccacagtggagtaccccttccgggtgggtgagcttgagtacgcggtgatcgacctcaatcccaggccactggagcccatcatccttattgggcgaagtggcactgggaagacaacctgctgcttgtacagattgtggaagaaattccacgtttactgggaaaaagctgagcaggcaggaagcccattgctggccaaacaggtctggctgaagagaaggttggaagtggaacccggaaaagagagtccaggtggggaggaagaggaggaggaagaggacgaggaagaggaagattctattgaagtggaaacagtagaaagcatagatgagcaggagtatgaagcctgcgcaggaggagccggtgtggagccagcaggggacggccaagctgcagaagtatgtgcaccagaacatccccaccagctggagcatttacatcagatctttgtgaccaagaaccatgtgctgtgccaggaggtacaaaggaatttcattgagctttccaagtccaccaaggccactagtcattacaaaccactggaccccaacattcacaaactccaggacctgagggacgagaactttcctctgtttgtcacttccaagcagctgcttcttctgcttgatgcttctctgcccaaaccattttttctgagaaacgaagatggaagcttgaaaagaaccatcataggatggtctgcacaggaagagtcaaccattcctagttggcaagaggatgaagaggaggctgaggtggatggggactacagtgaggaggataaagctgtagaaatgcgtacgggtgacagtgacccccgggtgtacgtgacgtttgaggtgttcaaaaatgaaatatggcccaaaatgaccaaagggaggactgcctacaaccctgcactgatttggaaagaaataaaatcttttctaaagggttcttttgaggccctcagctgtccccatgggagactcactgaagaagtatataagaaattagggaggaaacggtgccccaatttcaaggaagaccggagtgagatctacagcctcttcagtctgtatcagcaaatcaggtcccagaaaggttattttgatgaagaggatgttctgtacaacatatcccggaggctgtcgaagctcagggtgctcccatggtccatccacgagctctatggtgatgagattcaagactttacccaggccgagctggcgctgctgatgaaatgcatcaatgaccccaactctatgttcctcacgggggacacggcccagagcatcatgaagggcgtggccttccgcttcagcgatctgcgctctctgttccattatgccagcagaaacaccatagacaagcagtgtgctgtccggaagcccaagaagatccaccagctgtaccagaattacaggtcccactcaggaatcctcaatctggcatctggagtggtggatttacttcagttctatttcccagaatcttttgatcgccttccaagggattctggcctctttgatggtcctaagccaactgttctggagtcttgtagtgtaagcgacttggcaattttgctacgagggaataaaaggaaaactcagcccattgaatttggagcccaccaggtaatccttgtggccaatgaaacggcaaaggagaaaattccagaagagctggggttagcacttgtgctaacaatttatgaagcaaaaggcttagaatttgatgatgtcctcctttacaacttttttactgattctgaggcttataaggaatggaagatcatttcctcattcacacctacctcaactgactccagagaggaaaaccggccattggttgaagtacccctggacaaaccaggctcttctcagggtcgatctctcatggtgaatccagaaatgtacaagctcctcaacggagagctgaagcagctgtacaccgccatcacacgggctcgggtcaacctctggatctttgatgaaaaccgagagaaacgggctcccgcattcaaatatttcattagaagagattttgtccaagttgtaaagacagatgaaaataaagactttgatgatagcatgttcgttaagacctcaactcctgcggagtggattgcacagggagattactacgccaagcaccagtgctggaaggttgcagccaagtgttaccagaaaggaggtgcatttgagaaggagaagttggccctggcccatgacactgccctgagcatgaaatccaagaaagtcagccccaaggaaaagcagttggaatatttggaattggctaagacctatttggagtgcaaagagccaacactgtcccttaagtgtctgagctatgccaaggagttccagctctctgcccagctgtgcgagaggctgggaaagataagagatgctgcctatttctataagcgaagccagtgctacaaagacgctttcagatgctttgagcagattcaggaatttgatctagcactcaaaatgtactgccaagaggagctttttgaagaagctgctattgcagtggaaaagtatgaagaaatgctaaagactaagacccttcccatttccaagctctcctattctgccagtcagttttacttggaagctgcagcaaagtatctgagtgcaaataagatgaaggaaatgatggctgtcctctcaaagctagacatagaagaccagctggtgttcttgaagtctcggaaacgcttagcagaagctgcagacctgctgaacagggaaggtaggagagaagaggctgccctgctgatgaagcaacatggctgcctcctggaggctgccaggctcactgccgacaaggacttccaggcctcatgtctgctgggggccgcccgcctcaatgtggccagggattccgacatagaacacaccaaggacattctgagagaagcacttgatatctgctatcaaactggccagttgtctggcattgcggaggcccacttcctgcaaggggtaatcctgagagactttcagaagctcagggatgccttcttcaagtttgacacgctcaaccactcagctggagtggtggaagcactctacgaagcagccagccagtgtgaggccgagcctgagaagattctgggcctggctccagggggcttggaaatcctcctcagtctggtcagggctctcaaaagagtgaccaacaatgctgagaaggaaatggtcaaatcttgctttgagttttttgggatttcccaggtggatgccaagtattgccagatagctcagaatgaccctgggcccatattaagaataatttttgacctggatttgaacttgagagagaaaaaaacaaaagatcattttttgataatgactgaccaagtgaaattagccctaaacaaacaccttttgggcaggctgtgtcagatcacacggagcctgcttgggaagacctaccgaggagtctgcatgaggtttattgtaggcttaaaatgtgaggatgaaaactgtgaacattttcacaggcctctgcggcgttgtgaagccaagtgtttagttcagtcgaaaatgaacttggtggcaatcaacgggttgcttttggaagccaaaaaagtattccctaaaatcttagcagaagaacttaaagaaattgattatattttgtctacagatatgtatggcctttgcaagtccattctggatgtccttttccctaagcatttccatcagagagtgttgtcagaaaaccccatggcatgcaaagaaatcctcaaaccaaattacaaatccttccggttctacagatttgctttgaaggagtacatccactttctgtttgaaaatgaaagcgcacgcaaccgccgggaatccacagacctgtggctgagtgccatgcaagctttccttctctcttccaactacccggaggagtttgaaaagctgctccaccaggaggaggacaactacaacagggaactcaaagctctagagtctgaaaaggatgaaaggggcagggggagaggcagcaggataaaaggaatagaagggaaatttggcatgctggcacccaacagggatgatgaaaatatggacaagacccacctgtgcttcatccggcttctggagaattgcattgatcaattctacgtgtacaggaacccagaagactacaagaggctctttttccgtttcatgaatgtcctcatcaagaggtgcaaagaaccactcatccccagcattggaaacacagtagccctcctggagttccagttcatccactgtggggtggtgctggcccgcctctggaagaatgtcattctatgcctccccaagagctacattgcactcttgcactactgggagttcctgtttagcaagaaggacaaggagcttggggatgtgttctccatcattcaggaatacaaacccaaggacgtgacaagagccattcaggatttccggttccatctctcctacctcgccaaggtgctatgtggctatgagaatgtgaacttcaacgtcctgcttgatgccttcagtgaaatagactatgtggtctcgggtgaggctgagcggacactggtgctgtgcttggtgatgctagtgaatgctgaggagatcctgcagccatactgcaagcctctcctgtatcgccacttccgggagattgagtcaaggctgcagctcatgagcatggactgccctggccaggttcccgagaggctcctgaaggtggtgaagcgggtcttggtggcagtcaatgtgaagtctgtggctgaggcactgcaggacctgctctttgagcgggatgaagagtacctaatggactgtgactggcggtgggaccctgtgcacaccaaagggtccatagtccgtggcctctattatgaggaggtcagactaaaccgcctgctctgtttggaccctgtggactactttgctgaacctgagtgtgagtttggccaggatgagatggatgaactggcattagaagaccgagaccacgtcctggccaccattctttcccaaaagcaacggaaggcctccatacagcggaagttgaggagggcatgcctggtggtgtctctgtgcatcagttggaggagaagagtgggcacccagatggagcgtgtcagggaggaggccagggagcccagggctgggaacttcaaaaaggcagacgtggacaggacccagtgtgacctatgtggagtgaagtttacccgtggcccagagaactatttcagccccagcaaagcgtttgagggggcagcttccgaggtggcagtcctttccagggctgagctggaaagggaggagtgtcaggagaggaacagcgagtcttacgagcagcatatccatctagaacaccaccagaggcagcaagtggcctaccagaaatactcagaatttttccacgagaaggtggacccggccattgatgaaggcaagctggtggtgcaggacatcgagcaaagtgtatggatccacagtcacgtgggctccaaggagcacagccacatgctgcagaaggtccaggagcacatcaagagggtttcggatatggtggaggacctctacaggcggaaggcctgggctggcgcggaggaggcgatgactcggctggtcaacattctgatcctgtcagtcagggatgcacgagactggttgatgaaaacagagacccgcttaaagaaggaaggtattgttcaggaagatgattatgaaaatgaagttgaagactttggtgagcttcggcctagaaggcgttctcggaaatgtggaaagcagagaaaatactaatgtccacacagctgcagcctcctcatccttcggaacattccattctgacttagaattctgagcgctggggcagaagacaaaaagaatgtgaattagcattttaaaaataggggagtctaacaacaccattgctttttattctcattacttctctttcagtggcttaggatctgattgctccctcacctctaaagtgtttccaagtagagtctggcagtattagtttcccccacaaacaaattcaggtagagaagttgtagtcgaagggaatgttgggactcctcactgcatggtccctggggtgtctggctcatccccatcatgacatgagttggtagcagaggactaggtgttaggacagactctcctcacctcagttgctgctgctctgggccaggaaatctctctatggattccctcatctcctgccacactgctgcagcatcaagtgtgctatgagagctgtatgtgcccaggggtgggccctgccactggccaccccgagcccaggacgcattctggtcatctctgagcccacttgtagtgtagcttcttctgttagagatgttagccttttctctctgtggcgacttttctgccttcccttcttctgttttttgtgatcattcttagctacctgtgccaagtcacagttagactacctcagaatgtagtcaagaattcacccagtgttctttggatgtcccttccctagggggaaaggctggggaatgttgctgggagcattcccagctgcctctccaaagtggtcctaactctgccttggctatggtgcagacattccaaaaagtgttttgtatacagccctgtacatctagttttcttggttctccctggcaagttcgctaccctagcttaggctgacgttctgatgagtctctgcttgctgagctcatcactgtgggatggtgacctgcagagctgcagattggagcaagtggacagaggagggagccagctaagccaaatccgtcactgccacttggctggcaggccttataagagggcggatctgggcccgtttgcaggaggccattgcctaccctctccccacagtgagccagcagccatcagctgatcccacctgggaaaccttcatgcctctctgatggttactgcccacccttaccccacccctcagctcagcctggtatggaaagcaaggtgcacgttggtctttgattgttctgtcctcacagcagagccagctttccccccatgttgctgctgcttttgctgctcatgctgcttgttgttttctcttccttatctttccaaattgtttccttgaaatgcttgtttccaatttttcttagattatgtttctaatttttattccaggtgtttttttttcttacttgacagaaaaaaagaaaaccccaacaatatcttgctgtattatcacattttttataaagttaaagcatttctctt

SEQ ID NO: 190443 - DNA, 476 bp, Homo sapiens
  Payload ID: 17621
  Gene Name: tetratricopeptide repeat and ankyrin repeat containing 1
  ENST ID: ENST00000463764
  CDS Start-End: 66-476
agaccggaaggtgaacatgccctgcacgggtctggcagcaagcgtctcccccgtctcctcacaggatggacctgacagcttacgctgagctgctgaaagaatccggcaaccaggttcttaagaatgggaacttctctttggccatcagaaagtacgatgaagccatccagattctcctgcagttataccagtggggggttcccccgagggacttggctgtgctgctgtgcaacaaatcaaatgcatttttcagccttgggaagtggaatgaggcatttgttgctgccaaggaatgtctccaatgggatccaacctacgtgaagggatactaccgagctggttattccttgctgaggttgcaccagccttacgaagccgctcgcatgttttttgagggtctgcgacttgtgcagagaagccaagaccaggcaccggttgctgatttccttgttggagtcttcaccactatgagcagt

SEQ ID NO: 190444 - DNA, 1467 bp, Homo sapiens
  Payload ID: 17622
  Gene Name: tetratricopeptide repeat domain 1
  Uniprot ID: Q99614
  ENST ID: ENST00000231238
  CDS Start-End: 111-989
atcgacggaagtgcacctgactgagcggaagtaggagctctcagaggctaagaaggtggagaccggagaagctgtgaggttctttagcgtcacctccctcactgggcagcatgggggagaagtcagagaactgtggggttccagaggatctgttaaatggtttgaaggttacagatactcaggaagccgagtgtgctggccctccagttcctgatcccaaaaatcagcattcccagagtaagctgctcagggatgatgaggcccatctccaggaggaccagggagaagaggagtgttttcatgactgcagtgcctcatttgaggaggagccaggagcggacaaggttgagaacaaatctaatgaagatgtgaattcctctgaactagatgaagaatacctaatagaactggaaaaaaacatgtcggatgaagagaaacagaaaagaagagaagagagcactagactaaaggaggagggaaatgaacagtttaagaaaggagattatatagaagctgaaagttcttatagtcgagccctcgaaatgtgcccatcctgcttccaaaaggagaggtcgattctattttcaaatagagctgcagcaaggatgaaacaggacaagaaagaaatggccatcaatgactgcagcaaagcaattcaattaaaccccagctatatcagggcaatattgaggagagcagagttgtatgagaagacggacaagctagatgaagccctggaagactataaatctatattagaaaaagatccatcaatacatcaagcaagagaagcttgtatgagattacctaagcaaattgaagaacgtaatgaaagactaaaagaagagatgttaggtaaattaaaagatcttgggaacttggttctccgaccttttgggctctccacggaaaatttccagatcaaacaggattcctctaccggctcgtactccatcaatttcgttcaaaatccaaataataacagataacaaagataacaaaagctttacaagctgacttggaattgtgtgctgcttgctgttagctaggggaaaggccctgccaatgtttaacttttaaaagcatcttatctaaaagaaaggctatccagtagagcccagtgctcccttgtccctcttttatgatcagggtgaaatgtacttcctgatgtaatgaacctaatttgatttccattttaaggtggtgtctgtgcagctggtgtccccgattctggctgtcctatgtccaggaagaagcccatttgttgaggctgaccttcctgatcatacacacacacagcccagcaaaagcctctcctgaaccaaacaaacctgttggttgggagactgcccagacatgattgatgacgggttcccgcctgctgtcccctccctgatcacacagctaacgaggctgcctccagcatttcctgatttcctctgtggtaataaaagctttctgtgctta

SEQ ID NO: 190445 - DNA, 543 bp, Homo sapiens
  Payload ID: 17622
  Gene Name: tetratricopeptide repeat domain 1
  ENST ID: ENST00000518560
  CDS Start-End: 1-492
gacaagaaagaaatggccatcaatgactgcagcaaagcaattcaattaaaccccagctatatcagggcaatattgaggagagcagagttgtatgagaagacggacaagctagatgaagccctggaagactataaatctatattagaaaaagatccatcaatacatcaagcaagagaagcttgtatgagattacctaagcaaattgaagaacgtaatgaaagactaaaagaagagatgttaggtaaattaaaagatcttgggaacttggttctccgaccttttgggctctccacggaaaatttccagatcaaacaggattcctctaccggctcgtggtgtctgtgcagctggtgtccccgattctggctgtcctatgtccaggaagaagcccatttgttgaggctgaccttcctgatcatacacacacacagcccagcaaaagcctctcctgaaccaaacaaacctgttggttgggagactgcccagacatgattgatgacgggttcccgcctgctgtcccctccctgatcacacagctaacga

SEQ ID NO: 190446 - DNA, 1432 bp, Homo sapiens
  Payload ID: 17622
  Gene Name: tetratricopeptide repeat domain 1
  Uniprot ID: Q99614
  ENST ID: ENST00000522793
  CDS Start-End: 108-986
atcgacggaagtgcacctgactgagcggaagtaggagctctcagaggctaagaaggtggagaccggagaagctgtgagctttagcgtcacctccctcactgggcagcatgggggagaagtcagagaactgtggggttccagaggatctgttaaatggtttgaaggttacagatactcaggaagccgagtgtgctggccctccagttcctgatcccaaaaatcagcattcccagagtaagctgctcagggatgatgaggcccatctccaggaggaccagggagaagaggagtgttttcatgactgcagtgcctcatttgaggaggagccaggagcggacaaggttgagaacaaatctaatgaagatgtgaattcctctgaactagatgaagaatacctaatagaactggaaaaaaacatgtcggatgaagagaaacagaaaagaagagaagagagcactagactaaaggaggagggaaatgaacagtttaagaaaggagattatatagaagctgaaagttcttatagtcgagccctcgaaatgtgcccatcctgcttccaaaaggagaggtcgattctattttcaaatagagctgcagcaaggatgaaacaggacaagaaagaaatggccatcaatgactgcagcaaagcaattcaattaaaccccagctatatcagggcaatattgaggagagcagagttgtatgagaagacggacaagctagatgaagccctggaagactataaatctatattagaaaaagatccatcaatacatcaagcaagagaagcttgtatgagattacctaagcaaattgaagaacgtaatgaaagactaaaagaagagatgttaggtaaattaaaagatcttgggaacttggttctccgaccttttgggctctccacggaaaatttccagatcaaacaggattcctctaccggctcgtactccatcaatttcgttcaaaatccaaataataacagataacaaagataacaaaagctttacaagctgacttggaattgtgtgctgcttgctgttagctaggggaaaggccctgccaatgtttaacttttaaaagcatcttatctaaaagaaaggctatccagtagagcccagtgctcccttgtccctcttttatgatcagggtgaaatgtacttcctgatgtaatgaacctaatttgatttccattttaaggtggtgtctgtgcagctggtgtccccgattctggctgtcctatgtccaggaagaagcccatttgttgaggctgaccttcctgatcatacacacacacagcccagcaaaagcctctcctgaaccaaacaaacctgttggttgggagactgcccagacatgattgatgacgggttcccgcctgctgtcccctccctgatcacacagctaacgaggctgcctccagcatttcctgatt

SEQ ID NO: 190447 - DNA, 2509 bp, Homo sapiens
  Payload ID: 17623
  Gene Name: tetratricopeptide repeat domain 12
  Uniprot ID: Q9H892
  ENST ID: ENST00000314756
  CDS Start-End: 20-2218
ttagggattccggttcacaatggatgctgataaagagaaagatttgcagaaatttcttaaaaatgtggatgaaatctccaatttaattcaggagatgaattctgatgacccagttgtgcaacagaaagctgtcctggagacagaaaagagactactgcttatggaggaagaccaggaggaggatgaatgcaggaccaccttgaacaagactatgatcagtcctccacaaactgctatgaagagtgcagaagaaataaactcagaggccttcttggcatctgtggagaaggatgcaaaggaacgagccaagagaagaagggaaaacaaagtcttggcggatgccctaaaagaaaaagggaatgaagcatttgctgaaggcaattatgaaacagctatcctgcgctacagtgagggtttggagaagctgaaggacatgaaagtgctgtacaccaaccgagcccaggcttatatgaaacttgaggactatgagaaggcactggtggattgtgagtgggctctcaagtgtgatgaaaaatgcacaaaagcatattttcacatgggaaaagccaacctggccctgaagaactacagtgtgtctagagagtgttataagaagatcttagaaataaaccccaagctgcaaacccaggtgaaaggttacctgaatcaagtagatcttcaggaaaaagcagaccttcaagaaaaggaagcccacgaactgctggattcaggaaagaacacagccgtgaccaccaagaacctcctggagaccctttccaagcctgaccagatccccttgttctatgctggggggattgagatcctgactgaaatgataaatgagtgcacagaacaaactttattcagaatgcacaatggatttagtatcatcagtgacaacgaggtcataagaaggtgtttttccacagcaggaaatgatgcagttgaagaaatggtctgtgtgtctgttctcaagctctggcaagcagtgtgcagcaggaacgaggaaaaccagcgtgtgctagtgatacaccatgacagggccaggctgttggccgccctcttgtcctccaaggtcctggccatccggcagcagagctttgccctgctgctgcatctcgcccagactgagagcggacggagcctgatcatcaaccaccttgacctgaccagattattggaagcgctggtgtcatttcttgatttctcggataaggaggccaacactgctatgggactgttcacagacttggctctggaagaaagattccaagtctggttccaggccaaccttccaggtgttctccctgcactcacaggcgttctgaagacagatcccaaggtaagcagctcctcggctctgtgccagtgcattgccatcatgggaaacctcagtgctgagcccactacccgaagacacatggcggcctgtgaggaatttggggatggctgcttgagcctcctggccaggtgtgaggaggatgtggacctgttcagagaggttatctacacactcctgggactcatgatgaacctgtgtcttcaggctccctttgtctctgaggtttgggctgtggaggtgagcagaaggtgcctgtctttactaaacagccaggatggaggaatcctgacaagagctgctggtgttctgagccggaccctttcttcctctctgaaaattgttgaggaggccttgcgagcaggagtggtaaagaaaatgatgaaattcctgaagacaggaggtgagactgcatcacgttatgctataaagatactagctatctgcacgaatagttatcatgaagctcgggaagaagtaataagactggataaaaagttgagcgttatgatgaagctgctcagctcggaggatgaggttctggtgggcaacgctgccctctgccttggtaactgcatggaggtgcccaacgttgcgtcttccctgctaaagacggaccttttgcaggtcttgttaaagcttgcaggcagtgacacacagaagacggccgtgcaggtgaacgcaggcattgctctggggaagctgtgcacagctgagcccagagtgcctgccgagagcagtcatctccaatttggaagagagtctgctgcacctgaagctctgtctcctcgcaggtgggaagagatgtttcacatgctagtattctccctctccagtgtggatccacccccgccaccgccccaaacttgttacccctaacacatgctaccatgcagaccttccaggcagcatggaaaataccagcgccatctttcagaaggcctcatctccacttgccaggagccccgacaccacccttggagacacggcttgttccagatgaggaaactgaggtgcaaagcagttaagcaactggtccaagatctagaccaggtactcaaccaccccactccacatgcaactgtccccaacccatgcgattcatcctttccctgaaggcttgtgtggtgctgccttttaaattcataacataatgacttcattgttatg

SEQ ID NO: 190448 - DNA, 2541 bp, Homo sapiens
  Payload ID: 17623
  Gene Name: tetratricopeptide repeat domain 12
  ENST ID: ENST00000393020
  CDS Start-End: 406-2415
agtgcgtgcggcctggcctctttgcgcccggcgggcagcgcgcgtctggggcaggctccgcgcggggctcgggcacaggtccccgctgccgcagccctaccgagtgaagcactgagcgcggcgccgcttcgccatcacctggctctggccctctcaccctagcgtaggggggcactggccaggcagtgaggaccctgagatccatgccctgggagacagaggttgtctcctgtccatgcacccgcgcgcctgccttctaaccttcataccgttgggcagattaattcactggactaggcctctgttccgtgggagttgaaaagatttgacctggaagaaaccctagcgattattcagttaagccgcaaccccaccccctgttttatatagggattccggttcacaatggatgctgataaagagaaagatttgcagaaatttcttaaaaatgtggatgaaatctccaatttaattcaggagatgaattctgatgacccagttgtgcaacagaaagctgtcctggagacagaaaagagactactgcttatggaggaagaccaggaggaggatgaatgcaggaccaccttgaacaagactatgatcagtcctccacaaactgctatgaagagtgcagaagaaataaactcagaggccttcttggcatctgtggagaaggatgcaaaggaacgagccaagagaagaagggaaaacaaagtcttggcggatgccctaaaagaaaaagggaatgaagcatttgctgaaggcaattatgaaacagctatcctgcgctacagtgagggtttggagaagctgaaggacatgaaagtgctgtacaccaaccgagcccaggcttatatgaaacttgaggactatgagaaggcactggtggattgtgagtgggctctcaagtgtgatgaaaaatgcacaaaagcatattttcacatgggaaaagccaacctggccctgaagaactacagtgtgtctagagagtgttataagaagatcttagaaataaaccccaagctgcaaacccaggtgaaaggttacctgaatcaagtagatcttcaggaaaaagcagaccttcaagaaaaggaagcccacgaactgctggattcaggaaagaacacagccgtgaccaccaagaacctcctggagaccctttccaagcctgaccagatccccttgttctatgctggggggattgagatcctgactgaaatgataaatgagtgcacagaacaaactttattcagaatgcacaatggatttagtatcatcagtgacaacgaggtcataagaaggtgtttttccacagcaggaaatgatgcagttgaagaaatggtctgtgtgtctgttctcaagctctggcaagcagtgtgcagcaggaacgaggaaaaccagcgtgtgctagtgatacaccatgacagggccaggctgttggccgccctcttgtcctccaaggtcctggccatccggcagcagagctttgccctgctgctgcatctcgcccagactgagagcggacggagcctgatcatcaaccaccttgacctgaccagattattggaagcgctggtgtcatttcttgatttctcggataaggaggccaacactgctatgggactgttcacagacttggctctggaagaaagattccaagtctggttccaggccaaccttccaggtgttctccctgcactcacaggcgttctgaagacagatcccaaggtaagcagctcctcggctctgtgccagtgcattgccatcatgggaaacctcagtgctgagcccactacccgaagacacatggcggcctgtgaggaatttggggatggctgcttgagcctcctggccaggtgtgaggaggatgtggacctgttcagagaggttatctacacactcctgggactcatgatgaacctgtgtcttcaggctccctttgtctctgaggtttgggctgtggaggtgagcagaaggtgcctgtctttactaaacagccaggatggaggaatcctgacaagagctgctggtgttctgagccggaccctttcttcctctctgaaaattgttgaggaggccttgcgagcaggagtggtaaagaaaatgatgaaattcctgaagacaggaggtgagactgcatcacgttatgctataaagatactagctatctgcacgaatagttatcatgaagctcgggaagaagtaataagactggataaaagagccccgacaccacccttggagacacggcttgttccaggtaatcagagtcttctggttcaacaagcagaggagctgggattttccatcctaaagaggatgtggccgggatggaactccatcaccatcctgaagccacagcagaggtggcagaattctctggggcctcatccaagtggctgtgtatatcagtagttgctgagtcctattccataatacagcactatggtgtgtttagccattcattggttgaaggacatctgagcggtttccagattttagctattgcaaataaagctgcaatgagcattcatatacaga

SEQ ID NO: 190449 - DNA, 764 bp, Homo sapiens
  Payload ID: 17623
  Gene Name: tetratricopeptide repeat domain 12
  ENST ID: ENST00000442859
  CDS Start-End: 159-764
ggtcactgcgccatttcctgtccaaagctgggcgaatcaggtccctaaatcgccggggttgatgttggctttggaagaactatttgcagagcgttttctgcactggaaggagggctggaagctttctggaagcattgccgcacggattccggttcacaatggatgctgataaagagaaagatttgcagaaatttcttaaaaatgtggatgaaatctccaatttaattcaggagatgaattctgatgacccagttgtgcaacagaaagctgtcctggagacagaaaagagactactgcttatggaggaagaccaggaggaggatgaatgcaggaccaccttgaacaagactatgatcagtcctccacaaactgctatgaagagtgcagaagaaataaactcagaggccttcttggcatctgtggagaaggatgcaaaggaacgagccaagagaagaagggaaaacaaagtcttggcggatgccctaaaagaaaaagggaatgaagcatttgctgaaggcaattatgaaacagctatcctgcgctacagtgagggtttggagaagctgaaggacatgaaagtgctgtacaccaaccgagcccaggcttatatgaaacttgaggactatgagaaggcactggtggattgtgagtgggctctcaagtgtgatgaaaaatgcacaaaagcatattttcacatgggaaaagccaacctggccctgaagaactacagtgtgtctagagagtgttataagaagatcttagaa

SEQ ID NO: 190450 - DNA, 830 bp, Homo sapiens
  Payload ID: 17623
  Gene Name: tetratricopeptide repeat domain 12
  ENST ID: ENST00000455306
  CDS Start-End: 329-830
gtctggggcaggctccgcgcggggctcgggcacaggtccccgctgccgcagccctaccgagtgaagcactgagcgcggcgccgcttcgccatcacctggctctggccctctcaccctagcgtaggggggcactggccaggcagtgaggaccctgagatccatgccctgggagacagaggttgtctcctgtccatgcacccgcgcgcctgccttctaaccttcataccgttgggcagattaattcactggactaggcctctgttccgtgggagttgaaaagatttgacctggaagaaaccctagcgattattcaggattccggttcacaatggatgctgataaagagaaagatttgcagaaatttcttaaaaatgtggatgaaatctccaatttaattcaggagatgaattctgatgacccagttgtgcaacagaaagctgtcctggagacagaaaagagactactgcttatggaggaagaccaggaggaggatgaatgcaggaccaccttgaacaagactatgatcagtcctccacaaactgctatgaagagtgcagaagaaataaactcagaggccttcttggcatctgtggagaaggatgcaaaggaacgagccaagagaagaagggaaaacaaagtcttggcggatgccctaaaagaaaaagggaatgaagcatttgctgaaggcaattatgaaacagctatcctgcgctacagtgagggtttggagaagctgaaggacatgaaagtgctgtacaccaaccgagcccaggcttatatgaaacttgaggactatgagaaggcactggtggattgtgagtgggctctca

SEQ ID NO: 190451 - DNA, 669 bp, Homo sapiens
  Payload ID: 17623
  Gene Name: tetratricopeptide repeat domain 12
  ENST ID: ENST00000429951
  CDS Start-End: 348-669
ggtcactgcgccatttcctgtccaaagctgggcgaatcaggtccctaaatcgccggggttgatgttggctttggaagaactatttgcagagcgttttctgcactggaaggagggctggaagctttctggaagcattgccgcacgtaaatgagtgcctcttggcctaaaacagcagttggaatgaaagggatcaccctgctgttattcattgacataaacaaaactgtcataaaaataatcacttggctcttagttttagaaggctaataagcctgaccgttctgtttagtgctttattattattaatttcaccattatgctgcatcccttagggattccggttcacaatggatgctgataaagagaaagatttgcagaaatttcttaaaaatgtggatgaaatctccaatttaattcaggagatgaattctgatgacccagttgtgcaacagaaagctgtcctggagacagaaaagagactactgcttatggaggaagaccaggaggaggatgaatgcaggaccaccttgaacaagactatgatcagtcctccacaaactgctatgaagagtgcagaagaaataaactcagaggccttcttggcatctgtggagaaggatgcaaaggaacgagccaagagaagaagggaaaacaaagtcttggcggatg

SEQ ID NO: 190452 - DNA, 2240 bp, Homo sapiens
  Payload ID: 17623
  Gene Name: tetratricopeptide repeat domain 12
  ENST ID: ENST00000483239
  CDS Start-End: 18-2153
agggattccggttcacaatggatgctgataaagagaaagatttgcagaaatttcttaaaaatgtggatgaaatctccaatttaattcaggagatgaattctgatgacccagttgtgcaacagaaagctgtcctggagacagaaaagagactactgcttatggaggaagaccaggaggaggatgaatgcaggaccaccttgaacaagactatgatcagtcctccacaaactgctatgaagagtgcagaagaaataaactcagaggccttcttggcatctgtggagaaggatgcaaaggaacgagccaagagaagaagggaaaacaaagtcttggcggatgccctaaaagaaaaagggaatgaagcatttgctgaaggcaattatgaaacagctatcctgcgctacagtgagggtttggagaagctgaaggacatgaaagtgctgtacaccaaccgagcccaggcttatatgaaacttgaggactatgagaaggcactggtggattgtgagtgggctctcaagtcattctcttttatgcagtgtgatgaaaaatgcacaaaagcatattttcacatgggaaaagccaacctggccctgaagaactacagtgtgtctagagagtgttataagaagatcttagaaataaaccccaagctgcaaacccaggtgaaaggttacctgaatcaagtagatcttcaggaaaaagcagaccttcaagaaaaggaagcccacgaactgctggattcaggaaagaacacagccgtgaccaccaagaacctcctggagaccctttccaagcctgaccagatccccttgttctatgctggggggattgagatcctgactgaaatgataaatgagtgcacagaacaaactttattcagaatgcacaatggatttagtatcatcagtgacaacgaggtcataagaaggtgtttttccacagcaggaaatgatgcagttgaagaaatggtctgtgtgtctgttctcaagctctggcaagcagtgtgcagcaggaacgaggaaaaccagcgtgtgctagtgatacaccatgacagggccaggctgttggccgccctcttgtcctccaaggtcctggccatccggcagcagagctttgccctgctgctgcatctcgcccagactgagagcggacggagcctgatcatcaaccaccttgacctgaccagattattggaagcgctggtgtcatttcttgatttctcggataaggaggccaacactgctatgggactgttcacagacttggctctggaagaaagattccaagtctggttccaggccaaccttccaggtgttctccctgcactcacaggcgttctgaagacagatcccaaggtaagcagctcctcggctctgtgccagtgcattgccatcatgggaaacctcagtgctgagcccactacccgaagacacatggcggcctgtgaggaatttggggatggctgcttgagcctcctggccaggtgtgaggaggatgtggacctgttcagagaggttatctacacactcctgggactcatgatgaacctgtgtcttcaggctccctttgtctctgaggtttgggctgtggaggtgagcagaaggtgcctgtctttactaaacagccaggatggaggaatcctgacaagagctgctggtgttctgagccggaccctttcttcctctctgaaaattgttgaggaggccttgcgagcaggagtggtaaagaaaatgatgaaattcctgaagacaggaggtgagactgcatcacgttatgctataaagatactagctatctgcacgaatagttatcatgaagctcgggaagaagtaataagactggataaaaagttgagcgttatgatgaagctgctcagctcggaggatgaggttctggtgggcaacgctgccctctgccttggtaactgcatggaggtgcccaacgttgcgtcttccctgctaaagacggaccttttgcaggtcttgttaaagcttgcaggcagtgacacacagaagacggccgtgcaggtgaacgcaggcattgctctggggaagctgtgcacagctgagcccagatttgctgctcaactgagaaagcttcatggcctagaaattctcaactctacgatgaaatacatcagtgattcttgagagagacagggtttgtgtgcatttggggaacacacagatgcacaccgtgtgttgttcctatgctaataaagacctttgatgtatcca

SEQ ID NO: 190453 - DNA, 594 bp, Homo sapiens
  Payload ID: 17623
  Gene Name: tetratricopeptide repeat domain 12
  ENST ID: ENST00000529850
  CDS Start-End: 52-594
actgcgccatttcctgtccaaagctgggcgaatcagggattccggttcacaatggatgctgataaagagaaagatttgcagaaatttcttaaaaatgtggatgaaatctccaatttaattcaggagatgaattctgatgacccagttgtgcaacagaaagctgtcctggagacagaaaagagactactgcttatggaggaagaccaggaggaggatgaatgcaggaccaccttgaacaagactatgatcagtcctccacaaactgctatgaagagtgcagaagaaataaactcagaggccttcttggcatctgtggagaaggatgcaaaggaacgagccaagagaagaagggaaaacaaagtcttggcggatgccctaaaagaaaaagggaatgaagcatttgctgaaggcaattatgaaacagctatcctgcgctacagtgagggtttggagaagctgaaggacatgaaagtgctgtacaccaaccgagcccagtgtgatgaaaaatgcacaaaagcatattttcacatgggaaaagccaacctggccctgaagaactacagtgtgtctagagagtgttataagaagatctta

SEQ ID NO: 190454 - DNA, 558 bp, Homo sapiens
  Payload ID: 17623
  Gene Name: tetratricopeptide repeat domain 12
  ENST ID: ENST00000527362
  CDS Start-End: 1-253
gaaggacatgaaagtgctgtacaccaaccgagcccaggcttatatgaaacttgaggactatgagaaggcactggtggattgtgagtgggctctcaagtgtgatgaaaaatgcacaaaagcatattttcacatgggaaaagccaacctggccctgaagaactacagtgtgtctagagagtgttataagaagatcttagaaataaaccccaagctgcaaacccaggtgttctccctgcactcacaggcgttctgaagacagatcccaaggtaagcagctcctcggctctgtgccagtgcattgccatcatgggaaacctcagtgctgagcccactacccgaagacacatggcggcctgtgaggaatttggggatggctgcttgagcctcctggccaggtgtgaggaggatgtggacctgttcagagaggttatctacacactcctgggactcatgatgaacctgtgtcttcaggctccctttgtctctgaggtttgggctgtggaggtgagcagaaggtgcctgtctttactaaacagccaggatggaggaatcctgaca

SEQ ID NO: 190455 - DNA, 2315 bp, Homo sapiens
  Payload ID: 17623
  Gene Name: tetratricopeptide repeat domain 12
  Uniprot ID: Q9H892
  ENST ID: ENST00000529221
  CDS Start-End: 106-2223
cttggtcccgccccgggcccctggctcctggccccgccccagcccaggcaggtcactgcgccatttcctgtccaaagctgggcgaatcagggattccggttcacaatggatgctgataaagagaaagatttgcagaaatttcttaaaaatgtggatgaaatctccaatttaattcaggagatgaattctgatgacccagttgtgcaacagaaagctgtcctggagacagaaaagagactactgcttatggaggaagaccaggaggaggatgaatgcaggaccaccttgaacaagactatgatcagtcctccacaaactgctatgaagagtgcagaagaaataaactcagaggccttcttggcatctgtggagaaggatgcaaaggaacgagccaagagaagaagggaaaacaaagtcttggcggatgccctaaaagaaaaagggaatgaagcatttgctgaaggcaattatgaaacagctatcctgcgctacagtgagggtttggagaagctgaaggacatgaaagtgctgtacaccaaccgagcccaggcttatatgaaacttgaggactatgagaaggcactggtggattgtgagtgggctctcaagtgtgatgaaaaatgcacaaaagcatattttcacatgggaaaagccaacctggccctgaagaactacagtgtgtctagagagtgttataagaagatcttagaaataaaccccaagctgcaaacccaggtgaaaggttacctgaatcaagtagatcttcaggaaaaagcagaccttcaagaaaaggaagcccacgaactgctggattcaggaaagaacacagccgtgaccaccaagaacctcctggagaccctttccaagcctgaccagatccccttgttctatgctggggggattgagatcctgactgaaatgataaatgagtgcacagaacaaactttattcagaatgcacaatggatttagtatcatcagtgacaacgaggtcataagaaggtgtttttccacagcaggaaatgatgcagttgaagaaatggtctgtgtgtctgttctcaagctctggcaagcagtgtgcagcaggaacgaggaaaaccagcgtgtgctagtgatacaccatgacagggccaggctgttggccgccctcttgtcctccaaggtcctggccatccggcagcagagctttgccctgctgctgcatctcgcccagactgagagcggacggagcctgatcatcaaccaccttgacctgaccagattattggaagcgctggtgtcatttcttgatttctcggataaggaggccaacactgctatgggactgttcacagacttggctctggaagaaagattccaagtctggttccaggccaaccttccaggtgttctccctgcactcacaggcgttctgaagacagatcccaaggtaagcagctcctcggctctgtgccagtgcattgccatcatgggaaacctcagtgctgagcccactacccgaagacacatggcggcctgtgaggaatttggggatggctgcttgagcctcctggccaggtgtgaggaggatgtggacctgttcagagaggttatctacacactcctgggactcatgatgaacctgtgtcttcaggctccctttgtctctgaggtttgggctgtggaggtgagcagaaggtgcctgtctttactaaacagccaggatggaggaatcctgacaagagctgctggtgttctgagccggaccctttcttcctctctgaaaattgttgaggaggccttgcgagcaggagtggtaaagaaaatgatgaaattcctgaagacaggaggtgagactgcatcacgttatgctataaagatactagctatctgcacgaatagttatcatgaagctcgggaagaagtaataagactggataaaaagttgagcgttatgatgaagctgctcagctcggaggatgaggttctggtgggcaacgctgccctctgccttggtaactgcatggaggtgcccaacgttgcgtcttccctgctaaagacggaccttttgcaggtcttgttaaagcttgcaggcagtgacacacagaagacggccgtgcaggtgaacgcaggcattgctctggggaagctgtgcacagctgagcccagatttgctgctcaactgagaaagcttcatggcctagaaattctcaactctacgatgaaatacatcagtgattcttgagagagacagggtttgtgtgcatttggggaacacacagatgcacaccgtgtgttgttcctatgctaataaagacctttgatgtatccacttca

SEQ ID NO: 190456 - DNA, 566 bp, Homo sapiens
  Payload ID: 17623
  Gene Name: tetratricopeptide repeat domain 12
  ENST ID: ENST00000531164
  CDS Start-End: 54-566
actgcgccatttcctgtccaaagctgggcgaatcagccaatttaattcaggagatgaattctgatgacccagttgtgcaacagaaagctgtcctggagacagaaaagagactactgcttatggaggaagaccaggaggaggatgaatgcaggaccaccttgaacaagactatgatcagtcctccacaaactgctatgaagagtgcagaagaaataaactcagaggccttcttggcatctgtggagaaggatgcaaaggaacgagccaagagaagaagggaaaacaaagtcttggcggatgccctaaaagaaaaagggaatgaagcatttgctgaaggcaattatgaaacagctatcctgcgctacagtgagggtttggagaagctgaaggacatgaaagtgctgtacaccaaccgagcccaggcttatatgaaacttgaggactatgagaaggcactggtggattgtgagtgggctctcaagtgtgatgaaaaatgcacaaaagcatattttcacatgggaaaagccaacctggccctgaagaactacagtgtgtctagagagtgt

SEQ ID NO: 190457 - DNA, 2520 bp, Homo sapiens
  Payload ID: 17623
  Gene Name: tetratricopeptide repeat domain 12
  Uniprot ID: Q9H892
  ENST ID: ENST00000494714
  CDS Start-End: 28-2226
tgggcgaatcagggattccggttcacaatggatgctgataaagagaaagatttgcagaaatttcttaaaaatgtggatgaaatctccaatttaattcaggagatgaattctgatgacccagttgtgcaacagaaagctgtcctggagacagaaaagagactactgcttatggaggaagaccaggaggaggatgaatgcaggaccaccttgaacaagactatgatcagtcctccacaaactgctatgaagagtgcagaagaaataaactcagaggccttcttggcatctgtggagaaggatgcaaaggaacgagccaagagaagaagggaaaacaaagtcttggcggatgccctaaaagaaaaagggaatgaagcatttgctgaaggcaattatgaaacagctatcctgcgctacagtgagggtttggagaagctgaaggacatgaaagtgctgtacaccaaccgagcccaggcttatatgaaacttgaggactatgagaaggcactggtggattgtgagtgggctctcaagtgtgatgaaaaatgcacaaaagcatattttcacatgggaaaagccaacctggccctgaagaactacagtgtgtctagagagtgttataagaagatcttagaaataaaccccaagctgcaaacccaggtgaaaggttacctgaatcaagtagatcttcaggaaaaagcagaccttcaagaaaaggaagcccacgaactgctggattcaggaaagaacacagccgtgaccaccaagaacctcctggagaccctttccaagcctgaccagatccccttgttctatgctggggggattgagatcctgactgaaatgataaatgagtgcacagaacaaactttattcagaatgcacaatggatttagtatcatcagtgacaacgaggtcataagaaggtgtttttccacagcaggaaatgatgcagttgaagaaatggtctgtgtgtctgttctcaagctctggcaagcagtgtgcagcaggaacgaggaaaaccagcgtgtgctagtgatacaccatgacagggccaggctgttggccgccctcttgtcctccaaggtcctggccatccggcagcagagctttgccctgctgctgcatctcgcccagactgagagcggacggagcctgatcatcaaccaccttgacctgaccagattattggaagcgctggtgtcatttcttgatttctcggataaggaggccaacactgctatgggactgttcacagacttggctctggaagaaagattccaagtctggttccaggccaaccttccaggtgttctccctgcactcacaggcgttctgaagacagatcccaaggtaagcagctcctcggctctgtgccagtgcattgccatcatgggaaacctcagtgctgagcccactacccgaagacacatggcggcctgtgaggaatttggggatggctgcttgagcctcctggccaggtgtgaggaggatgtggacctgttcagagaggttatctacacactcctgggactcatgatgaacctgtgtcttcaggctccctttgtctctgaggtttgggctgtggaggtgagcagaaggtgcctgtctttactaaacagccaggatggaggaatcctgacaagagctgctggtgttctgagccggaccctttcttcctctctgaaaattgttgaggaggccttgcgagcaggagtggtaaagaaaatgatgaaattcctgaagacaggaggtgagactgcatcacgttatgctataaagatactagctatctgcacgaatagttatcatgaagctcgggaagaagtaataagactggataaaaagttgagcgttatgatgaagctgctcagctcggaggatgaggttctggtgggcaacgctgccctctgccttggtaactgcatggaggtgcccaacgttgcgtcttccctgctaaagacggaccttttgcaggtcttgttaaagcttgcaggcagtgacacacagaagacggccgtgcaggtgaacgcaggcattgctctggggaagctgtgcacagctgagcccagagtgcctgccgagagcagtcatctccaatttggaagagagtctgctgcacctgaagctctgtctcctcgcaggtgggaagagatgtttcacatgctagtattctccctctccagtgtggatccacccccgccaccgccccaaacttgttacccctaacacatgctaccatgcagaccttccaggcagcatggaaaataccagcgccatctttcagaaggcctcatctccacttgccaggagccccgacaccacccttggagacacggcttgttccagatgaggaaactgaggtgcaaagcagttaagcaactggtccaagatctagaccaggtactcaaccaccccactccacatgcaactgtccccaacccatgcgattcatcctttccctgaaggcttgtgtggtgctgccttttaaattcataacataatgacttcattgttatgaaa

SEQ ID NO: 190458 - DNA, 807 bp, Homo sapiens
  Payload ID: 17623
  Gene Name: tetratricopeptide repeat domain 12
  ENST ID: ENST00000525965
  CDS Start-End: 44-807
atttcctgtccaaagctgggcgaatcagggattccggttcacaatggatgctgataaagagaaagatttgcagaaatttcttaaaaatgtggatgaaatctccaatttaattcaggagatgaattctgatgacccagttgtgcaacagaaagctgtcctggagacagaaaagagactactgcttatggaggaagaccaggaggaggatgaatgcaggaccaccttgaacaagactatgatcagtcctccacaaactgctatgaagagtgcagaagaaataaactcagaggccttcttggcatctgtggagaaggatgcaaaggaacgagccaagagaagaagggaaaacaaagtcttggcggatgccctaaaagaaaaagggaatgaagcatttgctgaaggcaattatgaaacagctatcctgcgctacagtgagggtttggagaagctgaaggacatgaaagtgctgtacaccaaccgagcccagtctagagagtgttataagaagatcttagaaataaaccccaagctgcaaacccaggtgaaaggttacctgaatcaagtagatcttcaggaaaaagcagaccttcaagaaaaggaagcccacgaactgctggattcaggaaagaacacagccgtgaccaccaagaacctcctggagaccctttccaagcctgaccagatccccttgttctatgctggggggattgagatcctgactgaaatgataaatgagtgcacagaacaaactttattcagaatgcacaatggatttagtatcatcagtgacaacgaggtcataagaag

SEQ ID NO: 190459 - DNA, 535 bp, Homo sapiens
  Payload ID: 17623
  Gene Name: tetratricopeptide repeat domain 12
  ENST ID: ENST00000462711
  CDS Start-End: 1-249
gaggaggccttgcgagcaggagtggtaaagaaaatgatgaaattcctgaagacaggaggtgagactgcatcacgttatgctataaagatactagctatctgcacgaatagttatcatgaagctcgggaagaagtaataagactggataaaaagtgcctgccgagagcagtcatctccaatttggaagagagtctgctgcacctgaagctctgtctcctcgcaggtgggaagagatgtttcacatgctagtattctccctctccagtgtggatccacccccgccaccgccccaaacttgttacccctaacacatgctaccatgcagaccttccaggcagcatggaaaataccagcgccatctttcagaaggcctcatctccacttgccaggagccccgacaccacccttggagacacggcttgttccagttggttgaatctgcaaatttggaacccgagggtacagagggctgactgtatctgctttgttggagtccatctgattcattgtctaaatacaattaattgctccaaaa

SEQ ID NO: 190460 - DNA, 433 bp, Homo sapiens
  Payload ID: 17623
  Gene Name: tetratricopeptide repeat domain 12
  ENST ID: ENST00000524580
  CDS Start-End: 165-433
gcgcctgccttctaaccttcataccgttgggcagattaattcactggactaggcctctgttccgtgggagttgaaaagatttgacctggaagaaaccctagcgattattcagttaagccgcaaccccaccccctgttttatatagggattccggttcacaatggatgctgataaagagaaagatttgcagaaatttcttaaaaatgtggatgaaatcttctagagagtgttataagaagatcttagaaataaaccccaagctgcaaacccaggtgaaaggttacctgaatcaagtagatcttcaggaaaaagcagaccttcaagaaaaggaagcccacgaactgctggattcaggaaagaacacagccgtgaccaccaagaacctcctggagaccctttccaagcctgaccagatccccttgttctatgctgg

SEQ ID NO: 190461 - DNA, 2985 bp, Homo sapiens
  Payload ID: 17623
  Gene Name: tetratricopeptide repeat domain 12
  ENST ID: ENST00000464224
  CDS Start-End: 615-1067
aaagctgggcgaatcaggtcggtgccgcggggtaccccggaatcccccctgggagctggtcctgcactggccttcagagccgagcagaggacgctgctttgggccccagagcatgggaaggtcttggctgcggtctgggacggctgcggtctgggacctgcatggagggcccgggacttgcggacgcctgggagcggttgctgggcaacagtgcgtgcggcctggcctctttgcgcccggcgggcagcgcgcgtctggggcaggctccgcgcggggctcgggcacaggtccccgctgccgcagccctaccgagtgaagcactgagcgcggcgccgcttcgccatcacctggctctggccctctcaccctagcgtaggggggcactggccaggcagtgaggaccctgagatccatgccctgggagacagaggttgtctcctgtccatgcacccgcgcgcctgccttctaaccttcataccgttgggcagattaattcactggactaggcctctgttccgtgggagttgaaaagatttgacctggaagaaaccctagcgattattcagttaagccgcaaccccaccccctgttttatatagggattccggttcacaatggatgctgataaagagaaagatttgcagaaatttcttaaaaatgtggatgaaatctccaatttaattcaggagatgaattctgatgacccagttgtgcaacagaaagctgtcctggagacagaaaagagactactgcttatggaggaagaccaggaggaggatgaatgcaggaccaccttgaacaagactatgatcagtcctccacaaactgctatgaagagtgcagaagaaataaactcagaggccttcttggcatctgtggagaaggatgcaaaggaacgagccaagagaagaagggaaaacaaagtcttggcggatgccctaaaagaaaaagggaatgaagcatttgctgaaggcaattatgaaacagctatcctgcgctacagtgagggtttggagaagctgaaggacatgaaagtgctgtacaccaaccgagcccagcagtggtaatggctgtccactgttgctagccctgcgattctgtagcatcccttgtcaggttccctaagccctgccttcaccgtggaagaggtccctgtattcaactctcctcagttgcccagtgcaagtgtgccatctgtttcctggcaggaccatgactgatccaggcttatatgaaacttgaggactatgagaaggcactggtggattgtgagtgggctctcaagtgtgatgaaaaatgcacaaaagcatattttcacatgggaaaagccaacctggccctgaagaactacagtgtgtctagagagtgttataagaagatcttagaaataaaccccaagctgcaaacccaggtgaaaggttacctgaatcaagtagatcttcaggaaaaagcagaccttcaagaaaaggaagcccacgaactgctggattcaggaaagaacacagccgtgaccaccaagaacctcctggagaccctttccaagcctgaccagatccccttgttctatgctggggggattgagatcctgactgaaatgataaatgagtgcacagaacaaactttattcagaatgcacaatggatttagtatcatcagtgacaacgaggtcataagaaggtgtttttccacagcaggaaatgatgcagttgaagaaatggtctgtgtgtctgttctcaagctctggcaagcagtgtgcagcaggaacgaggaaaaccagcgtgtgctagtgatacaccatgacagggccaggctgttggccgccctcttgtcctccaaggtcctggccatccggcagcagagctttgccctgctgctgcatctcgcccagactgagagcggacggagcctgatcatcaaccaccttgacctgaccagattattggaagcgctggtgtcatttcttgatttctcggataaggaggccaacactgctatgggactgttcacagacttggctctggaagaaagattccaagtctggttccaggccaaccttccaggtgttctccctgcactcacaggcgttctgaagacagatcccaaggtaagcagctcctcggctctgtgccagtgcattgccatcatgggaaacctcagtgctgagcccactacccgaagacacatggcggcctgtgaggaatttggggatggctgcttgagcctcctggccaggtgtgaggaggatgtggacctgttcagagaggttatctacacactcctgggactcatgatgaacctgtgtcttcaggctccctttgtctctgaggtttgggctgtggaggtgagcagaaggtgcctgtctttactaaacagccaggatggaggaatcctgacaagagctgctggtgttctgagccggaccctttcttcctctctgaaaattgttgaggaggccttgcgagcaggagtggtaaagaaaatgatgaaattcctgaagacaggaggtgagactgcatcacgttatgctataaagatactagctatctgcacgaatagttatcatgaagctcgggaagaagtaataagactggataaaaagttgagcgttatgatgaagctgctcagctcggaggatgaggttctggtgggcaacgctgccctctgccttggtaactgcatggaggtgcccaacgttgcgtcttccctgctaaagacggaccttttgcaggtcttgttaaagcttgcaggcagtgacacacagaagacggccgtgcaggtgaacgcaggcattgctctggggaagctgtgcacagctgagcccagatttgctgctcaactgagaaagcttcatggcctagaaattctcaactctacgatgaaatacatcagtgattcttgagagagacagggtttgtgtgcatttggggaacacacagatgcacaccgtgtgttgttcctatgctaataaagacctttgatgtatcc

SEQ ID NO: 190462 - DNA, 3253 bp, Homo sapiens
  Payload ID: 17624
  Gene Name: tetratricopeptide repeat domain 13
  Uniprot ID: Q8NBP0
  ENST ID: ENST00000366661
  CDS Start-End: 9-2591
gagggaagatggcacctgccggctgctgctgctgctgctgcttctggggcggcgctgtggccgccgcgggcgccgcccggcgtgtcctgctgctgctgctgctgggggtcctgtccgccgggctgcggccaggcgccctggccaccgagcactactcgccgctctccctgctcaagcaggagctgcagcaccggcagcagcaggaggccccggcgggcggcggcggctgcagcccgcagtccggggactggggggaccagtactctgccgagtgcggcgagtcatcctttttgaacttccatgactcagactgcgaacccaagggatcatcaccctgtgactccttgctttccctcaacactgagaagattctgagccaggccaagtctattgcagaacagaagagattcccgtttgccactgataatgacagcacaaatgaagagttagctattgcttatgtcttgattggcagtggtctgtatgatgaagcaatacggcatttttcaacaatgcttcaggaggagcctgatctggttagtgcaatttatggccgagggatagcctatggaaagaagggactacatgacattaagaatgctgagcttgctctgttcgaactgagccgagtaattaccttggaaccagatcgtccagaggtatttgagcagcgagcagaaattctgtcccctctgggacgaattaatgaagcagtgaatgacctcactaaagctatccaactgcagccctcagcacggctgtacagacatcggggaaccctgtacttcatatcagaggactatgcaacagcccatgaagactttcagcagtccttagaactgaacaaaaaccagcctatagctatgctatacaaaggtttaactttctttcacagaggacttctgaaggaagctattgaatccttcaaagaagctttgaagcagaaagttgactttattgatgcatataaaagtctagggcaggcatatagagaactgggcaattttgaagcagccactgagagctttcaaaaggcactgttgctcaaccaaaatcatgtgcaaaccctccagctccggggaatgatgctctaccaccacggcagcttacaggaagcccttaagaactttaagcggtgtctgcagctagagccatataatgaagtgtgccagtatatgaaagggctcagccatgttgccatgggacagttttatgaagggataaaagcacaaacaaaagttatgctgaatgatcctctcccaggccagaaggctagccctgagtatcttaaagtaaagtatctccgagagtattctcgatatcttcatgcacaccttgataccccccttacggaatataacattgatgtggatctgcctggaagctttaaggaccactgggctaaaaatttgcctttcctcatagaagactacgaagagcagccagggttgcaaccccacataaaagatgtgttacatcagaattttgagagttataagcctgaagtacaggagctgatttgtgtggctgatcgtttgggatccctgatgcaatatgaaacacctggtttcctgccaaacaagagaatacacagagctatgggtttggccgcattggaggtcatgcaagccgtgcagcgtacatggaccaactcgaaagttcgaatgaatgggaagacacggttgatgcagtggagagacatgtttgacattgcagttaaatggagaaggattgctgacccagaccagcccgtgctgtggttagatcaaatgccagcacgaagtcttagcagaggttttaacaaccacattaatttaatcaggggtcaggtgatcaacatgagatacctagaatattttgagaaaatacttcattttattaaagacagaattcttgtttatcatggagctaataatcctaaaggattgctggaagttcgggaagccctggaaaaggtacacaaagtagaagaccttcttccgattatgaagcagtttaatactaaaacgaaggatgggttcaccgtgaacacaaaagttcccagccttaaagaccaagggaaggaatatgatggattcacaatcacgattacaggagacaaagttggcaatatattattttctgtggaaactcaaaccacggaagaaaggacacaattatatcatgctgaaatagatgcactttataaagatttgacagcaaaaggaaaagtattgattctttcatcagaatttggggaggctgatgctgtctgcaacttaatcttatccttagtttattacttttataatttaatgccactctctcgaggatccagtgtaattgcttactcggtcatcgtgggagcactgatggcaagtggaaaagaagtagcaggaaaaattcccaaagggaagttagtcgactttgaagctatgacagcccctggttcagaggcctttagcaaagtcgccaaaagctggatgaacttgaaaagtatttcaccttcttataagactcttccatcagtatcagaaacgtttccaacgttaagatcgatgattgaggtgctaaacacagactcttctccacgttgtcttaagaaactctagttctgctgctgtatttatacaagtaaagggccggacctcttgcttcttaagttattttttaaaacatggaattataaagaaattaggtcctctattacttttgataccaatttttataggaattgaatacttgaaatcattttctttacttttctgaaccataatgaaaatcatgaaagaggctttcggggggaaaaagctacttgacttggagggaaagcgtatgtattagccggcagcctgttggttcccacttataaagtcatataactccttccttacagtaaaaaaaattttcctcaacaactaaaatataatactgaagatgaacaaaaacaaaaccaaataggagtgtttgtattcctttagagatctggatatttttcaaagacttgctttttacgcacattgtgatagagcatcttttgttgactcacgtaacctccatgtgtgggtcctttgttttattagaaccatggaagaaggttcctgggccatcagtatgtgttgcagagctcacagccaggaacacttattttgaacaatgcagacagtacttgccagagtcccaaatgctgaattattgaaccatgtttttttttcctttgttgaaaaaaataaaccagggtgatttctataaatcaccagtttttggcattgga

SEQ ID NO: 190463 - DNA, 3112 bp, Homo sapiens
  Payload ID: 17624
  Gene Name: tetratricopeptide repeat domain 13
  Uniprot ID: Q8NBP0
  ENST ID: ENST00000366662
  CDS Start-End: 30-2450
gggctgtcgcgcatgcgccttgagggaagatggcacctgccggctgctgctgctgctgctgcttctggggcggcgctgtggccgccgcgggcgccgcccggcgtgtcctgctgctgctgctgctgggggtcctgtccgccgggctgcggccaggcgccctggccaccgagcactactcgccgctctccctgctcaagcaggagctgcagcaccggcagcagcaggaggccccggcgggcggcggcggctgcagcccgcagtccggggactggggggaccagtactctgccgagtgcggcgagtcatcctttttgaacttccatgactcagactgcgaacccaagggatcatcaccctgtgactccttgctttccctcaacactgagaagattctgagccaggccaagtctattgcagaacagaagagattcccgtttgccactgataatgacagcacaaatgaagagttagctattgcttatgtcttgattggcagtggtctgtatgatgaagcaatacggcatttttcaacaatgcttcagattctgtcccctctgggacgaattaatgaagcagtgaatgacctcactaaagctatccaactgcagccctcagcacggctgtacagacatcggggaaccctgtacttcatatcagaggactatgcaacagcccatgaagactttcagcagtccttagaactgaacaaaaaccagcctatagctatgctatacaaaggtttaactttctttcacagaggacttctgaaggaagctattgaatccttcaaagaagctttgaagcagaaagttgactttattgatgcatataaaagtctagggcaggcatatagagaactgggcaattttgaagcagccactgagagctttcaaaaggcactgttgctcaaccaaaatcatgtgcaaaccctccagctccggggaatgatgctctaccaccacggcagcttacaggaagcccttaagaactttaagcggtgtctgcagctagagccatataatgaagtgtgccagtatatgaaagggctcagccatgttgccatgggacagttttatgaagggataaaagcacaaacaaaagttatgctgaatgatcctctcccaggccagaaggctagccctgagtatcttaaagtaaagtatctccgagagtattctcgatatcttcatgcacaccttgataccccccttacggaatataacattgatgtggatctgcctggaagctttaaggaccactgggctaaaaatttgcctttcctcatagaagactacgaagagcagccagggttgcaaccccacataaaagatgtgttacatcagaattttgagagttataagcctgaagtacaggagctgatttgtgtggctgatcgtttgggatccctgatgcaatatgaaacacctggtttcctgccaaacaagagaatacacagagctatgggtttggccgcattggaggtcatgcaagccgtgcagcgtacatggaccaactcgaaagttcgaatgaatgggaagacacggttgatgcagtggagagacatgtttgacattgcagttaaatggagaaggattgctgacccagaccagcccgtgctgtggttagatcaaatgccagcacgaagtcttagcagaggttttaacaaccacattaatttaatcaggggtcaggtgatcaacatgagatacctagaatattttgagaaaatacttcattttattaaagacagaattcttgtttatcatggagctaataatcctaaaggattgctggaagttcgggaagccctggaaaaggtacacaaagtagaagaccttcttccgattatgaagtttaatactaaaacgaaggatgggttcaccgtgaacacaaaagttcccagccttaaagaccaagggaaggaatatgatggattcacaatcacgattacaggagacaaagttggcaatatattattttctgtggaaactcaaaccacggaagaaaggacacaattatatcatgctgaaatagatgcactttataaagatttgacagcaaaaggaaaagtattgattctttcatcagaatttggggaggctgatgctgtctgcaacttaatcttatccttagtttattacttttataatttaatgccactctctcgaggatccagtgtaattgcttactcggtcatcgtgggagcactgatggcaagtggaaaagaagtagcaggaaaaattcccaaagggaagttagtcgactttgaagctatgacagcccctggttcagaggcctttagcaaagtcgccaaaagctggatgaacttgaaaagtatttcaccttcttataagactcttccatcagtatcagaaacgtttccaacgttaagatcgatgattgaggtgctaaacacagactcttctccacgttgtcttaagaaactctagttctgctgctgtatttatacaagtaaagggccggacctcttgcttcttaagttattttttaaaacatggaattataaagaaattaggtcctctattacttttgataccaatttttataggaattgaatacttgaaatcattttctttacttttctgaaccataatgaaaatcatgaaagaggctttcggggggaaaaagctacttgacttggagggaaagcgtatgtattagccggcagcctgttggttcccacttataaagtcatataactccttccttacagtaaaaaaaattttcctcaacaactaaaatataatactgaagatgaacaaaaacaaaaccaaataggagtgtttgtattcctttagagatctggatatttttcaaagacttgctttttacgcacattgtgatagagcatcttttgttgactcacgtaacctccatgtgtgggtcctttgttttattagaaccatggaagaaggttcctgggccatcagtatgtgttgcagagctcacagccaggaacacttattttgaacaatgcagacagtacttgccagagtcccaaatgctgaattattgaaccatgtttttttttcctttgttgaaaaaaataaaccagggtgatttctataaatcaccagtttttggcattgga

SEQ ID NO: 190464 - DNA, 492 bp, Homo sapiens
  Payload ID: 17624
  Gene Name: tetratricopeptide repeat domain 13
  ENST ID: ENST00000486879
  CDS Start-End: 1-372
gacattgcagttaaatggagaaggattgctgacccagaccagcccgtgctgtggttagatcaaatgccagcacgaagtcttagcagaggttttaacaaccacattaatttaatcaggggtcaggtgatcaacatgagatacctagaatattttgagaaaatacttcattttattaaagacagaattcttgtttatcatggagctaataatcctaaaggattgctggaagttcgggaagccctggaaaaggtacacaaagtagaagaccttcttccgattatgaaggtaactttagcatcagaatggcagtccatgtttttagaggaaaagaaaaccaacagcacttttttaaaaagaactcagaattattaaatgctatttgaaatcactcgtatgaacacattctgaataataaccaaaataaaagaacctacaggcatcagactcaaacagaaaaaacaacttgtgaggaagcagttaatatagaaaaaa

SEQ ID NO: 190465 - DNA, 529 bp, Homo sapiens
  Payload ID: 17624
  Gene Name: tetratricopeptide repeat domain 13
  ENST ID: ENST00000522399
  CDS Start-End: 32-529
aagggctgtcgcgcatgcgccttgagggaagatggcacctgccggctgctgctgctgctgctgcttctggggcggcgctgtggccgccgcgggcgccgcccggcgtgtcctgctgctgctgctgctgggggtcctgtccgccgggctgcggccaggcgccctggccaccgagcactactcgccgctctccctgctcaagcaggagctgcagcaccggcagcagcaggaggccccggcgggcggcggcggctgcagcccgcagtccggggactggggggaccagtactctgccgagtgcggcgctattgcttatgtcttgattggcagtggtctgtatgatgaagcaatacggcatttttcaacaatgcttcagattctgtcccctctgggacgaattaatgaagcagtgaatgacctcactaaagctatccaactgcagccctcagcacggctgtacagacatcggggaaccctgtacttcatatcagaggactatgcaacagcccatgaagactttcagcagtcctta

SEQ ID NO: 190466 - DNA, 1062 bp, Homo sapiens
  Payload ID: 17624
  Gene Name: tetratricopeptide repeat domain 13
  ENST ID: ENST00000481976
  CDS Start-End: 46-813
cctgagagccgggcaagggctgtcgcgcatgcgccttgagggaagatggcacctgccggctgctgctgctgctgctgcttctggggcggcgctgtggccgccgcgggcgccgcccggcgtgtcctgctgctgctgctgctgggggtcctgtccgccgggctgcggccaggcgccctggccaccgagcactactcgccgctctccctgctcaagcaggagctgcagcaccggcagcagcaggaggccccggcgggcggcggcggctgcagcccgcagtccggggactggggggaccagtactctgccgagtgcggcgagtcatcctttttgaacttccatgactcagactgcgaacccaagggatcatcaccctgtgactccttgctttccctcaacactgagaagattctgagccaggccaagtctattgcagaacagaagagattcccgtttgccactgataatgacagcacaaatgaagagttagctattgcttatgtcttgattggcagtggtctgtatgatgaagcaatacggcatttttcaacaatgcttcagattctgtcccctctgggacgaattaatgaagcagtgaatgacctcactaaagctatccaactgcagccctcagcacggctgtacagacatcggggaaccctgtacttcatatcagagaatgaggtagagagctgtgcagtgattagacaggaaccccgaaaccaaagactcttaaaagctgaagagaaatcagactttgaagaactgtggcgtccaagcatgctgaagctattgaatccttcaaagaagctttgaagcagaaagttgactttattgatgcatataaaagtctagggcaggcatatagagaactgggcaattttgaagcagccactgagagctttcaaaaggcactgttgctcaaccaaaatcatgtgcaaaccctccagctccggggaatgatgctctaccaccacggcagcttacaggaagcccttaagaactttaagcggtgtctgcagctagagccatataatgaagtgtgccagtatatgaaagggctca

SEQ ID NO: 190467 - DNA, 558 bp, Homo sapiens
  Payload ID: 17624
  Gene Name: tetratricopeptide repeat domain 13
  ENST ID: ENST00000522821
  CDS Start-End: 1-558
tctggggcggcgctgtggccgccgcgggcgccgcccggcgtgtcctgctgctgctgctgctgggggtcctgtccgccgggctgcggccaggcgccctggccaccgagcactactcgccgctctccctgctcaagcaggagctgcagcaccggcagcagcaggaggccccggcgggcggcggcggctgcagcccgcagtccggggactggggggaccagtactctgccgagtgcggcgagtcatcctttttgaacttccatgactcagactgcgaacccaagggatcatcaccctgtgactccttgctttccctcaacactgagaagattctgagccaggccaagtctattgcagaacagaagagattcccgtttgccactgataatgacagcacaaatgaagagttagctattgcttatgtcttgattggcagtggtctgtatgatgaagcaatacggcatttttcaacaatgcttcaggaagctattgaatccttcaaagaagctttgaagcagaaagttgactttattgatgcatataaaagtctagggcaggcat

SEQ ID NO: 190468 - DNA, 865 bp, Homo sapiens
  Payload ID: 17624
  Gene Name: tetratricopeptide repeat domain 13
  ENST ID: ENST00000466507
  CDS Start-End: 6-458
ggaagatggcacctgccggctgctgctgctgctgctgcttctggggcggcgctgtggccgccgcgggcgccgcccggcgtgtcctgctgctgctgctgctgggggtcctgtccgccgggctgcggccaggcgccctggccaccgagcactactcgccgctctccctgctcaagcaggagctgcagcaccggcagcagcaggaggccccggcgggcggcggcggctgcagcccgcagtccggggactggggggaccagtactctgccgagtgcggcgagtcatcctttttgaacttccatgactcagactgcgaacccaagggatcatcaccctgtgactccttgctttccctcaacactgagaagattctgagccaggccaagtctattgcagaacagaagagattcccgtttgccactgataatgacagcacaaatgaagagttagatatttactgattatgggataataaataggaaataaaaatttagatttgaaaggaaactttaagaaaattttctacaggcttattaagcaagaccagacagttatgagaagtgactgaggtccccacgatcacacggctgctattgcttatgtcttgattggcagtggtctgtatgatgaagcaatacggcatttttcaacaatgcttcaggaggagcctgatctggttagtgcaatttatggccgagggatagcctatggaaagaagggactacatgacattaagaatgctgagcttgctctgttcgaactgagccgagtaattaccttggaaccagatcgtccagaggtatttgagcagcgagcagaaattctgtcccctctgggacgaattaatgaagcagtgaatgacctcact

SEQ ID NO: 190469 - DNA, 2881 bp, Homo sapiens
  Payload ID: 17625
  Gene Name: tetratricopeptide repeat domain 14
  Uniprot ID: Q96N46
  ENST ID: ENST00000296015
  CDS Start-End: 133-2445
ggttgtgctgtctgtgtacttccggcagcctccagacagtttcttccgcttcctgtaccacccggctcaagtagcggacacggaacagggaactatcagcccgtcggcctccgggccctgcattctctagccatggaccgggaccttttgcggcagtcgctaaattgccacgggtcgtctttgctctctctacttcggagcgaacagcaggacaatccacacttccgtagcctcctggggtcggccgccgagccagcccggggcccgccgccccagcacccgttgcagggcagaaaagagaagagagttgacaacatcgagatacagaaattcatctccaaaaaagcggatctgctttttgcactttcctggaaatcagatgcacctgcaacttctgaaattaatgaagacagtgaagatcattatgcaatcatgccacctttagagcaattcatggagatacctagtatggatcggagagagctgtttttccgagatattgagcgtggtgatatagtgattggaagaattagttctattcgggaattcggttttttcatggtgttgatctgtttaggaagtggtatcatgagagatatagcccacttagaaatcacagctctttgtcccttaagagatgtgccttctcacagtaaccatggggatcctttatcatattaccaaactggtgacatcattcgagctggaatcaaggatattgacagataccatgaaaagctagcagtatctctgtatagctcttctcttccaccacacctatctggtattaaattaggtgtaattagctctgaagagcttcctttatactacaggagaagtgttgagctaaatagcaattctttggagtcctatgaaaatgtcatgcagagttccttgggatttgttaatccaggagtagttgaattccttctagaaaaactaggaatagatgaatctaatccaccatctttaatgagaggcctacaaagcaaaaatttctctgaagatgattttgcttctgcattgagaaaaaaacaatccgcatcttgggctttaaaatgtgtgaagatcggagttgactattttaaagttggacgccatgtggatgctatgaatgaatacaataaagctttggaaatagacaaacaaaacgtggaagctttggtagctcgtggagcattatatgcgacaaaaggaagtttgaacaaagcaatagaagattttgagcttgcattagaaaactgtccaactcacagaaatgcaagaaaatacctctgccagacacttgtagagagaggaggacagttagaagaagaagaaaagtttttaaatgctgaaagttactataagaaagctttggctttggatgagacttttaaagatgcagaggatgctttgcagaaacttcataaatatatgcagaaatctttggaattaagagaaaaacaagctgaaaaggaagaaaagcagaaaacaaagaaaatagaaacaagtgcagaaaagttgcgtaagctcttaaaagaagagaagaggctaaagaagaaaagaagaaaatcaacttcttcttcaagtgtttcttctgctgatgaatcagtgtcttcatcatcatcctcttcctcttctggtcacaaaaggcataagaaacataagaggaaccgttcagagtcttctcgcagttccagaaggcattcatctagggcatcctcaaatcagatagatcagaataggaaagatgagtgctacccagttccagctaatacttcagcatcttttcttaaccataaacaagaagtggagaaactactggggaagcaggataggttacagtatgaaaagacacagataaaagagaaagatagatgccctctctcttcatcttcacttgaaataccggatgattttggaggtaggtctgaagatccaagagatttttataacagctataaaacccaagcaggtagtagcaaaacagaaaagccatataaatcagaaagacatttttccagtagaagaaattcctcagattccttctgtaggaattcagaggacaagatttatggttataggagatttgaaaaggatatagagggaagaaaagagcactatagaaggtgggaaccaggttctgtgaggcattctacctcaccagcaagctcagaatactcttggaagtcagttgagaaatacaaaaaatacgctcactctggatcacgtgatttcagtagacatgagcaaagataccgtttaaatacaaatcaaggagaatatgaaagagaggacaattatggggaggatatcaaaacagaggttccagaagaagatgcactaagtagcaaagaacactcagaaagcagtgttaagaaaaatttacctcagaatttactgaatatatttaatcagatagctgaatttgaaaaagaaaaaggaaataagtcaaaaaattaatacaccaaggatatcggcaccattacacaaaatgccattaagtgaagtttttggttgtattagtcataacagttgagtgcagaaatctctgcttctaaaattatttgtagagattacaggaaacaaatgcttttaagtaagtttttctcaaattttgtttcagttctaggtcccttgtcacagcttggtttttagactttttatgtatatgtttatgtacagtatattactcttgacagtttgaatttcttcacctaaagataattctctgaaagtactgtttcttcattctattgcggtatatgagaattcctgggtgcatcttattctgctgtttgagagaaaaatttgtgcattgaacacttggatcatttttataaaaattaatttcattttcttttctgttaaattaaaaatcgtcagcttttgaaagatt

SEQ ID NO: 190470 - DNA, 2274 bp, Homo sapiens
  Payload ID: 17625
  Gene Name: tetratricopeptide repeat domain 14
  Uniprot ID: Q96N46
  ENST ID: ENST00000382584
  CDS Start-End: 52-2013
ggaacagggaactatcagcccgtcggcctccgggccctgcattctctagccatggaccgggaccttttgcggcagtcgctaaattgccacgggtcgtctttgctctctctacttcggagcgaacagcaggacaatccacacttccgtagcctcctggggtcggccgccgagccagcccggggcccgccgccccagcacccgttgcagggcagaaaagagaagagagttgacaacatcgagatacagaaattcatctccaaaaaagcggatctgctttttgcactttcctggaaatcagatgcacctgcaacttctgaaattaatgaagacagtgaagatcattatgcaatcatgccacctttagagcaattcatggagatacctagtatggatcggagagagctgtttttccgagatattgagcgtggtgatatagtgattggaagaattagttctattcgggaattcggttttttcatggtgttgatctgtttaggaagtggtatcatgagagatatagcccacttagaaatcacagctctttgtcccttaagagatgtgccttctcacagtaaccatggggatcctttatcatattaccaaactggtgacatcattcgagctggaatcaaggatattgacagataccatgaaaagctagcagtatctctgtatagctcttctcttccaccacacctatctggtattaaattaggtgtaattagctctgaagagcttcctttatactacaggagaagtgttgagctaaatagcaattctttggagtcctatgaaaatgtcatgcagagttccttgggatttgttaatccaggagtagttgaattccttctagaaaaactaggaatagatgaatctaatccaccatctttaatgagaggcctacaaagcaaaaatttctctgaagatgattttgcttctgcattgagaaaaaaacaatccgcatcttgggctttaaaatgtgtgaagatcggagttgactattttaaagttggacgccatgtggatgctatgaatgaatacaataaagctttggaaatagacaaacaaaacgtggaagctttggtagctcgtggagcattatatgcgacaaaaggaagtttgaacaaagcaatagaagattttgagcttgcattagaaaactgtccaactcacagaaatgcaagaaaatacctctgccagacacttgtagagagaggaggacagttagaagaagaagaaaagtttttaaatgctgaaagttactataagaaagctttggctttggatgagacttttaaagatgcagaggatgctttgcagaaacttcataaatatatgcagaaatctttggaattaagagaaaaacaagctgaaaaggaagaaaagcagaaaacaaagaaaatagaaacaagtgcagaaaagttgcgtaagctcttaaaagaagagaagaggctaaagaagaaaagaagaaaatcaacttcttcttcaagtgtttcttctgctgatgaatcagtgtcttcatcatcatcctcttcctcttctggtcacaaaaggcataagaaacataagaggaaccgttcagagtcttctcgcagttccagaaggcattcatctagggcatcctcaaatcagatagatcagaataggaaagatgagtgctacccagttccagctaatacttcagcatcttttcttaaccataaacaagaagtggagaaactactggggaagcaggataggttacagtatgaaaagacacagataaaagagaaagatagatgccctctctcttcatcttcacttgaaataccggatgattttggagtgtactcctatttatttaaaaagttaactataaaacagcctcaggcaggtccttcaggagatattccagaagagggcattgttatcatagatgacagctccattcatgttactgaccctgaagaccttcaagtgggacaagatatggaggtggaagacagtggtattgatgatcctgaccacgggtaggcttaggtttatgtgtgtgtatgtgtcttagtttttaacaaaaaaattaaaaagtaaaaaaactaaaaatagaaaaatgcttagagaataaggatataaagaatatttttgtgcagttgaacaatgagtgcttaagctaaatgtcatcacaaaagagtaaaaaaattttacaaaattaaaaatgtttaaagttaaaaagctctaggaagctaaggtcaatttattattggagaaataaaattatttttatgaatttactgt

SEQ ID NO: 190471 - DNA, 4568 bp, Homo sapiens
  Payload ID: 17625
  Gene Name: tetratricopeptide repeat domain 14
  Uniprot ID: Q96N46
  ENST ID: ENST00000412756
  CDS Start-End: 70-1389
ggctcaagtagcggacacggaacagggaactatcagcccgtcggcctccgggccctgcattctctagccatggaccgggaccttttgcggcagtcgctaaattgccacgggtcgtctttgctctctctacttcggagcgaacagcaggacaatccacacttccgtagcctcctggggtcggccgccgagccagcccggggcccgccgccccagcacccgttgcagggcagaaaagagaagagagttgacaacatcgagatacagaaattcatctccaaaaaagcggatctgctttttgcactttcctggaaatcagatgcacctgcaacttctgaaattaatgaagacagtgaagatcattatgcaatcatgccacctttagagcaattcatggagatacctagtatggatcggagagagctgtttttccgagatattgagcgtggtgatatagtgattggaagaattagttctattcgggaattcggttttttcatggtgttgatctgtttaggaagtggtatcatgagagatatagcccacttagaaatcacagctctttgtcccttaagagatgtgccttctcacagtaaccatggggatcctttatcatattaccaaactggtgacatcattcgagctggaatcaaggatattgacagataccatgaaaagctagcagtatctctgtatagctcttctcttccaccacacctatctggtattaaattaggtgtaattagctctgaagagcttcctttatactacaggagaagtgttgagctaaatagcaattctttggagtcctatgaaaatgtcatgcagagttccttgggatttgttaatccaggagtagttgaattccttctagaaaaactaggaatagatgaatctaatccaccatctttaatgagaggcctacaaagcaaaaatttctctgaagatgattttgcttctgcattgagaaaaaaacaatccgcatcttgggctttaaaatgtgtgaagatcggagttgactattttaaagttggacgccatgtggatgctatgaatgaatacaataaagctttggaaatagacaaacaaaacgtggaagctttggtagctcgtggagcattatatgcgacaaaaggaagtttgaacaaagcaatagaagattttgagcttgcattagaaaactgtccaactcacagaaatgcaagaaaatacctctgccagacacttgtagagagaggaggacagttagaagaagaagaaaagtttttaaatgctgaaagttactataagaaagctttggctttggatgagacttttaaagatgcagaggatgctttgcagaaacttcataaatatatgcaggtgattccttatttcctcttagaaatttagtgatatttgaaataatgcccaaacttaattttctcctgaggaaaactattctacattacttaagtaaggcattatgaaaagtttctttttaggtatagtttttcctaattgggtttgacattgcttcatagtgcctctgtttttgtccataatcgaaagtaaagatagctgtgagaaaactattacctaaatttggtatgttgttttgagaaatgtccttatagggagctcacctggtggtttttaaattattgttgctactataattgagctaattataaaaacctttttgagacatattttaaattgtcttttcctgtaatactgatgatgatgttttctcatgcattttcttctgaattggaccattgctgctgtgtctgtgacatctggtgctgctcatccccatccacaaactggaaaatgatttcctatgtaatcatgcatccaactgggctgtgctatttttttaaatggtttgtatttgaacatggtgattcctccttcacttcaccttaacggaatgtctttatttgaattttatttgtaaaatgtgtcctgtttaaatttttcaatctttaaaaataatttttatgtactttttttttttttttaacctttcttgcactctgggtcatgggtaccactgcaatggcttcccctttttttatgggataccaactgcaatatggtcctcaatgctgttctggccatttcaatgactaatgccaaacatctgtatgactaatttttttatgttaaaaaaatactgtttaatgctggctctatggtgatttggttttactaaattgggtttctcgttgggggtggtcttttgaatactgggttttatatattctgctatttttaacgtgtggtttttttcgatatctgggttctaaaagaaatctttggaattaagagaaaaacaagctgaaaaggaagaaaagcagaaaacaaagaaaatagaaacaagtgcagaaaagttgcgtaagctcttaaaagaagagaagaggtaaactataatattcagtatttttaaacttaaggcaactactgaattgaacccaaagtgccatactggaggtaaagtaaataaaaatatgaaagtatttcaagtgccaatcagtgactgttaagaatctttagcaaatatgtgttccatgtattttcttattaaagagatgaagtggaatttaaggctagaattctacaaaaaaagagtatcttagaattaaaatatagaataagttactttaattatgttttaggaagaaatattttagaactagagcagtggttctcaactaggggtggatttattcacccggggacatttgacaagatgtggagacatttttgattgccataactgatagggtgctactgcatctagtgtataatggtcagggatgctcttaaacattctgtaatgcacaggtcagctcccacccgcacccccaccccctaccaagaattatttggctgaaaataccaataatcaggtgaagaaaccatgaactagaggtagccaaataaaaaagttgagttctcctttatgtgttcagtagtcttaagtttttaaggtagtgttgaaaaaagtctgtctttcagagatgatggatttgcttacaatgatacctgtctgcaagcattttttcccccaaaagtgcttaatagtaaaattagatcttgtagtagccgagattattgtatcatttatctgaaccacagcttttataaaatctttaaaggaaacaaatagggcccacatctttatgaataatttagaaacatttttgtatatatatgacaaatgaactgttttttttaggctaaagaagaaaagaagaaaatcaacttcttcttcaagtgtttcttctgctgatgaatcagtgtcttcatcatcatcctcttcctcttctggtcacaaaaggcataagaaacataagaggaaccgttcagagtcttctcgcagttccagaaggcattcatctagggcatcctcaaatcagatagatcagaataggaaagatgagtgctacccagttccagctaatacttcagcatcttttcttaaccataaacaagaagtggagaaactactggggaagcaggataggttacagtatgaaaagacacagataaaagagaaagatagatgccctctctcttcatcttcacttgaaataccggatgattttggaggtaggtctgaagatccaagagatttttataacagctataaaacccaagcaggtagtagcaaaacagaaaagccatataaatcagaaagacatttttccagtagaagaaattcctcagattccttctgtaggaattcagaggacaagatttatggttataggagatttgaaaaggatatagagggaagaaaagagcactatagaaggtgggaaccaggttctgtgaggcattctacctcaccagcaagctcagaatactcttggaagtcagttgagaaatacaaaaaatacgctcactctggatcacgtgatttcagtagacatgagcaaagataccgtttaaatacaaatcaaggagaatatgaaagagaggacaattatggggaggatatcaaaacagaggttccagaagaagatgcactaagtagcaaagaacactcagaaagcagtgttaagaaaaatttacctcagaatttactgaatatatttaatcagatagctgaatttgaaaaagaaaaaggaaataagtcaaaaaattaatacaccaaggatatcggcaccattacacaaaatgccattaagtgaagtttttggttgtattagtcataacagttgagtgcagaaatctctgcttctaaaattatttgtagagattacaggaaacaaatgcttttaagtaagtttttctcaaattttgtttcagttctaggtcccttgtcacagcttggtttttagactttttatgtatatgtttatgtacagtatattactcttgacagtttgaatttcttcacctaaagataattctctgaaagtactgtttcttcattctattgcggtatatgagaattcctgggtgcatcttattctgctgtttgagagaaaaatttgtgcattgaacacttggatcatttttataaaaattaatttcattttcttttctgttaaattaaaaatcgtcagcttttgaaa

SEQ ID NO: 190472 - DNA, 706 bp, Homo sapiens
  Payload ID: 17625
  Gene Name: tetratricopeptide repeat domain 14
  ENST ID: ENST00000495660
  CDS Start-End: 306-706
tgggtggacggggggcgctcctgggttgtgcaatgcgggatgcgggctgaactttttctctggcactgcttggtagaggcgcagattccttagctaaaaatcccttgagctttcctatctgagttggaggcgtcactttttaagtttccccgctctccacctccagaaaagagaagagagttgacaacatcgagatacagaaattcatctccaaaaaagcggatctgctttttgcactttcctggaaatcagatgcacctgcaacttctgaaattaatgaagacagtgaagatcattatgcaatcatgccacctttagagcaattcatggagatacctagtatggatcggagagagctgtttttccgagatattgagcgtggtgatatagtgattggaagaattagttctattcgggaattcggttttttcatggtgttgatctgtttaggaagtggtatcatgagagatatagcccacttagaaatcacagctctttgtcccttaagagatgtgccttctcacagtaaccatggggatcctttatcatattaccaaactggtgacatcattcgagctggaatcaaggatattgacagataccatgaaaagctagcagtatctctgtatagctcttctcttccaccacacctatctggtattaaattaggtgtaattagctctgaagagcttcctttatactacag

SEQ ID NO: 190473 - DNA, 741 bp, Homo sapiens
  Payload ID: 17625
  Gene Name: tetratricopeptide repeat domain 14
  ENST ID: ENST00000492617
  CDS Start-End: 185-741
gaggaagtggagccgcggccgtgagcacaggacgatcgcgcgctgaaaagagaagagagttgacaacatcgagatacagaaattcatctccaaaaaagcggatctgctttttgcactttcctggaaatcagatgcacctgcaacttctgaaattaatgaagacagtgaagatcattatgcaatcatgccacctttagagcaattcatggagatacctagtatggatcggagagagctgtttttccgagatattgagcgtggtgatatagtgattggaagaattagttctattcgggaattcggttttttcatggtgttgatctgtttaggaagtggtatcatgagagatatagcccacttagaaatcacagctctttgtcccttaagagatgtgccttctcacagtaaccatggggatcctttatcatattaccaaactggtgacatcattcgagctggaatcaaggatattgacagataccatgaaaagctagcagtatctctgtatagctcttctcttccaccacacctatctggtattaaattaggtgtaattagctctgaagagcttcctttatactacaggagaagtgttgagctaaatagcaattctttggagtcctatgaaaatgtcatgcagagttccttgggatttgttaatccaggagtagttgaattccttctagaaaaactaggaatagatgaatctaatccaccatctttaatgagaggcctacaaag

SEQ ID NO: 190474 - DNA, 3150 bp, Homo sapiens
  Payload ID: 17625
  Gene Name: tetratricopeptide repeat domain 14
  Uniprot ID: Q96N46
  ENST ID: ENST00000470669
  CDS Start-End: 52-1371
ggaacagggaactatcagcccgtcggcctccgggccctgcattctctagccatggaccgggaccttttgcggcagtcgctaaattgccacgggtcgtctttgctctctctacttcggagcgaacagcaggacaatccacacttccgtagcctcctggggtcggccgccgagccagcccggggcccgccgccccagcacccgttgcagggcagaaaagagaagagagttgacaacatcgagatacagaaattcatctccaaaaaagcggatctgctttttgcactttcctggaaatcagatgcacctgcaacttctgaaattaatgaagacagtgaagatcattatgcaatcatgccacctttagagcaattcatggagatacctagtatggatcggagagagctgtttttccgagatattgagcgtggtgatatagtgattggaagaattagttctattcgggaattcggttttttcatggtgttgatctgtttaggaagtggtatcatgagagatatagcccacttagaaatcacagctctttgtcccttaagagatgtgccttctcacagtaaccatggggatcctttatcatattaccaaactggtgacatcattcgagctggaatcaaggatattgacagataccatgaaaagctagcagtatctctgtatagctcttctcttccaccacacctatctggtattaaattaggtgtaattagctctgaagagcttcctttatactacaggagaagtgttgagctaaatagcaattctttggagtcctatgaaaatgtcatgcagagttccttgggatttgttaatccaggagtagttgaattccttctagaaaaactaggaatagatgaatctaatccaccatctttaatgagaggcctacaaagcaaaaatttctctgaagatgattttgcttctgcattgagaaaaaaacaatccgcatcttgggctttaaaatgtgtgaagatcggagttgactattttaaagttggacgccatgtggatgctatgaatgaatacaataaagctttggaaatagacaaacaaaacgtggaagctttggtagctcgtggagcattatatgcgacaaaaggaagtttgaacaaagcaatagaagattttgagcttgcattagaaaactgtccaactcacagaaatgcaagaaaatacctctgccagacacttgtagagagaggaggacagttagaagaagaagaaaagtttttaaatgctgaaagttactataagaaagctttggctttggatgagacttttaaagatgcagaggatgctttgcagaaacttcataaatatatgcaggtgattccttatttcctcttagaaatttagtgatatttgaaataatgcccaaacttaattttctcctgaggaaaactattctacattacttaagtaaggcattatgaaaagtttctttttaggtatagtttttcctaattgggtttgacattgcttcatagtgcctctgtttttgtccataatcgaaagtaaagatagctgtgagaaaactattacctaaatttggtatgttgttttgagaaatgtccttatagggagctcacctggtggtttttaaattattgttgctactataattgagctaattataaaaacctttttgagacatattttaaattgtcttttcctgtaatactgatgatgatgttttctcatgcattttcttctgaattggaccattgctgctgtgtctgtgacatctggtgctgctcatccccatccacaaactggaaaatgatttcctatgtaatcatgcatccaactgggctgtgctatttttttaaatgaaatctttggaattaagagaaaaacaagctgaaaaggaagaaaagcagaaaacaaagaaaatagaaacaagtgcagaaaagttgcgtaagctcttaaaagaagagaagaggtaaactataatattcagtatttttaaacttaaggcaactactgaattgaacccaaagtgccatactggaggtaaagtaaataaaaatatgaaagtatttcaagtgccaatcagtgactgttaagaatctttagcaaatatgtgttccatgtattttcttattaaagagatgaagtggaatttaaggctagaattctacaaaaaaagagtatcttagaattaaaatatagaataagttactttaattatgttttaggaagaaatattttagaactagagcagtggttctcaactaggggtggatttattcacccggggacatttgacaagatgtggagacatttttgattgccataactgatagggtgctactgcatctagtgtataatggtcagggatgctcttaaacattctgtaatgcacaggtcagctcccacccgcacccccaccccctaccaagaattatttggctgaaaataccaataatcaggtgaagaaaccatgaactagaggtagccaaataaaaaagttgagttctcctttatgtgttcagtagtcttaagtttttaaggtagtgttgaaaaaagtctgtctttcagagatgatggatttgcttacaatgatacctgtctgcaagcattttttcccccaaaagtgcttaatagtaaaattagatcttgtagtagccgagattattgtatcatttatctgaaccacagcttttataaaatctttaaaggaaacaaatagggcccacatctttatgaataatttagaaacatttttgtatatatatgacaaatgaactgttttttttaggctaaagaagaaaagaagaaaatcaacttcttcttcaagtgtttcttctgctgatgaatcagtgtcttcatcatcatcctcttcctcttctggtcacaaaaggcataagaaacataagaggaaccgttcagagtcttctcgcagttccagaaggcattcatctagggcatcctcaaatcagatagatcagaataggaaagatgagtgctacccagttccagctaatacttcagcatcttttcttaaccataaacaagaagtggagaaactactggggaagcaggataggttacagtatgaaaagacacagataaaagagaaagatagatgccctctctcttcatcttcacttgaaataccggatgattttggag

SEQ ID NO: 190475 - DNA, 836 bp, Homo sapiens
  Payload ID: 17625
  Gene Name: tetratricopeptide repeat domain 14
  ENST ID: ENST00000462895
  CDS Start-End: 46-624
gggaactatcagcccgtcggcctccgggccctgcattctctagccatggaccgggaccttttgcggcagtcgctaaattgccacgggtcgtctttgctctctctacttcggagcgaacagcaggacaatccacacttccgtagcctcctggggtcggccgccgagccagcccggggcccgccgccccagcacccgttgcagggcagaaaagagaagagagttgacaacatcgagatacagaaattcatctccaaaaaagcggatctgctttttgcactttcctggaaatcagatgcacctgcaacttctgaaattaatgaagacagtgaagatcattatgcaatcatgccacctttagagcaattcatggagatacctagtatggatcggagagagctgtttttccgagatattgagcgtggtgatatagtgattggaagaattagttctattcgggaattcggttttttcatggtgttgatctgtttaggaagtggtatcatgagagatatagcccacttagaaatcacagctctttgtcccttaagagatgtgccttctcacagtaaccatggggatcctttatcatattaccaaactggtgacatcattcgaggtgattagtttcatcatactaataaaaaactggaatcaaggatattgacagataccatgaaaagctagcagtatctctgtatagctcttctcttccaccacacctatctggtattaaattaggtgtaattagctctgaagagcttcctttatactacaggagaagtgttgagctaaatagcaattctttggagtcctatgaaaatgtcatgcagagttcc

SEQ ID NO: 190476 - DNA, 601 bp, Homo sapiens
  Payload ID: 17625
  Gene Name: tetratricopeptide repeat domain 14
  ENST ID: ENST00000491380
  CDS Start-End: 74-601
acccggctcaagtagcggacacggaacagggaactatcagcccgtcggcctccgggccctgcattctctagccatggaccgggaccttttgcggcagtcgctaaattgccacgggtcgtctttgctctctctacttcggagcgaacagcaggacaatccacacttccgtagcctcctggggtcggccgccgagccagcccggggcccgccgccccagcacccgttgcagggcagaaaagagaagagagttgacaacatcgagatacagaaattcatctccaaaaaagcggatctgctttttgcactttcctggaaatcagatgcacctgcaacttctgaaattaatgaagacagtgaagatcattatgcaatcatgccacctttagagcaattcatggagatacctagtatggatcggagagagctgtttttccgagatattgagcgtggtgatatagtgattggaagaattagttctattcgggaattcggttttttcatggtgttgatctgtttaggaagtggtatcatgagagatatagcccacttagaaatcacagttgttcaactactagctgtttcataccaaacaactaagata

SEQ ID NO: 190477 - DNA, 7052 bp, Homo sapiens
  Payload ID: 17625
  Gene Name: tetratricopeptide repeat domain 14
  ENST ID: ENST00000465065
  CDS Start-End: 68-595
ctcaagtagcggacacggaacagggaactatcagcccgtcggcctccgggccctgcattctctagccatggaccgggaccttttgcggcagtcgctaaattgccacgggtcgtctttgctctctctacttcggagcgaacagcaggacaatccacacttccgtagcctcctggggtcggccgccgagccagcccggggcccgccgccccagcacccgttgcagggcagaaaagagaagagagttgacaacatcgagatacagaaattcatctccaaaaaagcggatctgctttttgcactttcctggaaatcagatgcacctgcaacttctgaaattaatgaagacagtgaagatcattatgcaatcatgccacctttagagcaattcatggagatacctagtatggatcggagagagctgtttttccgagatattgagcgtggtgatatagtgattggaagaattagttctattcgggaattcggttttttcatggtgttgatctgtttaggaagtggtatcatgagagatatagcccacttagaaatcacagtaagttatttttgttacttggattgcttctgtttttgttaacgcatctcaatgcaagaactatatctttgcatgcagttgtgctcaagtatacctgccaagatgcttttggaaattaaatgttaattggagaaaaatagtttaaaaaaattagtgtaagttacccagtttctccctccatttctggtttttgggattttttaaatttaaactggttggcaggcacagtgttcttttctaaatgctcaaagaggtatcagtggacgtggtgaggttgattgatattcagacttatttcttgtagttgaacatatgtattcttaattagttaatatttggcattgtatattttcatgtggataatttggagagaagtttcatttatatatttacaataattaaatgtaagtggtttgtacattatattaagatactttgcccaagatggatagtcctgaatttaaactaatgtgtcacgataaaagattgggtatttgccatctatccaggcagataaaaaggaagaaaagcagaaggtattacagattggataacagacaaaatactttggagaattggcatttcattttcactggaatccttataccttttagacaaattttagtttgtttttgatgcatgttgtatactgtcataagccatcatatttggttcctaaactaatggaaagtttcatgagattttagttttttaactgaaccagcaaacatattttactgtgtttggacacggaaattacttttaactaaatccttatttaaatttttactttaggttgttcaactactagctgtttcataccaaacaactaagataaaagaagacactgttcttatcaaagcttgaaatgtctggtgttttaaaatacttctcattacaggctctttgtcccttaagagatgtgccttctcacagtaaccatggggatcctttatcatattaccaaactggtgacatcattcgaggtgattagtttcatcatactaataaaaaagtaatgattgttgaatttttgtttttattaatttaaaaaaatacagtctaagagggtagtgtttgggaaagtttatattttttatgttagtttacattttcttactaatcagcttagttctctttttttttttcttaagctggaatcaaggatattgacagataccatgaaaagctagcagtatctctgtatagctcttctcttccaccacacctatctggtattaaattaggtgtaattagctctgaagagcttcctttatactacaggtaatttatccgtattatttcaacaacagttcattacaaaagtctcttggattgaggaataccacatttttataacggttaaattacttcagacttggtaaaaggaaaccatatcataatattgccacaccatcttatgcaaaaaatggaattagtatttaaacctcaaatgatattatttctttactagaaatggaatgtcaaattagtcattttacaatttttgtgtttgtatttttttaaggagaagtgttgagctaaatagcaattctttggagtcctatgaaaatgtcatgcagagttccttgggatttgttaatccaggagtagttgaattccttctagaaaaactaggaatagatgaatctaatccaccatctttaatgagaggcctacaaaggtatagtacatcagtattactcttagatggtgaggggagtggcagtaagctcagaagctgcgtttagctgaaggacgtattttaccatcctaagccacctagtagcaggcatatgccaaaggttgaatgaaccaggtgatcccatcttctggactggactgtcttatcagtgattaatatgtgtaccatgtaaccaagtagagaaggatgcagaaactttttataagaattttgtgtgtatgctaaagaaaaatactgggtttttttgttttttgtttttgttttttgagtcggagtctcactgtgtcacccaggctggagtgcagtggcgctatctcagctcactgcaagctctgcccctgggttcacgccattctcctgcctcagcctcccaagtagctgggactacaggtgcccgccaccacgcctggctaatttttttttctttgatttttagtagagttggggtttcaccgtgttagccaggatggtctcaatctcctgacctcgtgatccacccgcctcgacctcccaaagtgttgggattacaggcgtgagccaccgcacctggccaagaaaaatactgtttaacaataataatcatttcgaaagttcaaagattttggtatgtaaatagaatgcagatttcttgcttgggattcatactttcactgtcgagtgcctgtcaagcagagttaagtatagttacttaaaaaatatttgtggtttaactttttaatttttattttctttaatagcaaaaatttctctgaagatgattttgcttctgcattgagaaaaaaacaatccgcatcttgggctttaaaatggtatgaagactgtctttcaacaattgcattatatctagtctaaaagcttagggcaaggcaagcatgcttatatcatcaataagacaaatttgagatgcattaaagtgatgcctttttgacatgagcttttcttttatagatgtaagtagtcttacattttacacttaacagataagttttactcagcatttcagttttctcaaaaggaattagtatattgatatctaggtttcaccaatatttgttgtgaaaatgtccaaaggcagaagaacgttccttaggtatattgtgagtactctgaaaactaaatattttgccaagtttgatgacatttgcttttaaaacttattcacactaacattttatttagatattgtttgaagtgtttgtgatgctttacaaatgtcttttttagtgtgaagatcggagttgactattttaaagttggacgccatgtggatgctatgaatgaatacaataaagctttggaaatagacaaacaaaacgtggaagctttggtagctcgtggagcattatatgcgacaaaaggaagtttgaacaaagcaatagaagattttgagcttgcattagaaaactgtccaactcacagaaatgcaagaaaatacctctgccagacacttgtagagagaggaggacagttagaagaagaagaaaagtttttaaatgctgaaagttactataagaaagctttggctttggatgagacttttaaagatgcagaggatgctttgcagaaacttcataaatatatgcaggtgattccttatttcctcttagaaatttagtgatatttgaaataatgcccaaacttaattttctcctgaggaaaactattctacattacttaagtaaggcattatgaaaagtttctttttaggtatagtttttcctaattgggtttgacattgcttcatagtgcctctgtttttgtccataatcgaaagtaaagatagctgtgagaaaactattacctaaatttggtatgttgttttgagaaatgtccttatagggagctcacctggtggtttttaaattattgttgctactataattgagctaattataaaaacctttttgagacatattttaaattgtcttttcctgtaatactgatgatgatgttttctcatgcattttcttctgaattggaccattgctgctgtgtctgtgacatctggtgctgctcatccccatccacaaactggaaaatgatttcctatgtaatcatgcatccaactgggctgtgctatttttttaaatggtttgtatttgaacatggtgattcctccttcacttcaccttaacggaatgtctttatttgaattttatttgtaaaatgtgtcctgtttaaatttttcaatctttaaaaataatttttatgtactttttttttttttttaacctttcttgcactctgggtcatgggtaccactgcaatggcttcccctttttttatgggataccaactgcaatatggtcctcaatgctgttctggccatttcaatgactaatgccaaacatctgtatgactaatttttttatgttaaaaaaatactgtttaatgctggctctatggtgatttggttttactaaattgggtttctcgttgggggtggtcttttgaatactgggttttatatattctgctatttttaacgtgtggtttttttcgatatctgggttctaaaagaaatctttggaattaagagaaaaacaagctgaaaaggaagaaaagcagaaaacaaagaaaatagaaacaagtgcagaaaagttgcgtaagctcttaaaagaagagaagaggtaaactataatattcagtatttttaaacttaaggcaactactgaattgaacccaaagtgccatactggaggtaaagtaaataaaaatatgaaagtatttcaagtgccaatcagtgactgttaagaatctttagcaaatatgtgttccatgtattttcttattaaagagatgaagtggaatttaaggctagaattctacaaaaaaagagtatcttagaattaaaatatagaataagttactttaattatgttttaggaagaaatattttagaactagagcagtggttctcaactaggggtggatttattcacccggggacatttgacaagatgtggagacatttttgattgccataactgatagggtgctactgcatctagtgtataatggtcagggatgctcttaaacattctgtaatgcacaggtcagctcccacccgcacccccaccccctaccaagaattatttggctgaaaataccaataatcaggtgaagaaaccatgaactagaggtagccaaataaaaaagttgagttctcctttatgtgttcagtagtcttaagtttttaaggtagtgttgaaaaaagtctgtctttcagagatgatggatttgcttacaatgatacctgtctgcaagcattttttcccccaaaagtgcttaatagtaaaattagatcttgtagtagccgagattattgtatcatttatctgaaccacagcttttataaaatctttaaaggaaacaaatagggcccacatctttatgaataatttagaaacatttttgtatatatatgacaaatgaactgttttttttaggctaaagaagaaaagaagaaaatcaacttcttcttcaagtgtttcttctgctgatgaatcagtgtcttcatcatcatcctcttcctcttctggtcacaaaaggcataagaaacataagaggaaccgttcagagtcttctcgcagttccagaaggcattcatctagggcatcctcaaatcagatagatcagaataggaaagatgagtgctacccagttccagctaatacttcagcatcttttcttaaccataaacaagaagtggagaaactactggggaagcaggataggttacagtatgaaaagacacagataaaagagaaagatagatgccctctctcttcatcttcacttgaaataccggatgattttggaggtaggtctgaagatccaagagatttttataacagctataaaacccaagcaggtagtagcaaaacagaaaagccatataaatcagaaagacatttttccagtagaagaaattcctcagattccttctgtaggaattcagaggacaagatttatggttataggagatttgaaaaggatatagagggaagaaaagagcactatagaaggtgggaaccaggttctgtgaggcattctacctcaccagcaagctcagaatactcttggaagtcagttgagaaatacaaaaaatacgctcactctggatcacgtgatttcagtagacatgagcaaagataccgtttaaatacaaatcaaggagaatatgaaagagaggacaattatggggaggatatcaaaacagaggttccagaagaagatgcactaagtagcaaagaacactcagaaagcagtgttaagaaaaatttacctcagaatttactgaatatatttaatcagatagctgaatttgaaaaagaaaaaggaaataagtcaaaaaattaatacaccaaggatatcggcaccattacacaaaatgccattaagtgaagtttttggttgtattagtcataacagttgagtgcagaaatctctgcttctaaaattatttgtagagattacaggaaacaaatgcttttaagtaagtttttctcaaattttgtttcagttctaggtcccttgtcacagcttggtttttagactttttatgtatatgtttatgtacagtatattactcttgacagtttgaatttcttcacctaaagataattctctgaaagtactgtttcttcattctattgcggtatatgagaattcctgggtgcatcttattctgctgtttgagagaaaaatttgtgcattgaacacttggatcatttttataaaaattaatttcattttcttttctgttaaattaaaaatcgtcagcttttgaaa

SEQ ID NO: 190478 - DNA, 2897 bp, Homo sapiens
  Payload ID: 17626
  Gene Name: tetratricopeptide repeat domain 16
  Uniprot ID: Q8NEE8
  ENST ID: ENST00000373289
  CDS Start-End: 81-2702
ggtgatggtgcctagcaacgtcagggccagggccgcgaggtagttggcagaggcctcggggtcctcctggaaggggcctcatgacagattcggacgaggatgccctgaaggttgaccagggcccctcacgggacatcccaaagccatgggtgattccagcccccaaagggatcctgcagcacatctttgggaccagccacgtgttccaaagcatctgtgatgtaaaaccaaaggtcacagggttaacagtgcccctcaaagtcagggaatactactccagaggccagcagtgcttggagcaggcagactgggagacagctgtgctgctcttctcccgcgcactccacctggacccacagctggtggacttctatgccttacgggctgaggcctacctccagctctgtgacttctcctcggccgcccagaacctgcgaagggcctactcattacagcaggacaactgcaagcacctggagcgcctcacctttgtgctctacctacagggacaatgcctttttgagcagtgtgccttcctggatgccctgaatgtcttctcacatgctgctgagctccagcctgagaaaccatgcttccgttaccgatgcatggcctgtctcctggccctcaagcagcatcaggcctgcctcacgctcatcaccaacgagctgaagcaggacaccaccaacgccgatgtctacatcttccgggccagactctacaactttctccagaagccccacctctgctaccgggacctgcacagcgccttgctgttgaatcccaagcacccgcaggccaggatgctgctccagaagatggtggcccaggcccagcaggcgcgccaagatgcggggatcctggctgtgcagggcaagctgcagcacgcactgcagcggatcaaccgtgccatcgagaacaaccctctggaccccagtctcttcctcttccggggcaccatgtaccgacggctccaggagttcgatggggcagtggaggacttcctgaaggtgctggacatggtgaccgaggaccaggaggacatggtgcggcaggcacagcgccagctgttgctgacctacaacgactttgccgtgcactgctacaggcagggcgcctaccaggagggcgtgctgctgctgaacaaggccctccgggacgagcagcaggagaaaggactctacatcaaccgaggcgattgcttcttccagctgggcaacctggcctttgccgaggcggactaccagcaggcgctggcgctgagccctcaggacgagggcgccaacacgcgcatgggcctgctgcaggagaagatgggcttctgcgagcagaggcgcaagcagttccagaaggcagagaaccacttctccacggccatccggcacaacccccagaaggcccagtactacctgtaccgggccaagagccggcagctgctgcagaacatttttggggcccgccaggatgtggccactgtcctgctcctcaaccccaagcaaccaaagctgtccctgctgatgaccaacctcttcccgggcatgtcggtggaggaggtgcttagcacccagatagcccacctggccaggctgcagctggagcagatggtggagggcagcctgcaggccggcagcccacaaggcattgtggggatgcttaaacggcacgagttggagcgccagaaggccttggccctgcagcactcatggaagcagggggagcctttgattgcgacctccgaggagctgaaggccacccctgagattccgcaggtaaaaccgggaagctcagagggagaggctgaggcccctgaggaggaggaagaaaaggagaaggagaaaaaagaggagaaaaaatcagagctcatacctagcaaggtggcgtccctgtctgacagctaccttgaccagacctcttcagcctccagcatgagcttcaggaccacaggcacctcagagactgagatgtcggctatctgccaggaatacaggagcacctcagccaccgccgtgacattctctgactcgtcactgttgaagacgcaatcctcggactctgggaacaacagggaggcactaagccatggtcccagaaaaatcaaggccacccagggccagaggcagagccttagcaagactgagcccacccagagccagaggcggaactccagcaagaccaaggccactatacacaagaggaactccagcaagaccaaggccacccaaagccagaggcggaactccagcaagaccagggccacccagggccaggggcagagctccagcaagactgaggccactcagggccagaggcagagctccagcgagattgaggccacccagggcccaaggcaggagcccagcaagaccaagaccacccggagcccaaggcagaggcccagaaaggtcaaggctgctcgtggccggagctggagacccagcaaggttgatgccacccagggccgaagcaggggactgctccgaagttccaccaagactgaggctttctatgactcaaactggagcctcagcaaaactgagtatgcccaaggccagggccagaggtccagcaaggctgagggtgcccagggcaagagccagggcatgagctcaacttccagcaaggccgagtccacctggggacccagcccaagtctcagcaaaactgaggttgatcaggacctcacctactatgaagctgtctgaagggaccatccagaccctcccttcttgctggggaggggacgagttctacccacctccccacactggcactcagccagctgcctccttccagagcaattaaaagtcttagcaacagtcctctggtcccacagctgagtttattatacttgttttcttttacaaaattaaaaacatctaaaaccaggcccaagtggc

SEQ ID NO: 190479 - DNA, 4469 bp, Homo sapiens
  Payload ID: 17627
  Gene Name: tetratricopeptide repeat domain 17
  Uniprot ID: Q96AE7
  ENST ID: ENST00000039989
  CDS Start-End: 15-3440
gccgggggggcaagatggcggcggcagtaggggttcgtggccggtacgagctgccgccttgctccggcccaggctggctcctcagcctttccgccttgctgagtgtggcggcacgaggggccttcgccaccacgcactgggtcgtcacggaggacgggaaaatccagcagcaggtggattcaccaatgaacttgaagcatcctcatgacctagtcatattaatgagacaagaagcaacagttaactacctcaaagaattagagaaacaattagttgctcaaaaaattcacatagaagagaatgaggacagagacacaggactggaacagagacataataaagaagacccagactgcatcaaagccaaggtgcccttaggggacctggatctatatgatggcacatacataactttggagagcaaagacatcagtcctgaagattatatagacacagaatctcctgtccctccagacccagagcaacctgattgtactaaaattctagaacttccatatagtatacatgcttttcagcacttgagaggtgtacaggagagagttaatctttctgcacctctgctacctaaagaagacccaatcttcacatatttatctaaacggttaggaaggagtatagatgacataggtcacctcattcatgaaggcctacagaagaacacttcctcgtgggtactgtataacatggcttcattttactggagaattaagaatgagccatatcaggtagtagaatgtgccatgcgagcacttcacttctcttccaggcacaataaagacattgccctggtcaacctggcaaacgttctacacagagcacacttctctgctgatgctgctgtcgtggtccatgcagctctggatgacagtgacttcttcaccagctattacactttggggaatatatatgcaatgcttggggaatataaccactcagtgctctgttatgaccacgctttgcaggccagacctgggtttgagcaagctataaagaggaagcatgctgtcctatgtcagcaaaaactggagcagaaattggaggctcagcatagatctctccagcgaacactgaatgagttaaaagagtatcaaaagcagcatgaccactacctgagacagcaggaaatcctagaaaaacataaactgattcaggaggagcaaatcttaagaaatatcattcatgagactcagatggcaaaagaggcacaattaggaaatcatcagatatgccgactggtcaaccagcagcatagtttacattgccagtgggaccagcctgtacgctatcatcgtggagatatctttgaaaatgtggactatgttcagtttggtgaggattcatcaacctccagtatgatgtctgtgaactttgatgttcaatcaaatcagagtgatatcaatgattcggtcaagtcttctcccgtagcccattctattctctggatttggggcagggactctgatgcatatagggacaaacagcatattctatggcctaaaagagcagattgtacagaaagctaccctagagtccctgttggtggggaattgccaacgtattttctgcctccggaaaacaaaggactcaggatccacgaactcagcagtgatgattattctacagaagaagaggcccaaacccctgactgttccataactgacttcagaaaaagccacactctgtcctacttagtcaaagaattagaggttcgcatggatctgaaagccaaaatgccagatgaccatgcacgaaaaattttgctttcccgtattaataactatactatcccagaagaagaaattgggtctttcttatttcatgctattaataagccaaatgctcctatctggctcatactcaatgaagctggactatactggagagcagtaggaaatagcacttttgctattgcctgtcttcagagggctttgaatttagctccacttcaataccaagatgttcctcttgtcaacttggccaaccttttgattcattacggccttcatcttgatgccactaagctgctacttcaagctttggccatcaatagctctgagcctctgacctttttgagcctgggaaatgcttaccttgctctgaagaatatcagtggggcacttgaggcctttagacaggccttgaaattaaccaccaaatgtccagagtgtgaaaacagcctgaagttgatccgctgtatgcagttttatccttttctgtacaacatcacttcttctgtttgcagtggtacggtggttgaggagagcaatggttctgatgagatggagaattcagatgaaaccaaaatgtcagaagaaatactggctttggtggatgaatttcaacaggcatggcctttggaaggctttgggggtgcactagagatgaaagggcggcgtctagacttacaaggaatacgggtgctgaagaaaggtccccaggatggagtggccagaagctcttgctatggagactgcagaagtgaagatgatgaagcaacagaatggattacattccaggtcaaacgtgtaaagaaacccaaaggagatcataagaaaactcctgggaaaaaagtagaaacaggtcagatagaaaatggacatcgttaccaagcaaacctagagatcactggccccaaggtggcatctcctgggccacaaggaaaaaaacgtgactaccagcgtctgggatggcccagcccggacgaatgcctcaaactccgctgggtagagctgactgccatcgtgagtacctggcttgcagtttcttcaaaaaacattgacatcacagaacacatagattttgccacccctatacagcagccagcaatggagcctctttgcaatggcaatctccccacgagtatgcataccctggaccacttgcatggggtttccaaccgagccagcctgcactacacaggggagagtcagttaacagaggtattacaaaatctcggcaaagaccaatatccacaacagtcgcttgaacagattggcacccgaattgccaaagttttggaaaagaaccagacgtcctgggtcctctccagcatggcagccctctactggagggtgaaaggccaaggaaagaaggcaatcgactgcctccgccaggctctgcactatgcgccacaccagatgaaggatgtgcccctgattagcctggccaacatcttgcacaatgccaagctctggaatgacgccgtcatagtagccaccatggcagtagagatcgcaccacactttgctgtgaaccacttcactctgggcaatgtctacgtggcaatggaagaatttgaaaaagcactggtgtggtatgaatccacattgaagcttcagcccgagtttgtcccagccaagaaccgaatccagaccatccagtgtcacttaatgctgaagaagggacggcgctctccttagtgcacttcttccttctctctttctctttactcatgctctaaaaaaaaagaataagaaaagaaaccaatcattgtcagtatctactattaatgatgtgtgtgaaaataactaagacttataacaggacttttacatatgtgggaattggtttgtttttgtttttacgtttctcctttcccccaaccaacctcagaagaggcaccttcagaaacacacatttcttaaaaggaaagtgcagcttcaagatattgtgtaaatactgagccaagacatttctggagctgtgctctgtctccaaaaacctcaatgcctttagggcttttctcagtggtccagctagccttctctttggaggaggatgaagccgcattgcacattctctgcttcctgtcgtagcctctgttgtcaatggaaatgcggaagcccatctggtgcccgtcagtgagaagcaacgttctgcgctctctccgttagacctccatgctgtccccagtcttgtccattccatgctgctgtgttacaaactctcagaggtagtttgcaggggaggaaggggaatatgattttaaaaacaaaatatttacaacaacaaaaattcttaggatcacctgacctttgtaatgttatttatgttggggagggaggggggctgagaaggggaaatcagcagtgtgcaacatctttataatttgtactttaattacaaatcacaaggaaaccaataagttgaaatcctatataacaggtttatatatatagaatatgtatatttgaagccctctacagactgagtctatgttttactaattctttgttcactgtgttacccatcttggaataagttgtgaatgtcagctccctctctctgaggcctccagacttagctcctcaggagggtaatgagccaaggttgagtgtttccatacaatgcttttacctttgatcccaggagaatcagaaactccaacattttggaatcttcaagggcacatactgagaaaaaaaataaaattgtttatgagcaaaata

SEQ ID NO: 190480 - DNA, 3648 bp, Homo sapiens
  Payload ID: 17627
  Gene Name: tetratricopeptide repeat domain 17
  Uniprot ID: Q96AE7
  ENST ID: ENST00000299240
  CDS Start-End: 24-2894
agcggcccggccgggggggcaagatggcggcggcagtaggggttcgtggccggtacgagctgccgccttgctccggcccaggctggctcctcagcctttccgccttgctgagtgtggcggcacgaggggccttcgccaccacgcactgggtcgtcacggaggacgggaaaatccagcagcaggtggattcaccaatgaacttgaagcatcctcatgacctagtcatattaatgagacaagaagcaacagttaactacctcaaagaattagagaaacaattagttgctcaaaaaattcacatagaagagaatgaggacagagacacaggactggaacagagacataataaagaagacccagactgcatcaaagccaaggtgcccttaggggacctggatctatatgatggcacatacataactttggagagcaaagacatcagtcctgaagattatatagacacagaatctcctgtccctccagacccagagcaacctgattgtactaaaattctagaacttccatatagtatacatgcttttcagcacttgagaggtgtacaggagagagttaatctttctgcacctctgctacctaaagaagacccaatcttcacatatttatctaaacggttaggaaggagtatagatgacataggtcacctcattcatgaaggcctacagaagaacacttcctcgtgggtactgtataacatggcttcattttactggagaattaagaatgagccatatcaggtagtagaatgtgccatgcgagcacttcacttctcttccaggcacaataaagacattgccctggtcaacctggcaaacgttctacacagagcacacttctctgctgatgctgctgtcgtggtccatgcagctctggatgacagtgacttcttcaccagctattacactttggggaatatatatgcaatgcttggggaatataaccactcagtgctctgttatgaccacgctttgcaggccagacctgggtttgagcaagctataaagaggaagcatgctgtcctatgtcagcaaaaactggagcagaaattggaggctcagcatagatctctccagcgaacactgaatgagttaaaagagtatcaaaagcagcatgaccactacctgagacagcaggaaatcctagaaaaacataaactgattcaggaggagcaaatcttaagaaatatcattcatgagactcagatggcaaaagaggcacaattaggaaatcatcagatatgccgactggtcaaccagcagcatagtttacattgccagtgggaccagcctgtacgctatcatcgtggagatatctttgaaaatgtggactatgttcagtttggtgaggattcatcaacctccagtatgatgtctgtgaactttgatgttcaatcaaatcagagtgatatcaatgattcggtcaagtcttctcccgtagcccattctattctctggatttggggcagggactctgatgcatatagggacaaacagcatattctatggcctaaaagagcagattgtacagaaagctaccctagagtccctgttggtggggaattgccaacgtattttctgcctccggaaaacaaaggactcaggatccacgaactcagcagtgatgattattctacagaagaagaggcccaaacccctgactgttccataactgacttcagaaaaagccacactctgtcctacttagtcaaagaattagaggttcgcatggatctgaaagccaaaatgccagatgaccatgcacgaaaaattttgctttcccgtattaataactatactatcccagaagaagaaattgggtctttcttatttcatgctattaataagccaaatgctcctatctggctcatactcaatgaagctggactatactggagagcagtaggaaatagcacttttgctattgcctgtcttcagagggctttgaatttagctccacttcaataccaagatgttcctcttgtcaacttggccaaccttttgattcattacggccttcatcttgatgccactaagctgctacttcaagctttggccatcaatagctctgagcctctgacctttttgagcctgggaaatgcttaccttgctctgaagaatatcagtggggcacttgaggcctttagacaggccttgaaattaaccaccaaatgtccagagtgtgaaaacagcctgaagttgatccgctgtatgcagttttatccttttctgtacaacatcacttcttctgtttgcagtggtaattgtcatgagaaaaccctggacaacagccatgacaaacagaaatattttgacaactcacagtcactggatgctgctgaagaagagccctctgagagaggaacagaggaggaccctgtattctctgttgagaattcagggagggactcagatgcccttagacttgaaagtacggtggttgaggagagcaatggttctgatgagatggagaattcagatgaaaccaaaatgtcagaagaaatactggctttggtggatgaatttcaacaggcatggcctttggaaggctttgggggtgcactagagatgaaagggcggcgtctagacttacaaggaatacgggtgctgaagaaaggtccccaggatggagtggccagaagctcttgctatggagactgcagaagtgaagatgatgaagcaacagaatggattacattccaggtcaaacgtgtaaagaaacccaaaggagatcataagaaaactcctgggaaaaaagtagaaacaggtcagatagaaaatggacatcgttaccaagcaaacctagagatcactggccccaaggtggcatctcctgggccacaagggctactagactggaagaccaggaaagtgccatagacataatgtaactggatttcagcaaggcatttaacagagcctcttatgatatccttgtgaaccagatggagagatgtgggcttgaagccttcccattgcctacaggataaaattcaaacttcctagtgtggtgtacaagaccctttacagcccgcctctgtgtacccttcaacaccattctctgaaccaaccatgctcatgtttttacctcagtgcctttgcacatgctattccctctgcctggaatgccctgtgccccctctgccctctgccgtgctaaaatatcactcatccttaaacttcaaaatcaagtgccatctcttccttgttaccttcaggcagaattagttactctttcctctgtgcaattgttctatatcttcgctctagctcttttcctgttgtattgtaatgatttgtttatgtttaccttccttactagactgtgagctcaagagcaggccgtcttaattattcctttctgtacccctagtgtcttttatggttctcagccccttataacaggtgctcaataaatatttttcaaatgaaattattaaatgtaaaagaaaattaagattttttgtgaaaattatggcttatttaagttattaatttaaacagagttaatttgaaactcttccaaaactgttcctttctgttttgttaaaatctcaatctaaacccctgcctgtacctcaaacagttttctactgttcgtaaattcctataatataaaaagcgctatacagaa

SEQ ID NO: 190481 - DNA, 575 bp, Homo sapiens
  Payload ID: 17627
  Gene Name: tetratricopeptide repeat domain 17
  ENST ID: ENST00000418561
  CDS Start-End: 1-518
aggtattacaaaatctcggcaaagaccaatatccacaacagtcgcttgaacagattggcacccgaattgccaaagttttggaaaaggcatccaccgcgggtcttggaatgtatccctatcagaaccagacgtcctgggtcctctccagcatggcagccctctactggagggtgaaaggccaaggaaagaaggcaatcgactgcctccgccaggctctgcactatgcgccacaccagatgaaggatgtgcccctgattagcctggccaacatcttgcacaatgccaagctctggaatgacgccgtcatagtagccaccatggcagtagagatcgcaccacactttgctgtgaaccacttcactctgggcaatgtctacgtggcaatggaagaatttgaaaaagcactggtgtggtatgaatccacattgaagcttcagcccgagtttgtcccagccaagaaccgaatccagaccatccagtgtcacttaatgctgaagaagggacggcgctctccttagtgcacttcttccttctctctttctctttactcatgctctaaaaaaaaagaataagaa

SEQ ID NO: 190482 - DNA, 889 bp, Homo sapiens
  Payload ID: 17627
  Gene Name: tetratricopeptide repeat domain 17
  ENST ID: ENST00000534347
  CDS Start-End: 2-166
gatggcggcggcagtaggggttcgtggccggtacgagctgccgccttgctccggcccaggctggctcctcagcctttccgccttgctgagtgtggcggcacgaggggccttcgccaccacgcactgggtcgtcacggaggacgggaaaatccagcagcagttatagccaggagcccatgcgtatctctctcaagagtggaagctgggctgctatttttgcgaacctgtacttctctaaacctcaaagaagatgtaagcccatgatggttagacttgaatcctgaagagataattccatgagaagtggagcaacagactttctgcctgcgtcattccatccctgtgaaactcatcttgcttgctaccatagtagcctggaagggatcgcaaacagaagggtctcttagacaatcatttgattgtttgagctagatttgtgataagggtaaaaatctgagggaagaaaggtggattcaccaatgaacttgaagcatcctcatgacctagtcatattaatgagacaagaagcaacagttaactacctcaaagaattagagaaacaattagttgctcaaaaaattcacatagaagagaatgaggacagagacacaggactggaacagagacataataaagaagacccagactgcatcaaagccaaggtgcccttaggggacctggatctatatgatggcacatacataactttggagagcaaagacatcagtcctgaagattatatagacacagaatctcctgtccctccagacccagagcaacctgattgtactaaaattctagaacttccatatagtatacatgcttttcagcacttgagaggtgtacaggagagagttaatctttctgcacctctgctacctaaagaaga

SEQ ID NO: 190483 - DNA, 419 bp, Homo sapiens
  Payload ID: 17627
  Gene Name: tetratricopeptide repeat domain 17
  ENST ID: ENST00000525029
  CDS Start-End: 1-419
tgggtttgagcaagctataaagaggaagcatgctgtcctatgtcagcaaaaactggagcagaaattggaggctcagcatagatctctccagcgaacactgaatgagttaaaagagtatcaaaagcagcatgaccactacctgagacagcaggaaatcctagaaaaacataaactgattcaggaggagcaaatcttaagaaatatcattcatgagactcagatggcaaaagaggcacaattaggaaatcatcagatatgccgactggtcaaccagcagcatagtttacattgccagtgggaccagcctgtacgctatcatcgtggagatatctttgaaaatgtggactatgttcaggtctttttcttggtccagtctaattcttataaacgtttgctttataaagattttttaaaacttt

SEQ ID NO: 190484 - DNA, 3002 bp, Homo sapiens
  Payload ID: 17628
  Gene Name: tetratricopeptide repeat domain 19
  Uniprot ID: Q6DKK2
  ENST ID: ENST00000261647
  CDS Start-End: 470-1612
cgaacaagaggtttagagaaccacatggaaaaaaggcagggccaggcccggacaccccgcctcctgcctcccggcccggcggtgcccggatgccccgcccgcgcccatggcgcagccacacacgacctcggtcccgtacttcgcgcgctctcctgcaccgccgccgccatctcgctcaggagctcctccacaaccgccggcaacactacggccatcgcgccgcaggacacgccctccacgaccggcggaccgccgcgacgctccagctgactgcgcctacctgtggaggatcctgaccccccgccggggcagggcgagacggagtgacgtcggggcgcgtcatcgcgcgtgcggacgcagggatgtcctgctcagtcgtcagggcccggccaatccggagggcgctcggcgcgtggtcgggggccaggagcgcgtctggcctgcagtgcgcagaggacgcggcgggagcatgttccggctcctgagctggagcctgggccgaggcttcctgcgggccgcggggcggcggtgccggggctgctccgcgcgcctgctcccggggctggcaggaggtccggggcccgaggtgcaggtgccgccatcccgagtcgcgccgcacggccggggcccaggcctgctgccgctgctggcagcgctcgcctggttctcgaggcccgctgcggcagaggaggaggagcagcagggagccgacggggccgctgccgaggacggggcggacgaggccgaggcagagatcatccagctgctgaagcgagccaagttgagcattatgaaagatgagccagaagaggctgagttaattttgcatgacgctcttcgtctcgcctatcagactgataacaagaaggccatcacttacacttatgatttgatggccaacttagcatttatacggggtcagcttgaaaatgctgaacaactttttaaagcaacaatgagttacctccttggagggggcatgaagcaggaggacaatgcaataattgaaatttccctaaagctggccagtatctatgctgcgcagaacagacaggaatttgctgttgctggctatgaattctgcatttcaactctagaggaaaaaattgaaagagaaaaggaattagcagaagacattatgtcagtggaagagaaagccaatacccacctcctcttgggcatgtgcttagacgcctgtgctcgctaccttctgttctccaagcagccgtcacaggcacaaaggatgtatgaaaaagctctgcagatttctgaagaaatacaaggagaaagacacccacagaccattgtgctgatgagtgacctggctactaccctggatgcacagggccgctttgatgaggcctatatttatatgcaaagggcatcagatctggcaagacagataaatcatcctgagctacacatggtactcagtaatctagctgcagttttgatgcacagagaacgatatacacaagcaaaagagatctaccaggaagcactgaagcaagcaaagctgaaaaaagatgaaatttctgtacaacacatcagggaagagttggctgagctgtcaaagaaaagtagacctttgacaaattctgtcaagctctaaatccatttttgtgtagggagaataatgtctagtaatgtggaagaatagctatcattcctgtctctgtggcacccgatcaatggcttaaatctgtcgtttttgatattcaggtttcctcaatttagccttagtgaaggaggggttgtacacactgccatttttgtattttaaaggaaaaatgactttcattcccaactgattatgacctttcaggatgtcgtcaagtgatgctttcagttgtaacacgtgacttggtgctgtccctgctggtctaagtagaactgtagattcatatgggctggtgttcctgtgcgctgtgggtgtggtgattcagcctggcatttctaccataagtttttggtctgctgatttgctgccctgtcttctcttactttactttatcaatacctggcaaactgaccagaattaccttcctcatggcaaagggggattatggtgaattgttgttcttatagtctgtttcatgaagcacaagtggaatttaatacataaaagagaaaaatatcttagtttgctaccagcatccagcatgaagttgtaaagtggggattaggcacgtgacagtatagcacccatttgaatttaaataaaagtgaaccatatttatctggttatataaaactaaaaatgggggtgtttatataaaactaaaaactaagaatgatgtaaccttttgtctgtgttatctgaacactctacttcctttgcagccttagtcacacaactgagtcatctcaagtactctttaaggacacacagcccaggctgttctgagtcagaataggcccctacaggtatattttaaaactcttcgtaattctaatgtgtactgctggtatagctgaactactgacctggatcttagtcctagcctttttgcttttgcaatttcagtatcttcatctctaaactagggaaacactgggattctttcttagctgtgggggaaggtatttggttagatgactttgaatgaatagactgctgtgctgaaagagctttatcacactgtctcaaagtatgtaaagatacataggtggatgctcttactgcagcagtcatgaatacatttttagccatttacctaaggaaaaagacagtttttctaggtaccatgaaggaagattgaccctgttggtatgcctgtgggggtgggatgtgagtgggactgataaactgatacttttggttcgtatgtacatactggaagaatcttcataataaatgagactacacaacaatattgtatgtatcccagtaatctttgcatttctcaaaaaaaaaaaaaaaaaaaaaaaaaaaactttctgaagaaaataaaaacaccagaaaccttgaggtccaaatcctcagggattagactaaaact

SEQ ID NO: 190485 - DNA, 636 bp, Homo sapiens
  Payload ID: 17628
  Gene Name: tetratricopeptide repeat domain 19
  ENST ID: ENST00000470399
  CDS Start-End: 1-450
ggacgcggcgggagcatgttccggctcctgagctggagcctgggccgaggcttcctgcgggccgcggggcggcggtgccggggctgctccgcgcgcctgctcccggggctggcaggaggtccggggcccgaggtgcaggtgccgccatcccgagtcgcgccgcacggccggggcccaggcctgctgccgctgctggcagcgctcgcctggttctcgaggcccgctgcggcagaggaggaggagcagcagggagccgacggggccgctgccgaggacggggcggacgaggccgaggcagagatcatccagctgctgaagcgagccaagttgagcattatgaaagatgagccagaagaggctgagttaattttgcatgacgctcttcgtctcgcctatcagactgataacaagaaggccatcacttacacttatgatttgattaattggtgatgtgcttttcattttcaactattttttaaattttgagggtgaaagcaaaagggaattttaaagttttgaaataagtaggaacacagtattctaaactgaaaaacaatttgtaatttgctttcagatggccaacttagcatttatacggggtcagcttgaaaatgctgaacaactttttaaagcaac

SEQ ID NO: 190486 - DNA, 760 bp, Homo sapiens
  Payload ID: 17628
  Gene Name: tetratricopeptide repeat domain 19
  ENST ID: ENST00000470649
  CDS Start-End: 1-300
tccaagcagccgtcacaggcacaaaggatgtatgaaaaagctctgcagatttctgaagaaatacaaggagaaagacacccacagaccattgtgctgatgagtgacctggctactaccctggatgcacagggccgctttgatgaggcctatatttatatgcaaagggcatcagatctggcaagacagataaatcatcctgagctacacatggtactcagtaatctagctgcagttttgatgcacagagctgccaccacagtgcttggtccttccaaggaagctaaggccacgttgggatgaggccctcacttcatccggcaactaccaccacgtccggcagcgccagccccacacttgcccataccatgtcctctgtctccgagctcgcctgcatctactcagccctcactctgcatgacaatgaggtgaccatcacggaggataagatcaatgccctcgttaaagcagctggtgtaaatgttgaacctttttggtccagcttgtttgcaatggccctggccaatgtcaacattgggagcctcatctacaatgtaggggctggtggacctgctccagcagctggtgctgcaccagtgggatcctgcccactccactgctgctgctccagctgagaagaaagtggaagcaaacaaagaagaatctgaggagtctgatgatgacatgggcttttggttgttttgactaaatttcttataacgtgttcaatacaaagctgaacttaagaaaaaaaaaaaaagaa

SEQ ID NO: 190487 - DNA, 2591 bp, Homo sapiens
  Payload ID: 17628
  Gene Name: tetratricopeptide repeat domain 19
  ENST ID: ENST00000475723
  CDS Start-End: 1-500
gccaggagcgcgtctggcctgcagtgcgcagaggacgcggcgggagcatgttccggctcctgagctggagcctgggccgaggcttcctgcgggccgcggggcggcggtgccggggctgctccgcgcgcctgctcccggggctggcaggaggtccggggcccgaggtgcaggtgccgccatcccgagtcgcgccgcacggccggggcccaggcctgctgccgctgctggcagcgctcgcctggttctcgaggcccgctgcggcagaggaggaggagcagcagggagccgacggggccgctgccgaggacggggcggacgaggccgaggcagagatcatccagctgctgaagcgagccaaggtgaggcggctccgggccctgcgcccggccgagcgcggtagcctttgtgagcggggtcttggcgttgctgcgcattactctctccgcctcgccgaagagtggatggaggctccgcgggtaaaattgccgagaatgagttgagcattatgaaagatgagccagaagaggctgagttaattttgcatgacgctcttcgtctcgcctatcagactgataacaagaaggccatcacttacacttatgatttgatggccaacttagcatttatacggggtcagcttgaaaatgctgaacaactttttaaagcaacaatgagttacctccttggagggggcatgaagcaggaggacaatgcaataattgaaatttccctaaagctggccagtatctatgctgcgcagaacagacaggaatttgctgttgctggctatgaattctgcatttcaactctagaggaaaaaattgaaagagaaaaggaattagcagaagacattatgtcagtggaagagaaagccaatacccacctcctcttgggcatgtgcttagacgcctgtgctcgctaccttctgttctccaagcagccgtcacaggcacaaaggatgtatgaaaaagctctgcagatttctgaagaaatacaaggagaaagacacccacagaccattgtgctgatgagtgacctggctactaccctggatgcacagggccgctttgatgaggcctatatttatatgcaaagggcatcagatctggcaagacagataaatcatcctgagctacacatggtactcagtaatctagctgcagttttgatgcacagagaacgatatacacaagcaaaagagatctaccaggaagcactgaagcaagcaaagctgaaaaaagatgaaatttctgtacaacacatcagggaagagttggctgagctgtcaaagaaaagtagacctttgacaaattctgtcaagctctaaatccatttttgtgtagggagaataatgtctagtaatgtggaagaatagctatcattcctgtctctgtggcacccgatcaatggcttaaatctgtcgtttttgatattcaggtttcctcaatttagccttagtgaaggaggggttgtacacactgccatttttgtattttaaaggaaaaatgactttcattcccaactgattatgacctttcaggatgtcgtcaagtgatgctttcagttgtaacacgtgacttggtgctgtccctgctggtctaagtagaactgtagattcatatgggctggtgttcctgtgcgctgtgggtgtggtgattcagcctggcatttctaccataagtttttggtctgctgatttgctgccctgtcttctcttactttactttatcaatacctggcaaactgaccagaattaccttcctcatggcaaagggggattatggtgaattgttgttcttatagtctgtttcatgaagcacaagtggaatttaatacataaaagagaaaaatatcttagtttgctaccagcatccagcatgaagttgtaaagtggggattaggcacgtgacagtatagcacccatttgaatttaaataaaagtgaaccatatttatctggttatataaaactaaaaatgggggtgtttatataaaactaaaaactaagaatgatgtaaccttttgtctgtgttatctgaacactctacttcctttgcagccttagtcacacaactgagtcatctcaagtactctttaaggacacacagcccaggctgttctgagtcagaataggcccctacaggtatattttaaaactcttcgtaattctaatgtgtactgctggtatagctgaactactgacctggatcttagtcctagcctttttgcttttgcaatttcagtatcttcatctctaaactagggaaacactgggattctttcttagctgtgggggaaggtatttggttagatgactttgaatgaatagactgctgtgctgaaagagctttatcacactgtctcaaagtatgtaaagatacataggtggatgctcttactgcagcagtcatgaatacatttttagccatttacctaaggaaaaagacagtttttctaggtaccatgaaggaagattgaccctgttggtatgcctgtgggggtgggatgtgagtgggactgataaactgatacttttggttcgtatgtacatactggaagaatcttcataataaatgagactacacaacaata

SEQ ID NO: 190488 - DNA, 908 bp, Homo sapiens
  Payload ID: 17628
  Gene Name: tetratricopeptide repeat domain 19
  ENST ID: ENST00000466729
  CDS Start-End: 1-518
ctcggcgcgtggtcgggggccaggagcgcgtctggcctgcagtgcgcagaggacgcggcgggagcatgttccggctcctgagctggagcctgggccgaggcttcctgcgggccgcggggcggcggtgccggggctgctccgcgcgcctgctcccggggctggcaggaggtccggggcccgaggtgcaggtgccgccatcccgagtcgcgccgcacggccggggcccaggcctgctgccgctgctggcagcgctcgcctggttctcgaggcccgctgcggcagaggaggaggagcagcagggagccgacggggccgctgccgaggacggggcggacgaggccgaggcagagatcatccagctgctgaagcgagccaaggtgaggcggctccgggccctgcgcccggccgagcgcggtagcctttgtgagcggggtcttggcgttgctgcgcattactctctccgcctcgccgaagagtggatggaggctccgcgggtaaaattgccgagaatgagttgagcattatgaaagatgagccagaagaggctgagttaattttgcatgacgctcttcgtctcgcctatcagactgataacaagaaggccatcacttacacttatgatttgattaattggtgatgtgcttttcattttcaactattttttaaattttgagggtgaaagcaaaagggaattttaaagttttgaaataagtaggaacacagtattctaaactgaaaaacaatttgtaatttgctttcagatggccaacttagcatttatacggggtcagcttgaaaatgctgaacaactttttaaagcaacaatgagttacctccttggagggggcatgaagcaggaggacaatgcaataattgaaatttccctaaagctggccagtatctatgct

SEQ ID NO: 190489 - DNA, 561 bp, Homo sapiens
  Payload ID: 17628
  Gene Name: tetratricopeptide repeat domain 19
  ENST ID: ENST00000578103
  CDS Start-End: 1-191
aaggagaaagacacccacagaccattgtgctgatgagtgacctggctactaccctggatgcacagggccgctttgatgaggcctatatttatatgcaaagggcatcagatctggcaagacagataaatcatcctgagctacacatggtactcagtaatctagctgcagttttgatgcacagaggtaggtagcaatgtaaacttaactgacttgctttaagggagggatgtcactggattgatagatttgtgaagtggtatgtagggagggcaagggccaacgaataaacatgtaaattaaaagactggttgaatggcagaaaaaggaggtattgattaggttgaagtactattgtgttcaattcacgtaacttctacagacctgcactagcctgtcgaaccccatcaagctggagaaaaccttgcaatgatagtaccttacgtcagtagtgctttacagatttctaaatgtgttcagttacaatgtgtttctcacagtgtgctggtgaagctttatgacaggaagtatcattttgtcagacatttcttagtgtcagcacac

SEQ ID NO: 190490 - DNA, 555 bp, Homo sapiens
  Payload ID: 17629
  Gene Name: tetratricopeptide repeat domain 21A
  ENST ID: ENST00000431559
  CDS Start-End: 109-441
gtaacgccttcaaccgcccgccgcgatagagtgcccacgaccctgcctcgggaatcccgctctgcaccgccccaccagacccggactcggagccgcgagcggcccgagatgagcagcaatgactcctcccttatggctgggatcatttactatagccaggaaaagtacttccaccatgtgcagcaggctgcagctgtgggcctggaaaaattcagcaatgaccctgtgttgaagttctttaaagcctatggagtcctcaaagaaggcaatgtacttcatgatgcagcagaactactcagaggccctggaggtggtgaaccagatcactgtgacttcagggagcttcctgccagccctcgtcctgaagatgcagctgttcttagctcggcaggactgggagcagacagtagaaatgggacacagaatcctagaaaaagatgagagcaatattgatgcctgccaaattctaaccgtgcatgagcttgcaagagaaggaaacatgaccacagctaccaatcacgttagaaatctgattaaggcactagagacaaggga

SEQ ID NO: 190491 - DNA, 4209 bp, Homo sapiens
  Payload ID: 17629
  Gene Name: tetratricopeptide repeat domain 21A
  Uniprot ID: Q8NDW8
  ENST ID: ENST00000431162
  CDS Start-End: 135-4097
ggctagcagctcggtttccaaggactgtaacgccttcaaccgcccgccgcgatagagtgcccacgaccctgcctcgggaatcccgctctgcaccgccccaccagacccggactcggagccgcgagcggcccgagatgagcagcaatgactcctcccttatggctgggatcatttactatagccaggaaaagtacttccaccatgtgcagcaggctgcagctgtgggcctggaaaaattcagcaatgaccctgtgttgaagttctttaaagcctatggagtcctcaaagaagagcacatccaggatgccatcagtgacctggaaagcatcaggcatcacccagacgtgtccctgtgctccaccatggccctcatttatgctcacaaaagatgtgaaatcattgaccgagaagcaattcaggagcttgagtacagcctgaaggaaatacgcaagacagtcagtgggactgcactgtactatgctggccttttcctctggctcataggccgccatgacaaggccaaagagtacattgaccgcatgctgaagatttctagaggcttcagagaggcctatgtgctcagaggctgggtggacctgacctcagacaagccccacactgcgaagaaagccattgagtacctggaacaaggaattcaggacaccaaagatgtgctggggctgatgggaaaggcaatgtacttcatgatgcagcagaactactcagaggccctggaggtggtgaaccagatcactgtgacttcagggagcttcctgccagccctcgtcctgaagatgcagctgttcttagctcggcaggactgggagcagacagtagaaatgggacacagaatcctagaaaaagatgagagcaatattgatgcctgccaaattctaaccgtgcatgagcttgcaagagaaggaaacatgaccacagtaagttctttgaagactcagaaggctaccaatcacgttagaaatctgattaaggcactagagacaagggaacccgaaaatccaagcctccatcttaaaaaaattattgtggttagccgactgtgtgggagtcaccaggtgattctagggctagtgtgtagtttcatcgagcgcaccttcatggccaccccctcgtatgtccatgtggccacagaactgggctatctcttcatcctgaagaaccaagtgaaagaggccttgctgtggtattcagaagccatgaaactggacaaggatggcatggctggtttgacagggatcatcttgtgtcatatcttagaaggccacctggaggaagctgagtaccggctggaattcctgaaggaggtgcagaagtcccttgggaagtctgaggtgctaattttcctccaagccctcctgatgtccaggaagcacaagggggaggaagagaccacagcgctcctgaaggaggcagtggagcttcacttctccagcatgcaaggcatccctcttggctctgagtactttgaaaagctggacccgtacttcctggtctgcattgctaaggagtacttgctcttctgccccaagcagcccaggttaccaggccagatcgtgtctccacttcttaaacaagtcgccgtgatcttgaatcctgtagtcaaagcagcaccagctctgatcgaccccctgtatttgatggctcaggtcaggtattactcagagctagagaatgcccagagcatcctgcagcgttgcctggagctggaccccgcctccgtggatgcccatctcctcatgtgtcagatctacttggctcagggcaactttggcatgtgcttccactgcttagagctgggtgtcagccacaacttccaggtccgagatcaccccctctaccacctcatcaaggccagggccctcaacaaggctggagactatccagaggccataaagacgctgaaaatggtcatcaaattgccagctctgaagaaggaagaaggcagaaagttcctcaggccctctgtgcagcctagccagcgggcatccatcttattggaactggtggaggccctccggctgaatggggagctacatgaggccaccaaggtcatgcaggacaccatcaatgagttcggtggcacaccagaagagaaccgcatcaccattgccaacgtggacttggtcctgagcaagggcaatgtggacgtggcgctgaacatgctaaggaacatcttgcccaagcagtcctgctatatggaagccagagagaagatggccaacatctacctgcagaccctcagagacaggcgcctctacatcagatgctaccgtgagctctgtgaacatctgcctggcccccacaccagcctgctactgggcgatgccttaatgagcattctggagcccgagaaggccctggaggtctatgatgaggcctatagacagaacccacatgacgcctccctggccagcagaattgggcacgcttatgtgaaggcccaccagtatactgaggcaattgagtattatgaggctgcccagaagattaatggacaggactttctgtgctgcgatctgggcaaactgctcctgaagttaaagaaggtcaataaagcagaaaaagttttgaagcaggcactggaacatgacattgtccaagacatcccatccatgatgaatgatgttaagtgcctgcttttgctggcaaaggtttacaagagccataaaaaagaagctgtgatagaaactttgaacaaggccttggacctccagtctcggatactgaagcgagttccactggagcaaccagaaatgattccctcccagaagcaactggcagcctctatctgcatccaatttgcagagcactacctggcagagaaagagtatgacaaggcggtacagtcttataaggatgtcttctcctacttgccaactgacaataaggtgatgctggagctggcgcagctctacctgctccaggggcacctggacctgtgtgagcagcactgtgccatcctcctgcagactgagcagaaccatgagaccgcttctgtgttgatggctgacctgatgtttagaaaacagaaacatgaagcggccatcaatctttaccaccaagtcttggagaaagcgccagacaattttttggtattgcataaattaatcgatctgctaagaagaagtggaaaacttgaagacattcctgccttctttgaattggccaagaaggtgtctagccgggtgcctttggaaccagggttcaattactgcagaggtatctactgctggcacatagggcagcccaacgaagccttaaagttcctgaacaaggcacgcaaggacagcacttggggccagagcgccatctaccacatggtgcagatctgtctgaatccagacaacgaggttgtgggcggagaggcttttgagaaccagggagctgagagcaactacatggagaagaaggagttggagcagcagggtgtgagcaccgccgagaaactgctgcgtgagttttacccacattcagactccagccagacccagctgcggctgctgcagggcctctgccggctggccaccagggagaaggctaacatggaggctgcgctgggcagcttcatccagatagcgcaggctgagaaggacagcgtccctgccctgctggccttggcacaagcctacgtgttcctgaagcagatccccaaggcgcgtatgcagttgaagcgcctggccaagaccccctgggtgctgagtgaggctgaggacctggagaagagctggctcctgctggctgacatttactgccagggcagcaagttcgacctcgccttagaactgctgcggcgctgtgtgcaatacaacaagtcctgctacaaggcctatgagtacatgggcttcatcatggagaaggagcagtcctacaaggatgcagtcaccaactacaaactggcctggaagtacagtcatcacgccaaccctgccattggcttcaaacttgctttcaactacctgaaggacaagaaatttgtggaggccattgaaatctgcaacgatgtcctcagggagcaccccgactaccccaagatcagggaggaaattttggaaaaggcccgaaggtccctgaggccctagctggggtcaaggggcctggaccagtagaagccatcaacctactgaagttgtgtggagggatggaaagtgggtcagtggagaagggattcagaaaatgacacattcttcccca

SEQ ID NO: 190492 - DNA, 3988 bp, Homo sapiens
  Payload ID: 17629
  Gene Name: tetratricopeptide repeat domain 21A
  ENST ID: ENST00000430597
  CDS Start-End: 110-3541
tgtaacgccttcaaccgcccgccgcgatagagtgcccacgaccctgcctcgggaatcccgctctgcaccgccccaccagacccggactcggagccgcgagcggcccgagatgagcagcaatgactcctcccttatggctgggatcatttactatagccaggaaaagtacttccaccatgtgcagcaggctgcagctgtgggcctggaaaaattcagcaatgaccctgtgttgaagttctttaaagcctatggagtcctcaaagaagagcacatccaggatgccatcagtgacctggaaagcatcaggcatcacccagacgtgtccctgtgctccaccatggccctcatttatgctcacaaaagatgtgaaatcattgaccgagaagcaattcaggagcttgagtacagcctgaaggaaatacgcaagacagtcagtgggactgcactgtactatgctggccttttcctctggctcataggccgccatgacaaggccaaagagtacattgaccgcatgctgaagatttctagaggcttcagagaggcctatgtgctcagaggctgggtggacctgacctcagacaagccccacactgcgaagaaagccattgagtacctggaacaaggaattcaggacaccaaagatgtgctggggctgatgggaaaggcaatgtacttcatgatgcagcagaactactcagaggccctggaggtggtgaaccagatcactgtgacttcagggagcttcctgccagccctcgtcctgaagatgcagctgttcttagctcggcaggactgggagcagacagtagaaatgggacacagaatcctagaaaaagatgagagcaatattgatgcctgccaaattctaaccgtgcatgagcttgcaagagaaggaaacatgaccacagctaccaatcacgttagaaatctgattaaggcactagagacaagggaacccgaaaatccaagcctccatcttaaaaaaattattgtggttagccgactgtgtgggagtcaccaggtgattctagggctagtgtgtagtttcatcgagcgcaccttcatggccaccccctcgtatgtccatgtggccacagaactgggctatctcttcatcctgaagaaccaagtgaaagaggccttgctgtggtattcagaagccatgaaactggacaaggatggcatggctggtttgacagggatcatcttgtgtcatatcttagaaggccacctggaggaagctgagtaccggctggaattcctgaaggaggtgcagaagtcccttgggaagtctgaggtgctaattttcctccaagccctcctgatgtccaggaagcacaagggggaggaagagaccacagcgctcctgaaggaggcagtggagcttcacttctccagcatgcaaggcatccctcttggctctgagtactttgaaaagctggacccgtacttcctggtctgcattgctaaggagtacttgctcttctgccccaagcagcccaggttaccaggccagatcgtgtctccacttcttaaacaagtcgccgtgatcttgaatcctgtagtcaaagcagcaccagctctgatcgaccccctgtatttgatggctcaggtcaggtattactcaggagagctagagaatgcccagagcatcctgcagcgttgcctggagctggaccccgcctccgtggatgcccatctcctcatgtgtcagatctacttggctcagggcaactttggcatgtgcttccactgcttagagctgggtgtcagccacaacttccaggtccgagatcaccccctctaccacctcatcaaggccagggccctcaacaaggctggagactatccagaggccataaagacgctgaaaatggtcatcaaattgccagctctgaagaaggaagaaggcagaaagttcctcaggccctctgtgcagcctagccagcgggcatccatcttattggaactggtggaggccctccggctgaatggggagctacatgaggccaccaaggtcatgcaggacaccatcaatgagttcggtggcacaccagaagagaaccgcatcaccattgccaacgtggacttggtcctgagcaagggcaatgtggacgtggcgctgaacatgctaaggaacatcttgcccaagcagtcctgctatatggaagccagagagaagatggccaacatctacctgcagaccctcagagacaggcgcctctacatcagatgctaccgtgagctctgtgaacatctgcctggcccccacaccagcctgctactgggcgatgccttaatgagcattctggagcccgagaaggccctggaggtctatgatgaggcctatagacagaacccacatgacgcctccctggccagcagaattgggcacgcttatgtgaaggcccaccagtatactgaggcaattgagtattatgaggctgcccagaagattaatggacaggactttctgtgctgcgatctgggcaaactgctcctgaagttaaagaaggtcaataaagcagaaaaagttttgaagcaggcactggaacatgacattgtccaagacatcccatccatgatgaatgatgttaagtgcctgcttttgctggcaaaggtttacaagagccataaaaaagaagctgtgatagaaactttgaacaaggccttggacctccagtctcggatactgaagcgagttccactggagcaaccagaaatgattccctcccagaagcaactggcagcctctatctgcatccaatttgcagagcactacctggcagagaaagagtatgacaaggcggtacagtcttataaggatgtcttctcctacttgccaactgacaataaggtgatgctggagctggcgcagctctacctgctccaggggcacctggacctgtgtgagcagcactgtgccatcctcctgcagactgagcagaaccatgagaccgcttctgtgttgatggctgacctgatgtttagaaaacagaaacatgaagcggccatcaatctttaccaccaagtcttggagaaagcgccagacaattttttggtattgcataaattaatcgatctgctaagaagaagtggaaaacttgaagacattcctgccttctttgaattggccaagaaggtgtctagccgggtgcctttggaaccagggttcaattactgcagaggtatctactgctggcacatagggcagcccaacgaagccttaaagttcctgaacaaggcacgcaaggacagcacttggggccagagcgccatctaccacatggtgcagatctgtctgaatccagacaacgaggttgtgggcggagaggcttttgagaaccagggagctgagagcaactacatggagaagaaggagttggagcagcagggtgtgagcaccgccgagaaactgctgcaaggacagcgtccctgccctgctggccttggcacaagcctacgtgttcctgaagcagatccccaaggcgcgtatgcagttgaagcgcctggccaagaccccctgggtgctgagtgaggctgaggacctggagaagagctggctcctgctggctgacatttactgccagggcagcaagttcgacctcgccttagaactgctgcggcgctgtgtgcaatacaacaagtcctgctacaaggcctatgagtacatgggcttcatcatggagaaggagcagtcctacaaggatgcagtcaccaactacaaactggcctggaagtacagtcatcacgccaaccctgccattggcttcaaacttgctttcaactacctgaaggacaagaaatttgtggaggccattgaaatctgcaacgatgtcctcagggagcaccccgactaccccaagatcagggaggaaattttggaaaaggcccgaaggtccctgaggccctagctggggtcaaggggcctggaccagtagaagccatcaacctactgaagttgtgtggagggatggaaagtggg

SEQ ID NO: 190493 - DNA, 562 bp, Homo sapiens
  Payload ID: 17629
  Gene Name: tetratricopeptide repeat domain 21A
  ENST ID: ENST00000425163
  CDS Start-End: 33-419
agacccggactcggagccgcgagcggcccgagatgagcagcaatgactcctcccttatggctgggatcatttactatagccaggaaaagtacttccaccatgtgcagcaggctgcagctgtgggcctggaaaaattcagcaatgaccctgtgttgaagttctttaaagcctatggagtcctcaaagaagagcacatccaggatgccatcagtgacctggaaagcatcaggcatcacccagacgtgtccctgtgctccaccatggccctcatttatgctcacaaaagatgtgaaatcattggtgagtgccaccatgctcaaccaggcctgacccaccaggggaaggaaagccctgccccagagataacacagcccctcaagggctgccaaaggagaccgagaagcaattcaggagcttgagtacagcctgaaggaaatacgcaagacagtcagtgggactgcactgtactatgctggccttttcctctggctcataggccgccatgacaaggccaaagagtacattgaccgcatgctgaagatttctagaggcttcagagagg

SEQ ID NO: 190494 - DNA, 3941 bp, Homo sapiens
  Payload ID: 17629
  Gene Name: tetratricopeptide repeat domain 21A
  Uniprot ID: Q8NDW8
  ENST ID: ENST00000440121
  CDS Start-End: 32-3850
gacccggactcggagccgcgagcggcccgagatgagcagcaatgactcctcccttatggctgggatcatttactatagccaggaaaagtacttccaccatgtgcagcaggctgcagctgtgggcctggaaaaattcagcaatgaccctgtgttgaagttctttaaagcctatggagtcctcaaagaagagcacatccaggatgccatcagtgacctggaaagcatcaggcatcacccagacgtgtccctgtgctccaccatggccctcatttatgctcacaaaagatgtgaaatcattgaccgagaagcaattcaggagcttgagtacagcctgaaggaaatacgcaagacagtcagtgggactgcactgtactatgctggccttttcctctggctcataggccgccatgacaaggccaaagagtacattgaccgcatgctgaagatttctagaggcttcagagaggcaatgtacttcatgatgcagcagaactactcagaggccctggaggtggtgaaccagatcactgtgacttcagggagcttcctgccagccctcgtcctgaagatgcagctgttcttagctcggcaggactgggagcagacagtagaaatgggacacagaatcctagaaaaagatgagagcaatattgatgcctgccaaattctaaccgtgcatgagcttgcaagagaaggaaacatgaccacagctaccaatcacgttagaaatctgattaaggcactagagacaagggaacccgaaaatccaagcctccatcttaaaaaaattattgtggttagccgactgtgtgggagtcaccaggtgattctagggctagtgtgtagtttcatcgagcgcaccttcatggccaccccctcgtatgtccatgtggccacagaactgggctatctcttcatcctgaagaaccaagtgaaagaggccttgctgtggtattcagaagccatgaaactggacaaggatggcatggctggtttgacagggatcatcttgtgtcatatcttagaaggccacctggaggaagctgagtaccggctggaattcctgaaggaggtgcagaagtcccttgggaagtctgaggtgctaattttcctccaagccctcctgatgtccaggaagcacaagggggaggaagagaccacagcgctcctgaaggaggcagtggagcttcacttctccagcatgcaaggcatccctcttggctctgagtactttgaaaagctggacccgtacttcctggtctgcattgctaaggagtacttgctcttctgccccaagcagcccaggttaccaggccagatcgtgtctccacttcttaaacaagtcgccgtgatcttgaatcctgtagtcaaagcagcaccagctctgatcgaccccctgtatttgatggctcaggtcaggtattactcaggagagctagagaatgcccagagcatcctgcagcgttgcctggagctggaccccgcctccgtggatgcccatctcctcatgtgtcagatctacttggctcagggcaactttggcatgtgcttccactgcttagagctgggtgtcagccacaacttccaggtccgagatcaccccctctaccacctcatcaaggccagggccctcaacaaggctggagactatccagaggccataaagacgctgaaaatggtcatcaaattgccagctctgaagaaggaagaaggcagaaagttcctcaggccctctgtgcagcctagccagcgggcatccatcttattggaactggtggaggccctccggctgaatggggagctacatgaggccaccaaggtcatgcaggacaccatcaatgagttcggtggcacaccagaagagaaccgcatcaccattgccaacgtggacttggtcctgagcaagggcaatgtggacgtggcgctgaacatgctaaggaacatcttgcccaagcagtcctgctatatggaagccagagagaagatggccaacatctacctgcagaccctcagagacaggcgcctctacatcagatgctaccgtgagctctgtgaacatctgcctggcccccacaccagcctgctactgggcgatgccttaatgagcattctggagcccgagaaggccctggaggtctatgatgaggcctatagacagaacccacatgacgcctccctggccagcagaattgggcacgcttatgtgaaggcccaccagtatactgaggcaattgagtattatgaggctgcccagaagattaatggacaggactttctgtgctgcgatctgggcaaactgctcctgaagttaaagaaggtcaataaagcagaaaaagttttgaagcaggcactggaacatgacattgtccaagacatcccatccatgatgaatgatgttaagtgcctgcttttgctggcaaaggtttacaagagccataaaaaagaagctgtgatagaaactttgaacaaggccttggacctccagtctcggatactgaagcgagttccactggagcaaccagaaatgattccctcccagaagcaactggcagcctctatctgcatccaatttgcagagcactacctggcagagaaagagtatgacaaggcggtacagtcttataaggatgtcttctcctacttgccaactgacaataaggtgatgctggagctggcgcagctctacctgctccaggggcacctggacctgtgtgagcagcactgtgccatcctcctgcagactgagcagaaccatgagaccgcttctgtgttgatggctgacctgatgtttagaaaacagaaacatgaagcggccatcaatctttaccaccaagtcttggagaaagcgccagacaattttttggtattgcataaattaatcgatctgctaagaagaagtggaaaacttgaagacattcctgccttctttgaattggccaagaaggtgtctagccgggtgcctttggaaccagggttcaattactgcagaggtatctactgctggcacatagggcagcccaacgaagccttaaagttcctgaacaaggcacgcaaggacagcacttggggccagagcgccatctaccacatggtgcagatctgtctgaatccagacaacgaggttgtgggcggagaggcttttgagaaccagggagctgagagcaactacatggagaagaaggagttggagcagcagggtgtgagcaccgccgagaaactgctgcgtgagttttacccacattcagactccagccagacccagctgcggctgctgcagggcctctgccggctggccaccagggagaaggctaacatggaggctgcgctgggcagcttcatccagatagcgcaggctgagaaggacagcgtccctgccctgctggccttggcacaagcctacgtgttcctgaagcagatccccaaggcgcgtatgcagttgaagcgcctggccaagaccccctgggtgctgagtgaggctgaggacctggagaagagctggctcctgctggctgacatttactgccagggcagcaagttcgacctcgccttagaactgctgcggcgctgtgtgcaatacaacaagtcctgctacaaggcctatgagtacatgggcttcatcatggagaaggagcagtcctacaaggatgcagtcaccaactacaaactggcctggaagtacagtcatcacgccaaccctgccattggcttcaaacttgctttcaactacctgaaggacaagaaatttgtggaggccattgaaatctgcaacgatgtcctcagggagcaccccgactaccccaagatcagggaggaaattttggaaaaggcccgaaggtccctgaggccctagctggggtcaaggggcctggaccagtagaagccatcaacctactgaagttgtgtggagggatggaaagtgggtcagtggagaagggattcag

SEQ ID NO: 190495 - DNA, 5482 bp, Homo sapiens
  Payload ID: 17630
  Gene Name: tetratricopeptide repeat domain 21B
  Uniprot ID: Q7Z4L5
  ENST ID: ENST00000243344
  CDS Start-End: 139-4089
gcggcgcgaccccgcccctcccgctggggcccggggcgctagagcgctccgggaggctaggggagctgaattctgcgtcttcctttaggctgcggcgagacaatccccagagccccgcggcccggcctcggggcagccatggactcgcaggaattgaagactttgattaattactattgtcaagagagatatttccatcatgtattactggttgccagtgaaggaattaagaggtatggaagtgatccagtcttcaggttttatcatgcctatggcacattaatggaaggtaaaactcaagaagctcttcgagaatttgaggctattaaaaataaacaagatgtatcactttgttctctacttgcactgatatatgcccataaaatgagtcctaatccagatagagaagctattctggaatcagatgccagagtgaaggaacaacgtaaaggagctggagagaaagccttataccatgcaggcttatttttatggcacattggtcgccatgataaagcaagggaatatattgacagaatgatcaaaatatcagatggtagtaaacagggacacgttttgaaagcatggcttgatattacaagaggaaaagagccttacactaaaaaagcactgaagtattttgaagagggactccaagatgggaatgatacttttgctctgctgggtaaggcacaatgccttgagatgcgccagaattattcaggtgccctggagactgtgaaccagataatcgtgaattttccgagcttccttcctgcttttgttaagaaaatgaaattacaactagccttgcaggattgggaccagacagttgagacagcacaaaggttgctgctccaagatagccaaaatgtggaagcactgagaatgcaggcactctactatgtgtgtagagagggggatatagagaaggcttccaccaagctggaaaacttgggaaatacattggatgccatggaaccacagaatgctcaacttttctataacattacactcgccttcagcagaacttgtggacgtagtcaacttattcttcaaaaaattcaaacgttacttgagagagcttttagtttaaaccctcagcaatcagaatttgctacagaacttggataccaaatgattttacaaggaagagttaaagaggcactgaagtggtataagaccgccatgacacttgatgagactagtgtgtctgccctagttggatttatccaatgtcagttgatagaagggcaattacaggatgcagatcagcagctagaatttttaaatgaaatccagcaatccattggaaaatctgcggaattaatctatttacatgcagttcttgccatgaagaaaaataaacgacaagaagaagttattaatttgttaaatgatgtcctggacactcacttttcacaattagaaggtttgcctcttggcatacagtattttgaaaagctaaatcctgatttcttgttagaaattgttatggagtatctgagcttctgtccaatgcagcctgcaagtcctgggcaacctctttgtccacttctcaggcgttgcatctcagtcctggagactgtagtaagaactgttccaggtcttctgcaaacagtcttcctaatagcaaaagtgaaatatttgtcaggtgatattgaagcagctttcaataaccttcagcactgcttagaacacaatccctcttatgctgatgctcatctgctgctagctcaggtttacttgtctcaagaaaaagtcaaattgtgttctcagtctcttgaactttgtctgagctatgattttaaggtgagagactatcctttataccatttgataaaagctcagtcacaaaagaaaatgggagaaatagcagacgcaattaaaacactgcatatggcaatgagtttaccaggaatgaaaagaattggagcttccacaaaatcaaaagacagaaaaactgaagttgatacaagccatcgtttatcgatctttcttgaattgatagacgttcaccgcttaaatggagagcagcatgaggcaaccaaagttttacaagatgccatccatgaattttctggaacatctgaagaagtgcgggttaccattgctaatgcagaccttgctctagcccaaggagatattgaacgggctttaagcatccttcagaatgttacagccgaacagccttattttatagaggccagagaaaaaatggcagatatttatctgaagcacagaaaagataaaatgttatatatcacttgttttagagaaattgctgaaagaatggctaaccctcggtcttttcttctccttggtgatgcatacatgaatattctagagcctgaagaagccatagtagcatatgagcaagcattaaatcagaacccgaaagatggaacattggcaagcaaaatgggcaaagcacttatcaaaactcataactactcaatggcaatcacttactatgaagctgctctgaaaactggacaaaagaattatctttgctatgacctggctgagctcttattaaaattgaaatggtatgacaaagcagaaaaagttcttcagcatgctctggctcatgaacctgtaaatgaactgtcagctctcatggaggatggacgttgtcaagttcttctagcaaaagtttatagtaaaatggaaaaacttggtgatgcgatcactgcattacaacaggctcgagaattacaagctcgggtactaaaacgtgttcagatggaacagccagatgcagttcctgcacagaaacatttagcagctgaaatttgtgcagagattgcaaaacattctgttgctcagcgagactatgaaaaagcaattaagttttatagagaggctctggttcactgcgaaacagataataagattatgttggaactggcacgattatacctggcacaagatgaccctgattcctgcctgcggcagtgtgctctactgcttcagagtgaccaggataacgaagctgctaccatgatgatggctgatctcatgttcagaaaacaagactatgaacaagcagtgtttcatttacagcagcttttagaacgtaagccagataattatatgacattatctcgtttgattgatctcctaagaagatgtggaaaactcgaggatgtcccaagatttttctcaatggctgagaaacgtaactccagagcaaaattggaaccaggatttcagtattgtaaaggactgtatctttggtacactggagaaccaaatgatgcccttcgacattttaataaagctcggaaagatcgtgactggggccaaaatgccctttataatatgatagagatctgtttgaatccagataatgaaactgttggaggtgaagtatttgaaaacctggatggagacctgggtaattcaactgagaagcaagaatctgtgcaactggcagtaagaacagcagaaaaacttcttaaggaactaaaacctcagactgttcagggtcacgtacagcttcgcataatggaaaactattgcttaatggctaccaaacagaaatctaatgttgaacaagcattaaataccttcactgaaatagcagcatctgagaaggagcatatcccagcgctcttgggaatggcaacggcttatatgatcttgaaacagactccacgagccagaaaccagctgaagcgtattgcgaaaatgaattggaatgctattgatgctgaagagtttgagaagagttggctgctacttgctgatatttacattcaatcagcaaaatatgacatggcagaagacctgttaaaacggtgcctgcgtcataatagatcttgctgcaaagcttatgaatatatgggatacattatggaaaaagagcaagcatatacagatgctgccttgaactatgagatggcatggaaatatagcaatcggacaaatccggcagtaggatacaaactggcatttaattacttaaaagcaaaaagatatgtggattcaattgacatatgtcaccaggttcttgaagcacatccaacttatccaaaaatcagaaaggatatacttgataaggcccgtgcgtctttaagaccttgaaaataattttaacttaggtgttggtttaacaggaaatgaaagaaatctaactttcagttcttcctgttcaaaacaggtttgagctcagtgctttgttattagaagtatacccttttttctccagcagaggttgctgctgtacatcaagagaagtactatgtgaaattggtgtttcctaatggagttgaatgagagctggtctatttgactctgttttgattgggtacagatttggtgactctgtggtaaagactataattatttctataaagaatattttgttaaaatctaggtaattaaataccctgtatcttttctaaggaatattatttcaggaaatatatttaaaatgcattgttctcttttaaagtgtttttgttatattcttttatttatttatttatttttaaagacagagccttgatctgccgcccaggctggagtgcagtggcacgatcttggctcactgcaacctccgcctcctgggtttacgcgattctcctgcttcagcctcccgagtagctgggactaaaggcatgtgccatcacacccggctaattttttgtatttttagtagagatgggatttcaccgtgttagccaggaggggcttgatctcttgaccttgtgatccacctgcctcggcctcccaaagtgctgggattacaggcatgagccaccgcacccagcctgtttttgttgtattctgtgttgtttcaaaaattggaataaatctccctgtaaataactcatgaaaaagacaatatatatattttaaatatatattttaataaaggttttataaatagatgatttatattcctcttggaactcaaaagatgtggtaagttttgcaaatcagggtaagctccccctgcattctgtaatgttaatgggtggtggtatagtacagaaaatgtaactttcattgaaaaatcttttttagaaaagggtagagtgtgtgtttccctttcctttcttgagctcattcttcctgctttcaaggccattgtggtcttaagaaataatcaggtcctgaaacctcaatttaaataggtcccttattagggatatttaaccttagcctagaagacttggtctgcaggtataatttcagacactgtaacatttgatggtaaagggtgaccaaatacttttggtcagcagggagtcacaaagcacaccatgtgaaggcaacggtttacccagctctgtttaacagcaccctggcatagaagctttcactctcttacactaaatttaacctaatctaaacttaatccttagcattatttttaatttctcatctacatctttttcaattttccttaaaattgtagtaaacacagtcctcaattttatttgcatttacaataaacagtatttataagtca

SEQ ID NO: 190496 - DNA, 1572 bp, Homo sapiens
  Payload ID: 17630
  Gene Name: tetratricopeptide repeat domain 21B
  ENST ID: ENST00000392695
  CDS Start-End: 1-851
ggtacactggagaaccaaatgatgcccttcgacattttaataaagctcggaaagatcgtgactggggccaaaatgccctttataatatgatagagatctgtttgaatccagataatgaaactgttggaggtgaagtatttgaaaacctggatggagacctgggtaattcaactgagaagcaagaatctgtgcaactggcagtaagaacagcagaaaaacttcttaaggaactaaaacctcagactgttcagggtcacgtacagcttcgcataatggaaaactattgcttaatggctaccaaacagaaatctaatgttgaacaagcattaaataccttcactgaaatagcagcatctgagaaggagcatatcccagcgctcttgggaatggcaacggcttatatgatcttgaaacagactccacgagccagaaaccagctgaagcgtattgcgaaaatgaattggaatgctattgatgctgaagagtttgagaagagttggctgctacttgctgatatttacattcaatcagcaaaatatgacatggcagaagacctgttaaaacggtgcctgcgtcataatagatcttgctgcaaagcttatgaatatatgggatacattatggaaaaagagcaagcatatacagatgctgccttgaactatgagatggcatggaaatatagcaatcggacaaatccggcagtaggatacaaactggcatttaattacttaaaagcaaaaagatatgtggattcaattgacatatgtcaccaggttcttgaagcacatccaacttatccaaaaatcagaaaggatatacttgataaggcccgtgcgtctttaagaccttgaaaataattttaacttaggtgttggtttaacaggaaatgaaagaaatctaactttcagttcttcctgttcaaaacaggatttgattgccttatgtgacaagcccaagatctgtgacagttggagctcaaactaggcagtcttgattccagactgctctgaactagtatttgaaggaactaatgaacatgacatgttaaatgaaagtttggggacgtacactcaggatggaagcagggggacacaacagaaatgaaagaattttctgtagatctgggatctggacacctgccccccgtcatgaataaatgccatcccttcccacgccaaccatatcgatgatatagtggcaggaaggagagtaagggactctggagcttaaacagaccatcacatgggaaggcagtaaacaagatgctaactgatggagtgaaatccccaggagatgcagaaggcaagtgcagctaactgaggcctcaggggcaggagatgcccatcaggatgagagctatgtctttctccagtgatgactctgcttctatgaggtcaccagcagtagaaccatatcttgctggcatacacttgggatggccccgcctcctggacttccatctgtcatcaggagaacataaccatctggagtcagtacagatcatcaatccttccacatatacaagttcattttaaatttttaaaaatataatacaactgagaagtcttcatt

SEQ ID NO: 190497 - DNA, 2149 bp, Homo sapiens
  Payload ID: 17631
  Gene Name: tetratricopeptide repeat domain 22
  Uniprot ID: Q5TAA0
  ENST ID: ENST00000371274
  CDS Start-End: 36-1154
acaagggtgaggccaggggagcagagggagcagtcatggcggagctggaggctgtggccgacgatctagacgccctcatcgacgacctggactacctcccgggccactttcacctggagatgcagttgaacttcgagccgcgctcgccggccccacagcgcgcccgggacctgaagctgcagcgggagggtctgcggcaggagctccagctggcggccgccccgcagcgccccgctgtgcgtcacctcctgggcgctttcgcattctacctggaggagctggacgaggcccgcgagtgcttcctcgaggtggcccacgagcacccgggcaacctcaatgcctgggccaatctggcacacgtgtacgggcggctgggccaggaagaagaggaggaggcgtgcgccgcacggctggccgacctcatgggcctggcagaggagcccgaggccgccggggacccccagctccgcgccgctcgctgcctggccgagcagggctacgcgcatggcttcgacgtcggctgcgccagcccagaggagcgtgcgcgggggctggcggcaggcatcgcgctctacgacaaggcgctaggctacgggcagcagatcccgatggaggagaaaaggggctggtatttcaccatggcaacactctacatcaggctagatggcatcttcctggagctgggcagtgaggagcagaagagactgcctgccttcaaccgcacgctggccctactccggcaagtgctgaagtccgaggacccccgccaccgagccctggcctggtgctacctcgggatgctgctggagcggaaggacaccttctccaccacccccatgggcgtccatgactgcgggtactcagggaccgaccctctagactgcttcggcaaggccattgagattgccaagaaccaacctcccatcctgaatcgcctggcaaaaatcttctacttcctgggaaagcaggatatggccattggaacctgcaacatggccctggatgtcctacgagatccagaactcaactggcaggcgtactgcacaagggccaagagacgaggtctcactatgttgcccagactcgtctcaaactcctgggctcaagcagtcctcccacctcgacctcccaaagtgctggaattccaggtgtgagccactacacccagccctgtaaggtttttgagtgaaagaatgcaggagcctccactcactgcaggaatcccttctacaattcctggtcagtgagcccccagcctcttctggattggcacgggtggaatcagactgaccagagttgaaatctggcttctccgccttgtggaacttgcagcaagccacttacccccacaaacttcagttcccaaatctgtaagatataaataacaacactttccttaaaatgttgtcaacagacacagtgaggtagcatctaaagcacagtgccttggacatagggggtgcttttctgaaagccagtagaggtcatttaatatagtggatcagagctctggctctgaacacagacagccttggttcaaatcccacaacaccacgtgctacgggacctttggcaaaatactcttgcccagattctgagcctcaatttctttatctgtagactggagttgttatgagaattacattagattttgtatgtaaaactcagcatcaagcacacagtaagatttcataagagactgactgctactaatttaatattaggcatatttttgaattatctcactgtctcttgatgcagtccactgcatagtcattcagctctgcaagttacacacttaggtgagttctgcctcctgctagcttcccgcactggtcccagacctgcctcctagagcccacacagagcccatgtgcttgaggaagccgactcggagctcccagtttacttcactgcaagccgaagagtcctcccatcccctcatcttctccactactatccacatgacctagtggcaaatctactcccagtcttggtctcagtggcttaattactttgccagcaggtacgaggcaggagtgaaattccttcactgtcgtggatgtggttattattctagataataatgacattaaccataatagtaaataataaaatatctctataaaattctgcatttcatcaagca

SEQ ID NO: 190498 - DNA, 3345 bp, Homo sapiens
  Payload ID: 17631
  Gene Name: tetratricopeptide repeat domain 22
  Uniprot ID: Q5TAA0
  ENST ID: ENST00000371276
  CDS Start-End: 105-1814
tgcccctcgcctcccgcacggagctcgctcggggaacgcccccatccactgccctccacagcctcagggacaagggtgaggccaggggagcagagggagcagtcatggcggagctggaggctgtggccgacgatctagacgccctcatcgacgacctggactacctcccgggccactttcacctggagatgcagttgaacttcgagccgcgctcgccggccccacagcgcgcccgggacctgaagctgcagcgggagggtctgcggcaggagctccagctggcggccgccccgcagcgccccgctgtgcgtcacctcctgggcgctttcgcattctacctggaggagctggacgaggcccgcgagtgcttcctcgaggtggcccacgagcacccgggcaacctcaatgcctgggccaatctggcacacgtgtacgggcggctgggccaggaagaagaggaggaggcgtgcgccgcacggctggccgacctcatgggcctggcagaggagcccgaggccgccggggacccccagctccgcgccgctcgctgcctggccgagcagggctacgcgcatggcttcgacgtcggctgcgccagcccagaggagcgtgcgcgggggctggcggcaggcatcgcgctctacgacaaggcgctaggctacgggcagcagatcccgatggaggagaaaaggggctggtatttcaccatggcaacactctacatcaggctagatggcatcttcctggagctgggcagtgaggagcagaagagactgcctgccttcaaccgcacgctggccctactccggcaagtgctgaagtccgaggacccccgccaccgagccctggcctggtgctacctcgggatgctgctggagcggaaggacaccttctccaccacccccatgggcgtccatgactgcgggtactcagggaccgaccctctagactgcttcggcaaggccattgagattgccaagaaccaacctcccatcctgaatcgcctggcaaaaatcttctacttcctgggaaagcaggatatggccattggaacctgcaacatggccctggatgtcctacgagatccagaactcaactggcaggcgtactgcacaagggccaagatccacatcagagcctacctgcatgacctcaagcgggccaagatgggtctcgggggcatgcctgacaggaaccacctggcctgtgccaaggctgaccttgaggaagtggtcagggtgtgcccaggcttcaaggcgtacctggacatcggccaggtctactactatatgggcgtggacgcggtgcaggagctgctggcggtggacgaggcggcgctgaaccaggcgctggtgttcctggccaaggcgggcgagtcggagctgggtgccacgctgcccgagctgcagctgctgcgcggcaagtgcctgcgcatcaagggcgaggacgccaacgcggccgcctgcttcaagcgcgcagtggagctggacgacgcgggctccagccacaccgacggcttcggctgcctgctcgaggcgctgctggcgcagtggagccaggcacagctgagcgacggggagctgggccgcgaggtggacgcctggctgcgccgcgcccaggacaagtaccccgcggcgcgcctgcgccaggagctgcagcgcgtgtggcgcgggcacacggacgaggtgttggggctggcccgggccctggtggcccagggacggccggcgctggtgcggctgctcttcgagaccatggagcgcgagggcgagggcgccagcgcgccgcgggaccgccgggctgtctcattctagggctcaggtgcccaggccggaggctccctgggaccccgcccaggccccgcccagctgatgggaccaggtccggatggactccctgccttaggctgacctgggagcggagccagttcgattcttggtcgggaattgtgaatggggatgttgcgacacccgcgcggtttgaaacgcccacccagactggaaggcctgattcccgagagcagaagaggctgggagcagaggtgagaaaacactgggaagctgccaattaagggacagaattttctagacatacaggtaaaataagatggttgtgaggcttctgagagaaacagaagacagctacctcagtgtggcagttttctagtccgggcgctcaatccctcaggcctgagtgcctgtctttggactccggtaggccacactctatccttatgagaaagccccgtttactttagttgactggagtgtggtctcagctcctgcagccagaaaagccctgactaaagcagagggcagggtggcacggcgagtgagttacgggacagggccctagcctaagcctcgtgctcagggctcattcctgcctctctgctacttttctagtaggcctccttcttggtccgcttggcccaaaaggcctcccaaatgctctgaaatagagctcatcaatagaaccttcacttgatttccctcttcttgggggaaactaagggcgccacccattaggaggtgccacctgcccccccccttttttttttttttttttgagagggagtttcgctcttgttgcccatgctggagtgcaatggcacgatcttggcccactgcaacctccatctcctgggttcaagcgatcttcccgcctcagccttccaagtagctgggattacagacgtgtgccatcaggcctggctaattttgtatttttagtagagacagggtttcgccatgttggtcaggatggtctcgaactcctgacctcaactgatccacccgcctcagcctcccaaagtgctaggattacaggtgtgagccactgcacccggccctgcccccagtcttgaccattctactaattttaaagaacatcttggaattttacactcttggaatcatagtcgtagaatcctttttttgagacagagtctcactctgtcgcccaggctggagtgcagtggccagatctcagctcactgaaacctcagcctcccaagttcaagtgattctcgtacctcagcctcctgagtagctggaattccaggctgtactcactgctttgctcatatcctcgctcattaccagggacaggccagcacccctgcattgcatctcacatatccactgatggatggagaacagactgaaattcagtgccttagagaccacacactccaaccccctcattgtgcagatgggaaaactgagagccatagaagggaagtggcttgcccaaagccacacttactgttttccccacactgtaccacaaactttcaccattcttcaggtttggaaaaatactaataaactgatcaacactaaa

SEQ ID NO: 190499 - DNA, 686 bp, Homo sapiens
  Payload ID: 17631
  Gene Name: tetratricopeptide repeat domain 22
  ENST ID: ENST00000448308
  CDS Start-End: 1-513
gagcagaagagactgcctgccttcaaccgcacgctggccctactccggcaagtgctgaagtccgaggacccccgccaccgagccctggcctggtgctacctcgggatgctgctggagcggaaggacaccttctccaccacccccatgggcgtccatgactgcgggtactcagggaccgaccctctagactgcttcggcaaggccattgagattgccaagaaccaacctcccatcctgaatcgcctggcaaaaatcttctacttcctgggaaagcaggatatggccattggaacctgcaacatggccctggatgtcctacgagatccagaactcaactggcaggcgtactgcacaagggccaagcttcccgcactggtcccagacctgcctcctagagcccacacagagcccatgtgcttgaggaagccgactcggagctcccagtttacttcactgcaagccgaagagtcctcccatcccctcatcttctccactactatccacatgacctagtggcaaatctactcccagtcttggtctcagtggcttaattactttgccagcaggtacgaggcaggagtgaaattccttcactgtcgtggatgtggttattattctagataataatgacattaaccataatagtaaataataaaatatctctataaaattctgcatttcatcaa

SEQ ID NO: 190500 - DNA, 3316 bp, Homo sapiens
  Payload ID: 17632
  Gene Name: tetratricopeptide repeat domain 23
  Uniprot ID: Q5W5X9
  ENST ID: ENST00000262074
  CDS Start-End: 219-1400
caggtctggcagaaggaacagtatcaactgactgagtaggtctcattggcagttgtgattcagagacctagaaagctgaacccacggctggcaagaagaggatggtttgtgggacctgggctgatgtctgatgaaattttaagccccagctatagctactacaaagaaaagtggctgatgataagcatgtaactcaaaaagacaatgtatataaaaatatgcaagaatcacaggaaacccacatatccaaccacctagatgaagttgttgctgctgttagcatcactcatagaaagaagttccaaaacaagctgcttcagacagcactattccagcctcctcgagagaaactccacctctgtgaagagaaagcaaagtcctattccaacagtcatgagtacaaacaggccgtccatgagcttgtgcgttgcgtagcactgacaagaatttgctatggagactcacattggaaactagcagaggcacatgttaatctggctcaaggctacctccagctgaaaggactgtcactgcaagcaaaacaacatgcagaaaaagccagacaaatcctcgccaactccattgtgcctccctatagtgagaatacagatgttttcaagttttccattgagcttttccataccatgggcagagctttactctcccttcaaaaatttaaggaagctgcagagaatttgacaaaagcagagagactttcaaaggagctgctacaatgtggaagaattataaaggaagaatggatagaaattgaagcacggatcagattatcatttgcacaggtgtatcaaggtcagaagaagtcaaaagaagctttgtcccactatcaagcagctttggaatatgttgagatcagtaaaggtgaaacaagtcgtgagtgtgtacccatattgagagaattagcaggtgtagagcaagccctgggactccacgatgtatccatcaaccacttcctccaggcacatcttatcatcctgagtagaagcccctctcaagtggaggcagcagactcggcacacatcgtcgcccatgctgctgtcgcttcagggagacacgagcaccatgatgtagctgagcagtattttcaagagagcatggctcatcttaaggattctgaagggatgggaagaaccaaatttctttcaattcaagatgaattttgccattttctacaaatgactggacaaaaagagagagcaacctcgatcctgagagagtccctggaagccaaagtggaagcatttggcgatttcagtcccgaggtggcagagacataccggctcctgggaggagcagacctggcgcaggggaaccacagtggggcccgcaagaaactgaagaagggagaccttagtttcctgctctcagcgacacttccatagcctcatgatagctgcttggtgttctacagtgtctccagatccagaccctcttatatggaccgcaggacaaaaggactctggccacccagcaggccatgggcatgctgtccacggcccccaaggttgcttcgaagccaaggcaggcatcaaaagccaaagtggccttctgcaccagcatccctcaggacaccctgctggggaaggcccggcccggcacaacagcagactgaggcccccaccctgaaaaagcctaggacattcctgggcactgtcatttagggtgctgtacaaatcacctccgcctagaaaatggaattcaacagtcaggatacagatttccaaggccaactgttggccccaacatgcaacagtgagaccataagcctcccgtgggccacattttgacagtggatgcccttcagggtgatatatgctataaagcagttttctatcacctaagtggtttttcttgccaacaagaatttttacccatcagcactactgtggctgaaaaacttctcttcaacagttcagtgcgccctgtgcaggagtcagcccggcatctgcttgtacacacagctccttgcataggtgtggagttagatctggacagtgaacttcaggaagtcctttcttataggaggctaatagggattgagaataacatgagaagaaaacgctaataaagggaaacctgaacacgctgctgtcagcatgtgttttcaaagtgcagcctgcctcagagttcttcggagcctgaaaaggggtttgagaaagagcccagtaggaggggcaggaggccgacacacctgacttggcctggggcccaggaggcaggtgtaagggagtgaaaagaaaggctagccggaggctgcggggggaagaccgcagactccctgctgcttcgcatccctcctgtggcctccactgcaggcaggacaaacctggatgccacctggagctgcttcctgagttggcacactatcgtgtacacagcagtcttcagccccctggaaggaggccatagtcgtgtgaggatggcaaagtcgaacaggaagctttgagtgccttcctccacgatgtcaacgaggagatccagtgccagatcgaggtggatggaacacccaggggtaggggtgcaggtgtgggcagtgatgtcccttcccctccctcccctggtcccacagactgtggccatgaggctgcaggctggtgctatgacagcagattgcagcacagggccctcccctccagcccccagtgggacatcaaaaccaccctggggccatttgtgcagggcaccacctccagtattgatggggaaaataaactcagtagagccacgacagggtggagagaagcagggaccattgtcttcctcaggagcgtgacagctgaccccacagaccatgcttgctggtacacactggtcccagacccaggcctgtcggacatcagcagtgtgctaaaaacgtgtaagatgtcactactcaccgtgtgtcctatctagttgacatgggtggagtcagctaaggggtgaatgttcatatgctcccaattcacgttgaagccctaatccccaaagggatggtattgggggtggggtcttggagaggtgattaggttatgagggtggagccctgatgaatgggattagtgctttataaggagagacaccagagagatgatctctctctccaccatgtgaggacacagtgagaagacagccgtctgcaggcccggaagagagccctcaccaggaaatgaaactgttggcaccttgagacttcccagcttccagaactgtaagaaataaatgtttgttgtttaagcctttcaggctacggctttctgttacagcagcctgaactgagagtccatgccgagtttttgaaataaatgtgaattctgatgtt

SEQ ID NO: 190501 - DNA, 3849 bp, Homo sapiens
  Payload ID: 17632
  Gene Name: tetratricopeptide repeat domain 23
  Uniprot ID: Q5W5X9
  ENST ID: ENST00000394132
  CDS Start-End: 819-2162
aaaaggctgctccggaactgccctactttagactttttcatggttatcaatctgtacaaagaatcaccaaactgataaagcaggaaccagagggcaaatcacgctgccaagacaactgtgtaattcgctcgaaaaagaaacggtgagcctctccagcagactgggtaaactggcaagggattttacgacatagttggagattggagagttacagaaacttttccggttttttacaagttttaaaggagtgattgagtgtcaaaggaaaagcagagaaaatacaggcacaatttaaagacagcaggaagaagagtgttcagagagcatttttctctttagggtgaagtttgaaagcatcatgcccagattatcagtggatttttgaaagatggagtctcgctctgtcacccaggctggagtatagtggtgtgatcttggctcactgcaacctctgcctcccaggttcaagcgattctcctgcctcagcctctcgagtagctggaattacaggtctggcagaaggaacagtatcaactgactgagtaggtctcattggcagttgtgattcagagacctagaaagctgaacccacggctggcaagaagaggatggtttgtgggacctgggctgatgtctgatgaaattttaagccccagctatagctactacaaagaaaagtggctgatgataagcatgtaactcaaaagacagagttttgccatgttgcccaggctggtcccaaactcctgagctgaggtgaccctcccgcctccacctcccagagtgctgggattacagaagacaatgtatataaaaatatgcaagaatcacaggaaacccacatatccaaccacctagatgaagttgttgctgctgttagcatcactcatagaaagaagttccaaaacaagctgcttcagacagcactattccagcctcctcgagagaaactccacctctgtgaagagaaagcaaagtcctattccaacagtcatgagtacaaacaggccgtccatgagcttgtgcgttgcgtagcactgacaagaatttgctatggagactcacattggaaactagcagaggcacatgttaatctggctcaaggctacctccagctgaaaggactgtcactgcaagcaaaacaacatgcagaaaaagccagacaaatcctcgccaactccattgtgcctccctatagtgagaatacagatgttttcaagttttccattgagcttttccataccatgggcagagctttactctcccttcaaaaatttaaggaagctgcagagaatttgacaaaagcagagagactttcaaaggagctgctacaatgtggaagaattataaaggaagaatggatagaaattgaagcacggatcagattatcatttgcacaggtgtatcaaggtcagaagaagtcaaaagaagctttgtcccactatcaagcagctttggaatatgttgagatcagtaaaggtgaaacaagtcgtgagtgtgtacccatattgagagaattagcaggtgtagagcaagccctgggactccacgatgtatccatcaaccacttcctccaggcacatcttatcatcctgagtagaagcccctctcaagtggaggcagcagactcggcacacatcgtcgcccatgctgctgtcgcttcagggagacacgagcaccatgatgtagctgagcagtattttcaagagagcatggctcatcttaaggattctgaagggatgggaagaaccaaatttctttcaattcaagatgaattttgccattttctacaaatgactggacaaaaagagagagcaacctcgatcctgagagagtccctggaagccaaagtggaagcatttggcgatttcagtcccgaggtggcagagacataccggctcctgggaggagcagacctggcgcaggggaaccacagtggggcccgcaagaaactgaagaagtgtctccagatccagaccctcttatatggaccgcaggacaaaaggactctggccacccagcaggccatgggcatgctgtccacggcccccaaggttgcttcgaagccaaggcaggcatcaaaagccaaagtggccttctgcaccagcatccctcaggacaccctgctggggaaggcccggcccggcacaacagcagactgaggcccccaccctgaaaaagcctaggacattcctgggcactgtcatttagggtgctgtacaaatcacctccgcctagaaaatggaattcaacagtcaggatacagatttccaaggccaactgttggccccaacatgcaacagtgagaccataagcctcccgtgggccacattttgacagtggatgcccttcagggtgatatatgctataaagcagttttctatcacctaagtggtttttcttgccaacaagaatttttacccatcagcactactgtggctgaaaaacttctcttcaacagttcagtgcgccctgtgcaggagtcagcccggcatctgcttgtacacacagctccttgcataggtgtggagttagatctggacagtgaacttcaggaagtcctttcttataggaggctaatagggattgagaataacatgagaagaaaacgctaataaagggaaacctgaacacgctgctgtcagcatgtgttttcaaagtgcagcctgcctcagagttcttcggagcctgaaaaggggtttgagaaagagcccagtaggaggggcaggaggccgacacacctgacttggcctggggcccaggaggcaggtgtaagggagtgaaaagaaaggctagccggaggctgcggggggaagaccgcagactccctgctgcttcgcatccctcctgtggcctccactgcaggcaggacaaacctggatgccacctggagctgcttcctgagttggcacactatcgtgtacacagcagtcttcagccccctggaaggaggccatagtcgtgtgaggatggcaaagtcgaacaggaagctttgagtgccttcctccacgatgtcaacgaggagatccagtgccagatcgaggtggatggaacacccaggggtaggggtgcaggtgtgggcagtgatgtcccttcccctccctcccctggtcccacagactgtggccatgaggctgcaggctggtgctatgacagcagattgcagcacagggccctcccctccagcccccagtgggacatcaaaaccaccctggggccatttgtgcagggcaccacctccagtattgatggggaaaataaactcagtagagccacgacagggtggagagaagcagggaccattgtcttcctcaggagcgtgacagctgaccccacagaccatgcttgctggtacacactggtcccagacccaggcctgtcggacatcagcagtgtgctaaaaacgtgtaagatgtcactactcaccgtgtgtcctatctagttgacatgggtggagtcagctaaggggtgaatgttcatatgctcccaattcacgttgaagccctaatccccaaagggatggtattgggggtggggtcttggagaggtgattaggttatgagggtggagccctgatgaatgggattagtgctttataaggagagacaccagagagatgatctctctctccaccatgtgaggacacagtgagaagacagccgtctgcaggcccggaagagagccctcaccaggaaatgaaactgttggcaccttgagacttcccagcttccagaactgtaagaaataaatgtttgttgtttaagcctttcaggctacggctttctgttacagcagcctgaactgagagtccatgccgagtttttgaaataaatgtgaattctgatgtta

SEQ ID NO: 190502 - DNA, 2496 bp, Homo sapiens
  Payload ID: 17632
  Gene Name: tetratricopeptide repeat domain 23
  Uniprot ID: Q5W5X9
  ENST ID: ENST00000394135
  CDS Start-End: 719-2062
actcttgcttccggctccggcgtggggtttgatgtcgacggagtggcttttgcttagcgtcttgaaggggggaaaaaaatcctctaagctggtgatttcacgttctttgacaaacttcaatatcaacaggcaacgataccactttaagaaaattccaaggaaaagacctcattttaaaattcccacctctggctcccaaagattggtttgcaaacttcgacaaaatactcttctccactcgctattggtgagtgctctatcattcattcttttgcctggagttttgtgaggtacccgcttgctttatgggaaaaggctgctccggaactgccctactttagactttttcatggttatcaatctgtacaaagaatcaccaaactgataaagcaggaaccagagggcaaatcacgctgccaagacaactgtgtaattcgctcgaaaaagaaacggtgagcctctccagcagactgggtaaactggcaagggattttacgacatagttggagattggagagttacagaaacttttccggttttttacaagttttaaaggagtgattgagtgtcaaaggaaaagcagagaaaatacaggcacaatttaaagacagcaggaagaagagtgttcagagagcatttttctctttagggtgaagtttgaaagcatcatgcccagattatcagtggatttttgaaagaagacaatgtatataaaaatatgcaagaatcacaggaaacccacatatccaaccacctagatgaagttgttgctgctgttagcatcactcatagaaagaagttccaaaacaagctgcttcagacagcactattccagcctcctcgagagaaactccacctctgtgaagagaaagcaaagtcctattccaacagtcatgagtacaaacaggccgtccatgagcttgtgcgttgcgtagcactgacaagaatttgctatggagactcacattggaaactagcagaggcacatgttaatctggctcaaggctacctccagctgaaaggactgtcactgcaagcaaaacaacatgcagaaaaagccagacaaatcctcgccaactccattgtgcctccctatagtgagaatacagatgttttcaagttttccattgagcttttccataccatgggcagagctttactctcccttcaaaaatttaaggaagctgcagagaatttgacaaaagcagagagactttcaaaggagctgctacaatgtggaagaattataaaggaagaatggatagaaattgaagcacggatcagattatcatttgcacaggtgtatcaaggtcagaagaagtcaaaagaagctttgtcccactatcaagcagctttggaatatgttgagatcagtaaaggtgaaacaagtcgtgagtgtgtacccatattgagagaattagcaggtgtagagcaagccctgggactccacgatgtatccatcaaccacttcctccaggcacatcttatcatcctgagtagaagcccctctcaagtggaggcagcagactcggcacacatcgtcgcccatgctgctgtcgcttcagggagacacgagcaccatgatgtagctgagcagtattttcaagagagcatggctcatcttaaggattctgaagggatgggaagaaccaaatttctttcaattcaagatgaattttgccattttctacaaatgactggacaaaaagagagagcaacctcgatcctgagagagtccctggaagccaaagtggaagcatttggcgatttcagtcccgaggtggcagagacataccggctcctgggaggagcagacctggcgcaggggaaccacagtggggcccgcaagaaactgaagaagtgtctccagatccagaccctcttatatggaccgcaggacaaaaggactctggccacccagcaggccatgggcatgctgtccacggcccccaaggttgcttcgaagccaaggcaggcatcaaaagccaaagtggccttctgcaccagcatccctcaggacaccctgctggggaaggcccggcccggcacaacagcagactgaggcccccaccctgaaaaagcctaggacattcctgggcactgtcatttagggtgctgtacaaatcacctccgcctagaaaatggaattcaacagtcaggatacagatttccaaggccaactgttggccccaacatgcaacagtgagaccataagcctcccgtgggccacattttgacagtggatgcccttcagggtgatatatgctataaagcagttttctatcacctaagtggtttttcttgccaacaagaatttttacccatcagcactactgtggctgaaaaacttctcttcaacagttcagtgcgccctgtgcaggagtcagcccggcatctgcttgtacacacagctccttgcataggtgtggagttagatctggacagtgaacttcaggaagtcctttcttataggaggctaatagggattgagaataa

SEQ ID NO: 190503 - DNA, 844 bp, Homo sapiens
  Payload ID: 17632
  Gene Name: tetratricopeptide repeat domain 23
  ENST ID: ENST00000434594
  CDS Start-End: 1-790
agtggaggcagcagactcggcacacatcgtcgcccatgctgctgtcgcttcagggagacacgagcaccatgatgtagctgagcagtattttcaagagagcatggctcatcttaaggattctgaagggatgggaagaaccaaatttctttcaattcaagatgaattttgccattttctacaaatgactggacaaaaagagagagcaacctcgatcctgagagagtccctggaagccaaagtggaagcatttggcgatttcagtcccgaggtggcagagacataccggctcctgggaggagcagacctggcgcaggggaaccacagtggggcccgcaagaaactgaagaaggctataacaagggccacatttaaaaatagaaactggagcccatcctctgatccctcagaacatccaaaccaaaggtcagtcactaggagacatcccaggagcatgctaattccatcacagcagggcctaagaatgaggtcatctttctctcattcaagggagaccttagtttcctgctctcagcgacacttccatagcctcatgatagctgcttggtgttctacagtgtctccagatccagaccctcttatatggaccgcaggacaaaaggactctggccacccagcaggccatgggcatgctgtccacggcccccaaggttgcttcgaagccaaggcaggcatcaaaagccaaagtggccttctgcaccagcatccctcaggacaccctgctggggaaggcccggcccggcacaacagcagactgaggcccccaccctgaaaaagcctaggacattcctgggcactgtcatttagggtgctgtacaaatcacct

SEQ ID NO: 190504 - DNA, 3538 bp, Homo sapiens
  Payload ID: 17632
  Gene Name: tetratricopeptide repeat domain 23
  Uniprot ID: Q5W5X9
  ENST ID: ENST00000459771
  CDS Start-End: 440-1621
tggttatcaatctgtacaaagaatcaccaaactgataaagcaggaaccagagggcaaatcacgctgccaagacaactgtgtaattcgctcgaaaaagaaacgatggagtctcgctctgtcacccaggctggagtatagtggtgtgatcttggctcactgcaacctctgcctcccaggttcaagcgattctcctgcctcagcctctcgagtagctggaattacaggtctggcagaaggaacagtatcaactgactgagtaggtctcattggcagttgtgattcagagacctagaaagctgaacccacggctggcaagaagaggatggtttgtgggacctgggctgatgtctgatgaaattttaagccccagctatagctactacaaagaaaagtggctgatgataagcatgtaactcaaaaagacaatgtatataaaaatatgcaagaatcacaggaaacccacatatccaaccacctagatgaagttgttgctgctgttagcatcactcatagaaagaagttccaaaacaagctgcttcagacagcactattccagcctcctcgagagaaactccacctctgtgaagagaaagcaaagtcctattccaacagtcatgagtacaaacaggccgtccatgagcttgtgcgttgcgtagcactgacaagaatttgctatggagactcacattggaaactagcagaggcacatgttaatctggctcaaggctacctccagctgaaaggactgtcactgcaagcaaaacaacatgcagaaaaagccagacaaatcctcgccaactccattgtgcctccctatagtgagaatacagatgttttcaagttttccattgagcttttccataccatgggcagagctttactctcccttcaaaaatttaaggaagctgcagagaatttgacaaaagcagagagactttcaaaggagctgctacaatgtggaagaattataaaggaagaatggatagaaattgaagcacggatcagattatcatttgcacaggtgtatcaaggtcagaagaagtcaaaagaagctttgtcccactatcaagcagctttggaatatgttgagatcagtaaaggtgaaacaagtcgtgagtgtgtacccatattgagagaattagcaggtgtagagcaagccctgggactccacgatgtatccatcaaccacttcctccaggcacatcttatcatcctgagtagaagcccctctcaagtggaggcagcagactcggcacacatcgtcgcccatgctgctgtcgcttcagggagacacgagcaccatgatgtagctgagcagtattttcaagagagcatggctcatcttaaggattctgaagggatgggaagaaccaaatttctttcaattcaagatgaattttgccattttctacaaatgactggacaaaaagagagagcaacctcgatcctgagagagtccctggaagccaaagtggaagcatttggcgatttcagtcccgaggtggcagagacataccggctcctgggaggagcagacctggcgcaggggaaccacagtggggcccgcaagaaactgaagaagggagaccttagtttcctgctctcagcgacacttccatagcctcatgatagctgcttggtgttctacagtgtctccagatccagaccctcttatatggaccgcaggacaaaaggactctggccacccagcaggccatgggcatgctgtccacggcccccaaggttgcttcgaagccaaggcaggcatcaaaagccaaagtggccttctgcaccagcatccctcaggacaccctgctggggaaggcccggcccggcacaacagcagactgaggcccccaccctgaaaaagcctaggacattcctgggcactgtcatttagggtgctgtacaaatcacctccgcctagaaaatggaattcaacagtcaggatacagatttccaaggccaactgttggccccaacatgcaacagtgagaccataagcctcccgtgggccacattttgacagtggatgcccttcagggtgatatatgctataaagcagttttctatcacctaagtggtttttcttgccaacaagaatttttacccatcagcactactgtggctgaaaaacttctcttcaacagttcagtgcgccctgtgcaggagtcagcccggcatctgcttgtacacacagctccttgcataggtgtggagttagatctggacagtgaacttcaggaagtcctttcttataggaggctaatagggattgagaataacatgagaagaaaacgctaataaagggaaacctgaacacgctgctgtcagcatgtgttttcaaagtgcagcctgcctcagagttcttcggagcctgaaaaggggtttgagaaagagcccagtaggaggggcaggaggccgacacacctgacttggcctggggcccaggaggcaggtgtaagggagtgaaaagaaaggctagccggaggctgcggggggaagaccgcagactccctgctgcttcgcatccctcctgtggcctccactgcaggcaggacaaacctggatgccacctggagctgcttcctgagttggcacactatcgtgtacacagcagtcttcagccccctggaaggaggccatagtcgtgtgaggatggcaaagtcgaacaggaagctttgagtgccttcctccacgatgtcaacgaggagatccagtgccagatcgaggtggatggaacacccaggggtaggggtgcaggtgtgggcagtgatgtcccttcccctccctcccctggtcccacagactgtggccatgaggctgcaggctggtgctatgacagcagattgcagcacagggccctcccctccagcccccagtgggacatcaaaaccaccctggggccatttgtgcagggcaccacctccagtattgatggggaaaataaactcagtagagccacgacagggtggagagaagcagggaccattgtcttcctcaggagcgtgacagctgaccccacagaccatgcttgctggtacacactggtcccagacccaggcctgtcggacatcagcagtgtgctaaaaacgtgtaagatgtcactactcaccgtgtgtcctatctagttgacatgggtggagtcagctaaggggtgaatgttcatatgctcccaattcacgttgaagccctaatccccaaagggatggtattgggggtggggtcttggagaggtgattaggttatgagggtggagccctgatgaatgggattagtgctttataaggagagacaccagagagatgatctctctctccaccatgtgaggacacagtgagaagacagccgtctgcaggcccggaagagagccctcaccaggaaatgaaactgttggcaccttgagacttcccagcttccagaactgtaagaaataaatgtttgttgtttaagcctttcaggctacggctttctgttacagcagcctgaactgagagtccatgccgagtttttgaaataaatgtgaattctgatgtta

SEQ ID NO: 190505 - DNA, 776 bp, Homo sapiens
  Payload ID: 17632
  Gene Name: tetratricopeptide repeat domain 23
  ENST ID: ENST00000480371
  CDS Start-End: 1-220
aaaaagagagagcaacctcgatcctgagagagtccctggaagccaaagtggaagcatttggcgatttcagtcccgaggtggcagagacataccggctcctgggaggagcagacctggcgcaggggaaccacagtggggcccgcaagaaactgaagaagaatctcaagagaaagctggttctagaaggttctgtgtaaccttctctggaatgttttgctgacttcccataacttgcataaaggacaagttcctttgaaacccgagttgtaaaagatcttccttgcccagggcccccaaggttgcttcgaagccaaggcaggcatcaaaagccaaagtggccttctgcaccagcatccctcaggacaccctgctggggaaggcccggcccggcacaacagcagactgaggcccccaccctgaaaaagcctaggacattcctgggcactgtcatttagggtgctgtacaaatcacctccgcctagaaaatggaattcaacagtcaggatacagatttccaaggccaactgttggccccaacatgcaacagtgagaccataagcctcccgtgggccacattttgacagtggatgcccttcagggtgatatatgctataaagcagttttctatcacctaagtggtttttcttgccaacaagaatttttacccatcagcactactgtggctgaaaaacttctcttcaacagttcagtgcgccctgtgcaggagtcagcccggcatctgcttgtacacacagctccttgcataggtgtggagt

SEQ ID NO: 190506 - DNA, 581 bp, Homo sapiens
  Payload ID: 17632
  Gene Name: tetratricopeptide repeat domain 23
  ENST ID: ENST00000560235
  CDS Start-End: 422-581
ttagactttttcatggttatcaatctgtacaaagaatcaccaaactgataaagcaggaaccagagggcaaatcacgctgccaagacaactgtgtaattcgctcgaaaaagaaacggtctggcagaaggaacagtatcaactgactgagtaggtctcattggcagttgtgattcagagacctagaaagctgaacccacggctggcaagaagaggatggtttgtgggacctgggctgatgtctgatgaaattttaagccccagctatagctactacaaagaaaagtggctgatgataagcatgtaactcaaaacagagttttgccatgttgcccaggctggtcccaaactcctgagctgaggtgaccctcccgcctccacctcccagagtgctgggattacagaagacaatgtatataaaaatatgcaagaatcacaggaaacccacatatccaaccacctagatgaagttgttgctgctgttagcatcactcatagaaagaagttccaaaacaagctgcttcagacagcactattccagcctcctcgagagaaactccacctctgtgaagagaaagcaaagt

SEQ ID NO: 190507 - DNA, 2068 bp, Homo sapiens
  Payload ID: 17632
  Gene Name: tetratricopeptide repeat domain 23
  Uniprot ID: Q5W5X9
  ENST ID: ENST00000558663
  CDS Start-End: 268-1611
actcttgcttccggctccggcgtggggtttgatgtcgacggagtggcttttgcttagcgtcttgaaggggggaaaaaaatcctctaagctggtgatttcacgttctttgacaaacttcaatatcaacaggcaacgataccactttaagaaaattccaaggaaaagacctcattttaaaattcccacctctggctcccaaagattggtttgcaaacttcgacaaaatactcttctccactcgctattgaagacaatgtatataaaaatatgcaagaatcacaggaaacccacatatccaaccacctagatgaagttgttgctgctgttagcatcactcatagaaagaagttccaaaacaagctgcttcagacagcactattccagcctcctcgagagaaactccacctctgtgaagagaaagcaaagtcctattccaacagtcatgagtacaaacaggccgtccatgagcttgtgcgttgcgtagcactgacaagaatttgctatggagactcacattggaaactagcagaggcacatgttaatctggctcaaggctacctccagctgaaaggactgtcactgcaagcaaaacaacatgcagaaaaagccagacaaatcctcgccaactccattgtgcctccctatagtgagaatacagatgttttcaagttttccattgagcttttccataccatgggcagagctttactctcccttcaaaaatttaaggaagctgcagagaatttgacaaaagcagagagactttcaaaggagctgctacaatgtggaagaattataaaggaagaatggatagaaattgaagcacggatcagattatcatttgcacaggtgtatcaaggtcagaagaagtcaaaagaagctttgtcccactatcaagcagctttggaatatgttgagatcagtaaaggtgaaacaagtcgtgagtgtgtacccatattgagagaattagcaggtgtagagcaagccctgggactccacgatgtatccatcaaccacttcctccaggcacatcttatcatcctgagtagaagcccctctcaagtggaggcagcagactcggcacacatcgtcgcccatgctgctgtcgcttcagggagacacgagcaccatgatgtagctgagcagtattttcaagagagcatggctcatcttaaggattctgaagggatgggaagaaccaaatttctttcaattcaagatgaattttgccattttctacaaatgactggacaaaaagagagagcaacctcgatcctgagagagtccctggaagccaaagtggaagcatttggcgatttcagtcccgaggtggcagagacataccggctcctgggaggagcagacctggcgcaggggaaccacagtggggcccgcaagaaactgaagaagtgtctccagatccagaccctcttatatggaccgcaggacaaaaggactctggccacccagcaggccatgggcatgctgtccacggcccccaaggttgcttcgaagccaaggcaggcatcaaaagccaaagtggccttctgcaccagcatccctcaggacaccctgctggggaaggcccggcccggcacaacagcagactgaggcccccaccctgaaaaagcctaggacattcctgggcactgtcatttagggtgctgtacaaatcacctccgcctagaaaatggaattcaacagtcaggatacagatttccaaggccaactgttggccccaacatgcaacagtgagaccataagcctcccgtgggccacattttgacagtggatgcccttcagggtgatatatgctataaagcagttttctatcacctaagtggtttttcttgccaacaagaatttttacccatcagcactactgtggctgaaaaacttctcttcaacagttcagtgcgccctgtgcaggagtcagcccggcatctgcttgtacacacagctccttgcataggtgtggagttagatctggacagtgaacttcaggaagtcctttcttataggaggctaatagggattgagaataacatgagaagaaaacgctaataaa

SEQ ID NO: 190508 - DNA, 549 bp, Homo sapiens
  Payload ID: 17632
  Gene Name: tetratricopeptide repeat domain 23
  ENST ID: ENST00000560860
  CDS Start-End: 205-549
cttttgcctggagttttgtgaggtacccgcttgctttatgggaaaaggctgctccggaactgccctactttagactttttcatggttatcaatctgtacaaagaatcaccaaactgataaagcaggaaccagagggcaaatcacgctgccaagacaactgtgtaattcgctcgaaaaagaaacgaagacaatgtatataaaaatatgcaagaatcacaggaaacccacatatccaaccacctagatgaagttgttgctgctgttagcatcactcatagaaagaagttccaaaacaagctgcttcagacagcactattccagcctcctcgagagaaactccacctctgtgaagagaaagcaaagtcctattccaacagtcatgagtacaaacaggccgtccatgagcttgtgcgttgcgtagcactgacaagaatttgctatggagactcacattggaaactagcagaggcacatgttaatctggctcaaggctacctccagctgaaaggactgtcactgcaagcaaaacaacatgcagaaaaagccaga

SEQ ID NO: 190509 - DNA, 574 bp, Homo sapiens
  Payload ID: 17632
  Gene Name: tetratricopeptide repeat domain 23
  ENST ID: ENST00000558078
  CDS Start-End: 407-574
attcattcttttgcctggagttttgtgaggtacccgcttgctttatgggaaaaggctgctccggaactgccctactttagactttttcatggttatcaatctgtacaaagaatcaccaaactgataaagcaggaaccagagggcaaatcacgctgccaagacaactgtgtaattcgctcgaaaaagaaacggtctggcagaaggaacagtatcaactgactgagtaggtctcattggcagttgtgattcagagacctagaaagctgaacccacggctggcaagaagaggatggtttgtgggacctgggctgatgtctgatgaaattttaagccccagctatagctactacaaagaaaagtggctgatgataagcatgtaactcaaaaagacaatgtatataaaaatatgcaagaatcacaggaaacccacatatccaaccacctagatgaagttgttgctgctgttagcatcactcatagaaagaagttccaaaacaagctgcttcagacagcactattccagcctcctcgagagaaactccacctctgtgaagagaaagcaaagtcctattcc

SEQ ID NO: 190510 - DNA, 585 bp, Homo sapiens
  Payload ID: 17632
  Gene Name: tetratricopeptide repeat domain 23
  ENST ID: ENST00000560772
  CDS Start-End: 337-585
atcattcattcttttgcctggagttttgtgaggtacccgcttgctttatgggaaaaggctgctccggaactgccctactttagactttttcatggttatcaatctgtacaaagaatcaccaaactgataaagcaggaaccagagggcaaatcacgctgccaagacaactgtgtaattcgctcgaaaaagaaacgatggagtctcgctctgtcacccaggctggagtatagtggtgtgatcttggctcactgcaacctctgcctcccaggttcaagcgattctcctgcctcagcctctcgagtagctggaattacagaagacaatgtatataaaaatatgcaagaatcacaggaaacccacatatccaaccacctagatgaagttgttgctgctgttagcatcactcatagaaagaagttccaaaacaagctgcttcagacagcactattccagcctcctcgagagaaactccacctctgtgaagagaaagcaaagtcctattccaacagtcatgagtacaaacaggccgtccatgagcttgtgcgttgcgtagcactgacaagaatttgctatggagactcacat

SEQ ID NO: 190511 - DNA, 666 bp, Homo sapiens
  Payload ID: 17632
  Gene Name: tetratricopeptide repeat domain 23
  ENST ID: ENST00000560279
  CDS Start-End: 212-666
actcttgcttccggctccggcgtggggtttgatgtcgacggagtggcttttgcttagcgtcttgaagggatggagtctcgctctgtcacccaggctggagtatagtggtgtgatcttggctcactgcaacctctgcctcccaggttcaagcgattctcctgcctcagcctctcgagtagctggaattacagaagacaatgtatataaaaatatgcaagaatcacaggaaacccacatatccaaccacctagatgaagttgttgctgctgttagcatcactcatagaaagaagttccaaaacaagctgcttcagacagcactattccagcctcctcgagagaaactccacctctgtgaagagaaagcaaagtcctattccaacagtcatgagtacaaacaggccgtccatgagcttgtgcgttgcgtagcactgacaagaatttgctatggagactcacattggaaactagcagaggcacatgttaatctggctcaaggctacctccagctgaaaggactgtcactgcaagcaaaacaacatgcagaaaaagccagacaaatcctcgccaactccattgtgcctccctatagtgagaatacagatgttttcaagttttccattgagcttttccataccatgggcagagctttactctcccttcaaaa

SEQ ID NO: 190512 - DNA, 560 bp, Homo sapiens
  Payload ID: 17632
  Gene Name: tetratricopeptide repeat domain 23
  ENST ID: ENST00000561365
  CDS Start-End: 90-560
actcttgcttccggctccggcgtggggtttgatgtcgacggagtggcttttgcttagcgtcttgaagggaagacaatgtatataaaaatatgcaagaatcacaggaaacccacatatccaaccacctagatgaagttgttgctgctgttagcatcactcatagaaagaagttccaaaacaagctgcttcagacagcactattccagcctcctcgagagaaactccacctctgtgaagagaaagcaaagtcctattccaacagtcatgagtacaaacaggccgtccatgagcttgtgcgttgcgtagcactgacaagaatttgctatggagactcacattggaaactagcagaggcacatgttaatctggctcaaggctacctccagctgaaaggactgtcactgcaagcaaaacaacatgcagaaaaagccagacaaatcctcgccaactccattgtgcctccctatagtgagaatacagatgttttcaagttttccattgagcttttccataccatgggcagagctttactctcccttcaaaaatttaaggaagctgca

SEQ ID NO: 190513 - DNA, 2505 bp, Homo sapiens
  Payload ID: 17632
  Gene Name: tetratricopeptide repeat domain 23
  Uniprot ID: Q5W5X9
  ENST ID: ENST00000394129
  CDS Start-End: 579-1754
gcttccggctccggcgtggggtttgatgtcgacggagtggcttttgcttagcgtcttgaaggggggaaaaaaatcctctaagctggtgatttcacgttctttgacaaacttcaatatcaacaggcaacgataccactttaagaaaattccaaggaaaagacctcattttaaaattcccacctctggctcccaaagattggtttgcaaacttcgacaaaatactcttctccactcgctattgatggagtctcgctctgtcacccaggctggagtatagtggtgtgatcttggctcactgcaacctctgcctcccaggttcaagcgattctcctgcctcagcctctcgagtagctggaattacaggtctggcagaaggaacagtatcaactgactgagtaggtctcattggcagttgtgattcagagacctagaaagctgaacccacggctggcaagaagaggatggtttgtgggacctgggctgatgtctgatgaaattttaagccccagctatagctactacaaagaaaagtggctgatgataagcatgtaactcaaaaagacaatgtatataaaaatatgcaagaatcacaggaaacccacatatccaaccacctagatgaagttgttgctgctgttagcatcactcatagaaagaagttccaaaacaagctgcttcagacagcactattccagcctcctcgagagaaactccacctctgtgaagagaaagcaaagtcctattccaacagtcatgagtacaaacaggccgtccatgagcttgtgcgttgcgtagcactgacaagaatttgctatggagactcacattggaaactagcagaggcacatgttaatctggctcaaggctacctccagctgaaaggactgtcactgcaagcaaaacaacatgcagaaaaagccagacaaatcctcgccaactccattgtgcctccctatagtgagaatacagatgttttcaagttttccattgagcttttccataccatgggcagagctttactctcccttcaaaaatttaaggaagctgcagagaatttgacaaaagcagagagactttcaaaggagctgctacaatgtggaagaattataaaggaagaatggatagaaattgaagcacggatcagattatcatttgcacaggtgtatcaaggtcagaagaagtcaaaagaagctttgtcccactatcaagcagctttggaatatgttgagatcagtaaaggtgaaacaagtcgtgagtgtgtacccatattgagagaattagcaggtgtagagcaagccctgggactccacgatgtatccatcaaccacttcctccaggcacatcttatcatcctgagtagaagcccctctcaagtggaggcagcagactcggcacacatcgtcgcccatgctgctgtcgcttcagggagacacgagcaccatgatgtagctgagcagtattttcaagagagcatggctcatcttaaggattctgaagggatgggaagaaccaaatttctttcaattcaagatgaattttgccattttctacaaatgactggacaaaaagagagagcaacctcgatcctgagagagtccctggaagccaaagtggaagcatttggcgatttcagtcccgaggtggcagagacataccggctcctgggaggagcagacctggcgcaggggaaccacagtggggcccgcaagaaactgaagaaggtaaagctggaaccagtactaacacgagactaggctctccctcccctctccaaggtcaatttctctcccttgtggtggttcttttaaatgaaactttagaagtggcttgtttagataggatgacatcacttttgtggtagatctaacctgatactttttgggtaaaagacatagtaagcctcttagacatacatattttttaaatgaattatcagtttttactatgcaaatatttttaattttttacgtagtacaattgatcagtcctttatgtttgcggtgctctctctatactgagtttatagaggaattctcttacactttcttcaattgtcattcttctttaaatttggagtttatttgtgtggatggcatgaggaatggatctaatcttaccttttttccaaatggccacccagttgtccagcaccatttaattagagagcccatctatgctccagtgacttcagataacaccttcatcatatactgattttccttatggacttaagtctatttctagatttctcttctcttccactagtctttctgtttattcatgtgtcaatatttcagttttaattacagagattttatagaatgatttaatatgtgataggagtagacaccccttatggcttttcttttactagaatatcaggtgttctagctattcttccgtgtttatttttctacatgaatttttgtatcaatttgtctaactccataaagagcttactagtatttttattgcattatttataaataaatcttgtgagaattg

SEQ ID NO: 190514 - DNA, 1353 bp, Homo sapiens
  Payload ID: 17633
  Gene Name: tetratricopeptide repeat domain 23-like
  Uniprot ID: Q6PF05
  ENST ID: ENST00000505624
  CDS Start-End: 104-1189
attgtctccttggccggacctgggctgcggaaggtaactggggacgtcgcaggctgtgcagctttcgcgaggcaccgctttggcgcccggaccgaggaagaagatgcaagccagccccatccgtatcccaactgttagcaatgacatcgactgggatttctgcttccatatgtcacagcaaaccgagatcccagctcaccagcaaacagatgagttgtatcccactggtgggtgtggagagagtgaagaggaaactaaagctaaagagaaggagaaggccatagactgtatgtctcatcccaaagagaaattagcccaatcccagaagaaagtagctcagctgattaaggaaaaaatgaatactcaagcaaacaaggagctgattcgatgtgtcatcctttctcggattatttttggggaccatcactggaaatgtgcacgagctctggccaacctagcttatggctacttgacactgagaggcctcccagttcaggccaagaaacatgctacatcagccaagaatacactgttgacctggaaggcaaatacgacctcaaataaggagaaagaggaaatcctggaagctctggtcaagctgtactacactctgggcgtggcctggctcctgcagaaccgtggcagagaagcctatttcaacctgcagaaggcagagagaaacatgaaggagctgaaagaattatataaaggaggtgtttgtgaattacaagtctctgagaacgacctaacacttgctttgggcagagcctccttggccatccacagactgaacctagctctggcatactttgaaaaggcaattggcgatgttattgctgccaagggtgataggacgtcagatctgatcagcctgtacgaggaagctgctcagatagagcagctgaggaggaaccacaaccaggccatccagtacttgcagcaggctcattctgtctgtgtttctttgttcactgaagtcagccccaaaactgcagaaatgagtgcgttactggccaaagcttatgccatgtctggagaggcccagcacagggatgctgttgagatatatttcataagaagtatcaatgcatatcgagcaacattgggctcagaggattttgaaacactgagcaccactgaagaattttgcaaatggcttgtccaaaatggagaaaaacaggacaagtagcagttcatccagatggagaagagaagccattcctggaagaaggaactctacatacaaaggcacagaagcatgacagagggcagtgtatggaggaatggtcttctgttatcaaattgaaaacctctatacaggatagccaacaataaagacaaccttgttgatga

SEQ ID NO: 190515 - DNA, 3410 bp, Homo sapiens
  Payload ID: 17633
  Gene Name: tetratricopeptide repeat domain 23-like
  ENST ID: ENST00000508722
  CDS Start-End: 102-251
tgtctccttggccggacctgggctgcggaaggtaactggggacgtcgcaggctgtgcagctttcgcgaggcaccgctttggcgcccggaccgaggaagaagatgcaagccagccccatccgtatcccaactgttagcaatgacatcgactgggatttctgcttccatatgcctcccagttcaggccaagaaacatgctacatcagccaagaatacactgttgacctggaaggcaaatacgacctcaaataaggagaaagaggaaatcctggaagctctggtcaagctgtactacactctgggcgtggcctggctcctgcagaaccgtggcagagaagcctatttcaacctgcagaaggcagagagaaacatgaaggagctgaaagaattatataaaggaggtgtttgtgaattacaagtctctgagaacgacctaacacttgctttgggcagagcctccttggccatccacagactgaacctagctctggcatactttgaaaaggcaattggcgatgttattgctgccaagggtgataggacgtcagatctgatcagcctgtacgaggaagctgctcagatagagcagctgaggaggaaccacaaccaggccatccagtacttgcagcaggtcagtgggttggccagagcccaggctgggttgccttgtttggccccaggcttggttctcagggccagggaagcatgggcttctcagaagaacaagggctggaattgattctgttttaaccctgactttcctccagatccacctaagagcccttgatcaaaccttaaatgaccaggccagagaacactgactcaggtgggcgaatgtgctgtgtcattggctgtgcagacagcacttccccctccccctcttatctctgttggtgctgtaaaaaagaagcaaaatgtgagtctactccaaggaaaaaagatacagggacaaccgaacttaaatcttcagcaaaaacaaaaggcctttttaaatgaaaaatcatggtattttagggtaatgctgtcatttgtactttaaactagtctagctgattatatttccaaacctaaggttaaactaacaaaagggtgtttcacttggaggtaactaacttgacaaatgcccgggggaaaacaaaacaaaacataggaaggaatggtgagtctattatattagggtacttttatgtatcatgtacttgaagctgctaaattcaccttttctctctccgaaggagaatgctgcctgtggcttcaggtatctcccacagtgacaaacatcaaaatactggatatcctgtatcatagaaaaggtgcaatgcaatctaacagtatacatgaaaacagactctgaagaaaaggcattgcaaacaatctgacagtccacaattataaacatcacacagtggagagatgtcagagaatgctgctgtgaaggcagggagtccactgcttacagagaaagccagtctggtttttgtgttcaagactttctcaaagcagtggtcagatcagaatgaataaaacaataaatagcagtgtttcccaaaagcaccaaaagataagagttaaaatgtatggaatgctttttctacgttccctagaggatatatcgattcatttaatctgtacaatagctctatgaagtaggtaccattattattttatctcattttaaggatgagaaaactgacgcacagagttatagctaactcagctgacattgtatagctaagaaatagtaaagcagggatttgaactccacatctgaccctacagcctgtattcataacaactctgctctgtgtcttggctccaaagtcttctctgataacccctcagctctttgaaacacctcacagtatttggcctatgaaatattaagcacaggtggttcttttgtggctggtgggtgtggactcaatgtttttctctttctcttttctaagtgttactccttccattttagcacaaataatataaaatctaacacttttttagtgcttactatatgctgggtggtgttctaaccactttacatatattaaccattaatttatttaatatttacaacaactttttataacaaatactattcttattatccctgatttacatttacaagactgccttcaagactggagttcagtccagtgagactgagctaaggttatgactttatttttgctatgaaatctaataaaaattatactagccaacatttattgagaacttaccacgtgatgagcaccgtgccctgtgctttgcatataccatctcacttaatccttcccaaaccctaatcagtgggaattatatattccttctacgaatgaaggtgaaattacttgcacaagactcatagctaggaagtggcagagctgggactcaaactcacctctcatctaaatccacagtgaacactgtcattgggtgcttaccttgtcatgattttctttattccaggctcattctgtctgtgtttctttgttcactgaagtcagccccaaaactgcagaaatgagtgcgttactggccaaagcttatgccatgtctggagaggcccagcacaggggtaggtaaaagaggtagccttgaagttatttcccagtcacatgagggaagcacattggcaaacagcctatctaagattctaattagctatttattcctgtaatggaaaaattaggtgggtcacagtctcatacaaaatcaattacacattaatttaaacctgataatatacccccacattcgttggaatgtcagtaacaaataaatcatctgatttctacatcctctatttattttgaatctcagtgagattcaccttcttaactaatagatatcacacatactgtgaatgtggcctgtgcagtatcggttgataaggacatccagtgataaatgggtagagctttacctcctccactttcagtctccttgactcttttcctctggctgacaagagagaatgtttgttagcagaattttcttgacccatattcaatagttagatactgggggttgcagagaaagccaactgattaatttatgcttcaacaatagttctttgtctggcaaggtcatctttttgaaagtgggtggctttgggagagacacaaatgaaccaatgagggaggacaatgtatcattctgtgctggcttgatcagattaatggacactgatggattcagtggcctgtcaggaggaatttaggcttcatgaagaatataatttgatcattttaaaactgtctattttctttgcttataaaagtaacctttttgtgtatgttattttccagttagagagagggacagaattatagagaaagctttccatcctacttttttcaatgcttgtattccccatgtcattaaataaacattttttttcagtttgcaaaa

SEQ ID NO: 190516 - DNA, 977 bp, Homo sapiens
  Payload ID: 17633
  Gene Name: tetratricopeptide repeat domain 23-like
  Uniprot ID: Q6PF05
  ENST ID: ENST00000502674
  CDS Start-End: 1-864
atgcaagccagccccatccgtatcccaactgttagcaatgacatcgactgggatttctgcttccatatgtcacagcaaaccgagatcccagctcaccagcaaacagatgagttgtatcccactggtgggtgtggagagagtgaagaggaaactaaagctaaagagaaggagaaggccatagactgtatgtctcatcccaaagagaaattagcccaatcccagaagaaagtagctcagctgattaaggaaaaaatgaatactcaagcaaacaaggagctgattcgatgtgtcatcctttctcggattatttttggggaccatcactggaaatgtgcacgagctctggccaacctagcttatggctacttgacactgagaggcctcccagttcaggccaagaaacatgctacatcagccaagaatacactgttgacctggaaggcaaatacgacctcaaataaggagaaagaggaaatcctggaagctctggtcaagctgtactacactctgggcgtggcctggctcctgcagaaccgtggcagagaagcctatttcaacctgcagaaggcagagagaaacatgaaggagctgaaagaattatataaaggaggtgtttgtgaattacaagtctctgagaacgacctaacacttgctttgggcagagcctccttggccatccacagactgaacctagctctggcatactttgaaaaggcaattggcgatgttattgctgccaagggtgataggacgtcagatctgatcagcctgtacgaggaagctgctcagatagagcagctgaggaggaaccacaaccaggccatccagtacttgcagcagatgctgttgagatatatttcataagaagtatcaatgcatatcgagcaacattgggctcagaggattttgaaacactgagcaccactgaagaattttgcaaatggcttgtccaaaatggagaaaaacaggacaagtag

SEQ ID NO: 190517 - DNA, 973 bp, Homo sapiens
  Payload ID: 17633
  Gene Name: tetratricopeptide repeat domain 23-like
  Uniprot ID: Q6PF05
  ENST ID: ENST00000610313
  CDS Start-End: 1-864
atgcaagccagccccatccgtatcccaactgttagcaatgacatcgactgggatttctgcttccatatgtcacagcaaaccgagatcccagctcaccagcaaacagatgagttgtatcccactggtgggtgtggagagagtgaagaggaaactaaagctaaagagaaggagaaggccatagactgtatgtctcatcccaaagagaaattagcccaatcccagaagaaagtagctcagctgattaaggaaaaaatgaatactcaagcaaacaaggagctgattcgatgtgtcatcctttctcggattatttttggggaccatcactggaaatgtgcacgagctctggccaacctagcttatggctacttgacactgagaggcctcccagttcaggccaagaaacatgctacatcagccaagaatacactgttgacctggaaggcaaatacgacctcaaataaggagaaagaggaaatcctggaagctctggtcaagctgtactacactctgggcgtggcctggctcctgcagaaccgtggcagagaagcctatttcaacctgcagaaggcagagagaaacatgaaggagctgaaagaattatataaaggaggtgtttgtgaattacaagtctctgagaacgacctaacacttgctttgggcagagcctccttggccatccacagactgaacctagctctggcatactttgaaaaggcaattggcgatgttattgctgccaagggtgataggacgtcagatctgatcagcctgtacgaggaagctgctcagatagagcagctgaggaggaaccacaaccaggccatccagtacttgcagcagatgctgttgagatatatttcataagaagtatcaatgcatatcgagcaacattgggctcagaggattttgaaacactgagcaccactgaagaattttgcaaatggcttgtccaaaatggagaaaaacaggtaaa

SEQ ID NO: 190518 - DNA, 2005 bp, Homo sapiens
  Payload ID: 17634
  Gene Name: tetratricopeptide repeat domain 24
  Uniprot ID: A2A3L6
  ENST ID: ENST00000368236
  CDS Start-End: 37-1785
cagagagccagctgcggagaagacccaaggagccctatgtcttcccccaaccctgaggatgtgccccggaggccagaacctgagccctcaagctccaataagaaaaagaagaaaagaaagtggctgcggcaagaagccagcatccaagccctcaccagggctggccatggggcccttcaggctggccagaaccatgaagccttgaacaacttccagagggccttccttctggcctccaaggccccacaaaccagggatacccctgtgctccaggcctgcgccttcaacctgggggctgcctatgtggagactggggacccagccagaggccttgagctactcctgcgagcccaccctgaagagaaggcacagggcaggcgacacggcgaccaatgtttcaatgtggctttggcctaccatgccctcggcgagctgcctcaagctttggcctggtaccacagggccctgggccactaccagccacagggtgaccagggagaagcctgggcaaaaatgggagcctgctaccaggctctgggacagcctgagctagcagcccactgcctgcaggaagcaagccaggcctatgctcaagagagacagctgcgggccgcagccctggcactgggggctgcggcaggatgtatgctgaagagtgggcggcatcgggtgggggaagttgtgcaggtgctggagaaaagccggaggcttgccgagaggagcactgagaggcgactgctggggcacctctataacgatctaggcctgggctactcccagctccagctgttcccgctggccgtggaggccttcctgcaggccctgcccctgtgctgggtgccaggagagcaggccacagtgctaagaaacctcgggatggcccacaatgccctcggcaactatcaggaagctcgggagtttcaccagaaggctgctgacctacacggctctgtggggcagcggtgggagcagggccggagctttggcagcctggcctttgcattgagccagctgggggaccacaaggctgccagagacaactacctgcatgccctgcaggctgcccgggactctggggacatgaagggacagtggcaggcctgtgagggtctgggggctgctgcagccaggctggggcagtatgaccaggccttgaagtactataaggaagcactggcccagtgtcagaaggagccagattctgtgcgagaacggctggtggccaagctggcagacaccgtgaggacgcgcttggcccaggtggggctggtccagactcacaccctgacttcggctccgggaagactccaggctccaggtggggccagccaggcggaggggaccccagcaaaggcaggaagcagcacagcaggtgtccagcacagatcttccagtgggtgggaagatgaagagtttgaggagggccaccagaagaaaaaagaggagaggtcggcaaacgttccggtgagggctgggccgggaagaccagagctgtgtttccttccaggcacagtgaatcattcgcaccatctagcttctagttgccccacgtttaccaagcacacgccctgcagagggacagtcctcggcaaagcctccatctatagtccaggacccagggcccatcttccatttgtaggtccaggccctcccagagcggagtaccctagcatcttggtacccaatggccctcaagccaataggtcatccaggtggcccagggaaagcctcagcaggagccgccagaggagacccatggagtcgggcatctgcactattgtgtgacctccccctgccagcctcagccctcatccctgaagcacctgtccaacacgcacacactagggggtcctggggaccaagcctcttcccagttgctcagccctgcagggatgtggaacacagtgcagccagtggactcctgaggaggctggccaagggctttgcaggctcggccctgagaggttctgtttgttcctccttgggatttttggactcagtaggt

SEQ ID NO: 190519 - DNA, 1969 bp, Homo sapiens
  Payload ID: 17634
  Gene Name: tetratricopeptide repeat domain 24
  Uniprot ID: A2A3L6
  ENST ID: ENST00000368237
  CDS Start-End: 1-1749
atgtcttcccccaaccctgaggatgtgccccggaggccagaacctgagccctcaagctccaataagaaaaagaagaaaagaaagtggctgcggcaagaagccagcatccaagccctcaccagggctggccatggggcccttcaggctggccagaaccatgaagccttgaacaacttccagagggccttccttctggcctccaaggccccacaaaccagggatacccctgtgctccaggcctgcgccttcaacctgggggctgcctatgtggagactggggacccagccagaggccttgagctactcctgcgagcccaccctgaagagaaggcacagggcaggcgacacggcgaccaatgtttcaatgtggctttggcctaccatgccctcggcgagctgcctcaagctttggcctggtaccacagggccctgggccactaccagccacagggtgaccagggagaagcctgggcaaaaatgggagcctgctaccaggctctgggacagcctgagctagcagcccactgcctgcaggaagcaagccaggcctatgctcaagagagacagctgcgggccgcagccctggcactgggggctgcggcaggatgtatgctgaagagtgggcggcatcgggtgggggaagttgtgcaggtgctggagaaaagccggaggcttgccgagaggagcactgagaggcgactgctggggcacctctataacgatctaggcctgggctactcccagctccagctgttcccgctggccgtggaggccttcctgcaggccctgcccctgtgctgggtgccaggagagcaggccacagtgctaagaaacctcgggatggcccacaatgccctcggcaactatcaggaagctcgggagtttcaccagaaggctgctgacctacacggctctgtggggcagcggtgggagcagggccggagctttggcagcctggcctttgcattgagccagctgggggaccacaaggctgccagagacaactacctgcatgccctgcaggctgcccgggactctggggacatgaagggacagtggcaggcctgtgagggtctgggggctgctgcagccaggctggggcagtatgaccaggccttgaagtactataaggaagcactggcccagtgtcagaaggagccagattctgtgcgagaacggctggtggccaagctggcagacaccgtgaggacgcgcttggcccaggtggggctggtccagactcacaccctgacttcggctccgggaagactccaggctccaggtggggccagccaggcggaggggaccccagcaaaggcaggaagcagcacagcaggtgtccagcacagatcttccagtgggtgggaagatgaagagtttgaggagggccaccagaagaaaaaagaggagaggtcggcaaacgttccggtgagggctgggccgggaagaccagagctgtgtttccttccaggcacagtgaatcattcgcaccatctagcttctagttgccccacgtttaccaagcacacgccctgcagagggacagtcctcggcaaagcctccatctatagtccaggacccagggcccatcttccatttgtaggtccaggccctcccagagcggagtaccctagcatcttggtacccaatggccctcaagccaataggtcatccaggtggcccagggaaagcctcagcaggagccgccagaggagacccatggagtcgggcatctgcactattgtgtgacctccccctgccagcctcagccctcatccctgaagcacctgtccaacacgcacacactagggggtcctggggaccaagcctcttcccagttgctcagccctgcagggatgtggaacacagtgcagccagtggactcctgaggaggctggccaagggctttgcaggctcggccctgagaggttctgtttgttcctccttgggatttttggactcagtaggt

SEQ ID NO: 190520 - DNA, 1984 bp, Homo sapiens
  Payload ID: 17635
  Gene Name: tetratricopeptide repeat domain 25
  ENST ID: ENST00000591658
  CDS Start-End: 80-1228
ggagcttccacaaaccagatagaggttctccagcttttctttgattgtctctgctttagcgtctctaaatccggtcaccatgtcggaccccgaaggcgagaccttgcgaagcacctttccctcttatatggccgaaggcgagcggctctacctgtgcggggaattttctaaagccgcgcagagcttcagcaacgctctttaccttcaggatggagacaagaactgcctggttgctcgctcaaagtgcttcctgaagatgggagacttggagagatccctgaaggatgctgaggcttcgctccagagtgacccagctttctgtaaggggattttgcaaaaggctgagacactgtacaccatgggagactttgagtttgccttggtattctatcatcgaggctacaagctgaggcctgatcgggaattcagagttggcattcagaaagcccaggaagccatcaacaactcagtgggaagtccttcttccattaagctggagaacaaaggggacctctccttcttaagcaagcaggctgagaatataaaagcccagcagaagcctcagcccatgaaacacctcttacaccccaccaagggagagcccaagtggaaggcctcgctcaagagtgagaagactgtccgccagcttctgggggagctctacgtggacaaagagtatttggagaagctcctattggatgaagacctgatcaaaggcaccatgaagggcggcctgactgtggaggacctcatcatgacgggcatcaactacctggatactcacagcaacttctggaggcagcagaagccgatctacgccagggagcgggaccggaagctgatgcaagagaaatggctgcgggaccacaaacgccgtccctcacagacagcccattacatcctcaagagcctggaggacattgatatgttgctcacaagtggcagtgctgaagggagtcttcagaaagctgagaaagtgctgaagaaggtactggaatggaacaaggaagaggtacccaacaaggatgaactggttggaaacttgtatagctgcatagggaatgcccagattgagctggggcagatggaggcagccctgcagagccacagaaaggacctggagatcgccaaggaatatgaccttcctgatgcaaaatcgagagcccttgacaacattggcagagtttttgccagagttgggaaattccagcaagccattgacacgtgagtgaccaagaattgcctcttccccacctccatggccttggacgatgccaacaagggtatcatcagagaactgaggaaaaccaactacgtggagaatctcaaagaaaaaagcgagggagaagcttcactgtatgaagatagaataataacaagagagaaggacatgaggagagtgagagatgagcccgagaaggtggtgaagcagtgggaccatagtgaggatgagaaagagacagatgaggacgatgaggcttttggggaagctctgcagagcccagcaagcggaaagcagagtgtggaagcaggaaaagccagaagcgatttgggagcagttgccaagggcctgtcaggagaattaggcacaagatcaggagaaacaggcaggaagctactagaagctggcagaagagagtcaagagaaatttataggaggccttcgggagaattagagcaaagactctcaggagaattcagcagacaggaaccagaagaactaaagaaactttcagaagtgggcagaagagagccagaagaactgggaaaaacacaatttggagaaataggagaaacgaaaaaaacaggaaatgagatggaaaaggaatatgaatgaagccatcggtagagatgaggatcaggaagctggtgttcagagggatcatgggattttattaaactggattttcaagcgatttgtctgttataggaaaaatgagggttttacttctgctgctttccatcactattttgccattaaata

SEQ ID NO: 190521 - DNA, 2255 bp, Homo sapiens
  Payload ID: 17635
  Gene Name: tetratricopeptide repeat domain 25
  Uniprot ID: Q96NG3
  ENST ID: ENST00000377540
  CDS Start-End: 69-2087
aaaccagatagaggttctccagcttttctttgattgtctctgctttagcgtctctaaatccggtcaccatgtcggaccccgaaggcgagaccttgcgaagcacctttccctcttatatggccgaaggcgagcggctctacctgtgcggggaattttctaaagccgcgcagagcttcagcaacgctctttaccttcaggatggagacaagaactgcctggttgctcgctcaaagtgcttcctgaagatgggagacttggagagatccctgaaggatgctgaggcttcgctccagagtgacccagctttctgtaaggggattttgcaaaaggctgagacactgtacaccatgggagactttgagtttgccttggtattctatcatcgaggctacaagctgaggcctgatcgggaattcagagttggcattcagaaagcccaggaagccatcaacaactcagtgggaagtccttcttccattaagctggagaacaaaggggacctctccttcttaagcaagcaggctgagaatataaaagcccagcagaagcctcagcccatgaaacacctcttacaccccaccaagggagagcccaagtggaaggcctcgctcaagagtgagaagactgtccgccagcttctgggggagctctacgtggacaaagagtatttggagaagctcctattggatgaagacctgatcaaaggcaccatgaagggcggcctgactgtggaggacctcatcatgacgggcatcaactacctggatactcacagcaacttctggaggcagcagaagccgatctacgccagggagcgggaccggaagctgatgcaagagaaatggctgcgggaccacaaacgccgtccctcacagacagcccattacatcctcaagagcctggaggacattgatatgttgctcacaagtggcagtgctgaagggagtcttcagaaagctgagaaagtgctgaagaaggtactggaatggaacaaggaagaggtacccaacaaggatgaactggttggaaacttgtatagctgcatagggaatgcccagattgagctggggcagatggaggcagccctgcagagccacagaaaggacctggagatcgccaaggaatatgaccttcctgatgcaaaatcgagagcccttgacaacattggcagagtttttgccagagttgggaaattccagcaagccattgacacgtgggaagaaaagatccctctggcaaaaaccaccctggagaagacctggctgttccacgagatcggccgctgctacttggagctggaccaggcctggcaggcccagaattatggcgagaagtcccagcagtgtgccgaggaggaaggggacattgagtggcaactgaatgccagtgttctggtggcccaggcacaagtgaagctgagagacttcgagtcagccgtgaacaattttgagaaggccctggagagagcaaagcttgtgcataacaacgaggcgcagcaggccatcatcagtgccttggacgatgccaacaagggtatcatcagagaactgaggaaaaccaactacgtggagaatctcaaagaaaaaagcgagggagaagcttcactgtatgaagatagaataataacaagagagaaggacatgaggagagtgagagatgagcccgagaaggtggtgaagcagtgggaccatagtgaggatgagaaagagacagatgaggacgatgaggcttttggggaagctctgcagagcccagcaagcggaaagcagagtgtggaagcaggaaaagccagaagcgatttgggagcagttgccaagggcctgtcaggagaattaggcacaagatcaggagaaacaggcaggaagctactagaagctggcagaagagagtcaagagaaatttataggaggccttcgggagaattagagcaaagactctcaggagaattcagcagacaggaaccagaagaactaaagaaactttcagaagtgggcagaagagagccagaagaactgggaaaaacacaatttggagaaataggagaaacgaaaaaaacaggaaatgagatggaaaaggaatatgaatgaagccatcggtagagatgaggatcaggaagctggtgttcagagggatcatgggattttattaaactggattttcaagcgatttgtctgttataggaaaaatgagggttttacttctgctgctttccatcactattttgccattaaataggtgtctttcactcttgcaaa

SEQ ID NO: 190522 - DNA, 466 bp, Homo sapiens
  Payload ID: 17635
  Gene Name: tetratricopeptide repeat domain 25
  ENST ID: ENST00000585530
  CDS Start-End: 1-63
tccctgaaggatgctgaggcttcgctccagagtgacccagctttctgtaaggtcattgcctaagtccctgccccctgtattccaaccttgaccttcaacccaggacccttctgttccaccacatgtccttcttccattaagctggagaacaaaggggacctctccttcttaagcaagcaggctgagaatataaaagcccagcagaagcctcagcccatgaaacacctcttacaccccaccaagggagagcccaagtggaaggcctcgctcaagagtgagaagactgtccgccagcttctgggggagctctacgtggacaaagagtatttggagaagctcctattggatgaaggtttcggacactttgttggcacggggccttgggggaaaggaaatctgggtggatgcttcatgcatgagctgaaggcagaacctgtcatataatattagctgacgtgtacctgtg

SEQ ID NO: 190523 - DNA, 2242 bp, Homo sapiens
  Payload ID: 17635
  Gene Name: tetratricopeptide repeat domain 25
  ENST ID: ENST00000617460
  CDS Start-End: 61-2055
tagaggttctccagcttttctttgattgtctctgctttagcgtctctaaatccggtcaccatgtcggaccccgaaggcgagaccttgcgaagcacctttccctcttatatggccgaaggcgagcggctctacctgtgcggggaattttctaaagccgcgcagagcttcagcaacgctctttaccttcaggatggagacaagaactgcctggttgctcgctcaaagtgcttcctgaagatgggagacttggagagatccctgaaggatgctgaggcttcgctccagagtgacccagctttctgtaaggggattttgcaaaaggctgagacactgtacaccatgggagactttgagtttgccttggtattctatcatcgaggctacaagctgaggcctgatcgggaattcagagttggcattcagaaagcccaggaagccatcaacaactcagtgggaagtccttcttccattaagctggagaacaaaggggacctctccttcttaagcaagcaggctgagaatataaaagcccagcagaagcctcagcccatgaaacacctcttacaccccaccaagggagagcccaagtggaaggcctcgctcaagagtgagaagactgtccgccagcttctgggggagctctacgtggacaaagagtatttggagaagctcctattggatgaagacctgatcaaaggcaccatgaagggcggcctgactgtggaggacctcatcatgacgggcatcaactacctggatactcacagcaacttctggaggcagcagaagccgatctacgccagggagcgggaccggaagctgatgcaagagaaatggctgcgggaccacaaacgccgtccctcacagacagcccattacatcctcaagagcctggaggacattgatatgttgctcacaagtggcagtgctgaagggagtcttcagaaagctgagaaagtgctgaagaaggtactggaatggaacaaggaagaggtacccaacaaggatgaactggttggaaacttgtatagctgcatagggaatgcccagattgagctggggcagatggaggcagccctgcagagccacagaaaggacctggagatcgccaaggaatatgaccttcctgatgcaaaatcgagagcccttgacaacattggcagagtttttgccagagttgggaaattccagcaagccattgacacgtgggaagaaaagatccctctggcaaaaaccaccctggagaagacctggctgttccacgagatcggccgctgctacttggagctggaccaggcctggcaggcccagaattatggcgagaagtcccagcagtgtgccgaggaggaaggggacattgagtggcaactgaatgccagtgttctggtggcccaggcacaagtgaagctgagagacttcgagtcagccgtgaacaattttgagaaggccctggagagagcaaagcttgtgcataacaacgaggcgcagcaggccatcatcagtgccttggacgatgccaacaagggtatcatcagagaactgaggaaaaccaactacgtggagaatctcaaagaaaaaagcgagggagaagcttcactgtatgaagatagaataataacaagagagaaggacatgaggagagtgagagatgagcccgagaaggtggtgaagcagtgggaccatagtgaggatgagaaagagacagatgaggacgatgaggcttttggggaagctctgcagagcccagcaagcggaaagcagagtgtggaagcaggaaaagccagaagcgatttgggagcagttgccaagggcctgtcaggagaattaggcacaagatcaggagaaacaggcaggaagctactagaagctggcagaagagagtcaagagaaatttataggaggccttcgggagaattagagcaaagactctcaggagaattcagcagacaggaaccagaagaactaaagaaactttcagaagtgggcagaagagagccagaagaactgggaaaaacacaatttggagaaataggagaaacgaaaaacaggaaatgagatggaaaaggaatatgaatgaagccatcggtagagatgaggatcaggaagctggtgttcagagggatcatgggattttattaaactggattttcaagcgatttgtctgttataggaaaaatgagggttttacttctgctgctttccatcactattttgccattaaataggtgtctttcactcttgc

SEQ ID NO: 190524 - DNA, 770 bp, Homo sapiens
  Payload ID: 17635
  Gene Name: tetratricopeptide repeat domain 25
  ENST ID: ENST00000593239
  CDS Start-End: 90-347
gctaagaaacggagcttccacaaaccagatagaggttctccagcttttctttgattgtctctgctttagcgtctctaaatccggtcaccatgtcggaccccgaaggcgagaccttgcgaagcacctttccctcttatatggccgaaggcgagcggctctacctgtgcggggaattttctaaagccgcgcagagcttcagcaacgctctttaccttcaggatggagacaagaactgcctggttgctcgctcaaagtgcttcctgaagatgggagacttggagagatccctgaaggatgctgaggcttcgctccagagtgacccagctttctgtaaggtcattgcctaagtccctgccccctgtattccaaccttgaccttcaacccaggacccttctgttccaccacatgtccttcttccattaagctggagaacaaaggggacctctccttcttaagcaagcaggctgagaatataaaagcccagcagaagcctcagcccatgaaacacctcttacaccccaccaagggagagcccaagtggaaggcctcgctcaagagtgagaagactgtccgccagcttctgggggagctctacgtggacaaagagtatttggagaagctcctattggatgaagacctgatcaaaggcaccatgaagggcggcctgactgtggaggacctcatcatgacgggcatcaactacctggatactcacagcaacttctggaggcagcagaagccgatctacgccagggagcgggaccggaag

SEQ ID NO: 190525 - DNA, 2015 bp, Homo sapiens
  Payload ID: 17636
  Gene Name: tetratricopeptide repeat domain 26
  Uniprot ID: A0AVF1
  ENST ID: ENST00000343187
  CDS Start-End: 76-1647
gtgctgtgtggatgcggcgaaacgctgaggcgcggccttcgctgtgtggtggggactcacaagaccgacgtcaagatgatgctttcaagggccaaacctgctgtaggcagaggcgtacagcacactgacaaaagaaagaagaaaggtaggaagattccaaaactagaggagctactttcaaaaagagatttcactggagctattaccctgttggaggaatacgaaaatgctacaaaagaggaaaattgtaattctgaagtctgggtgaacctagcttgcacctacttctttcttgggatgtataaacaagctgaagcagctggatttaaagcttcaaaaagccgactccaaaaccgcctcctcttccacttggctcacaagtttaatgatgagaaaaaattgatgagctttcatcaaaatcttcaggatgtcacagaagatcaactcagtttggcctcaatccactatatgcgatctcactaccaagaagctatagatatatataagcgaatactgctagataacagggaataccttgcccttaatgtttatgtggccctctgctactacaagttggattactatgatgtgtctcaagaagttttggctgtttaccttcagcaaattcctgatagtaccatcgcactcaatcttaaagcctgtaaccattttcgcctttacaatggcagagcagctgaggcagaactcaaaagcttgatggacaatgcttcttcatcctttgaatttgctaaagaactcatcaggcacaatctggttgttttccgaggaggtgaaggggctttgcaggttttacctcccctagttgatgtcattcctgaagctaggctaaacttggtgatttactaccttcgtcaagatgatgtacaagaagcttataacttaattaaggatctggaacctactactcctcaggagtatattctcaaaggagtggtcaatgcagcccttggccaggaaatgggttcaagggatcatatgaaaattgcccagcagttcttccagttggtgggaggatcagctagtgaatgtgatacaataccagggaggcagtgcatggcttcctgtttcttcctgcttaagcaatttgatgatgttttgatttacctcaactcatttaagagttacttctataatgatgacatctttaactttaattatgcccaagccaaagctgcaacaggcaataccagtgagggcgaagaggcgttcctcttgatccaaagtgagaagatgaaaaatgattacatttacctcagctggttagctcggtgctatattatgaataagaaaccaagactagcctgggaactttatcttaagatggaaacctccggcgagtccttcagtctcttacagctcattgctaatgactgctacaagatgggccagttttactattctgccaaagcttttgatgtccttgagaggctggatcctaaccctgaatattgggaaggcaaacggggtgcctgtgtgggcattttccagatgatcatagctgggagagaacccaaagagacccttcgagaagtgctccatttactgagaagcacaggtaacacccaagtagaatacatgatccggatcatgaagaaatgggccaaagaaaacagagtgtccatctaaaatagcgccagcgtcctaggaaccagcttctactttgacataaaactggaaatcattttcactccagtttaatctgtgatacagggctctgttttattgacattttccttccttgctctttaagcctcaaggtcagagactgacttgctgagacttagtctcctggctgaacagagtgccatagtctgtgaccctgtatgatcctagtagcaataagattttggacttatctggtgcctttcttccaaaaatgctcagagtacttttatgcaatttactgactttaaggaaaacagtataacttttttttgttagcattttatggcattgtctcctggctgcaataacaaacatctttgatgttcaag

SEQ ID NO: 190526 - DNA, 4198 bp, Homo sapiens
  Payload ID: 17636
  Gene Name: tetratricopeptide repeat domain 26
  Uniprot ID: A0AVF1
  ENST ID: ENST00000430935
  CDS Start-End: 115-1578
cgtaccagcgtccaggcggggttaccgtggagacagaacgtgctgtgtggatgcggcgaaacgctgaggcgcggccttcgctgtgtggtggggactcacaagaccgacgtcaagatgatgctttcaagggccaaacctgctgtaggcagaggcgtacagcacactgacaaaagaaagaagaaaggtaggaagattccaaaactagaggagctactttcaaaaagagatttcactggagctattaccctgttggagttcaaacgtcatgttggggaagaagaagaggatactaatttgtggattggatattgtgcctttcacctgggtgactacaagagagctctggaggaatacgaaaatgctacaaaagaggaaaattgtaattctgaagtctgggtgaacctagcttgcacctacttctttcttgggatgtataaacaagctgaagcagctggatttaaagcttcaaaaagccgactccaaaaccgcctcctcttccacttggctcacaagtttaatgatgagaaaaaattgatgagctttcatcaaaatcttcaggatgtcacagaagatcaactcagtttggcctcaatccactatatgcgatctcactaccaagaagctatagatatatataagcgaatactgctagataacagggaataccttgcccttaatgtttatgtggccctctgctactacaagttggattactatgatgtgtctcaagaagttttggctgtttaccttcagcaaattcctgatagtaccatcgcactcaatcttaaagcctgtaaccattttcgcctttacaatggcagagcagctgaggcagaactcaaaagcttgatggacaatgcttcttcatcctttgaatttgctaaagaactcatcaggcacaatctggttgttttccgaggaggtgaaggggctttgcaggttttacctcccctagttgatgtcattcctgaagctaggctaaacttggtgatttactaccttcgtcaagatgatgtacaagaagcttataacttaattaaggatctggaacctactactcctcaggagtatattctcaaaggagtggtcaatgcagcccttggccaggaaatgggttcaagggatcatatgaaaattgcccagcagttcttccagttggtgggaggatcagctagtgaatgtgatacaataccagggaggcagtgcatggcttcctgtttcttcctgcttaagcaatttgatgatgttttgatttacctcaactcatttaagagttacttctataatgatgacatctttaactttaattatgcccaagccaaagctgcaacaggcaataccagtgagggcgaagaggcgttcctcttgatccaaagtgagaagatgaaaaatgattacatttacctcagctggttagctcggtgctatattatgaataagaaaccaagactagcctgggaactttatcttaagatggaaacctccggcgagtccttcagtctcttacagctcattgctaatgactgctacaagagagacccttcgagaagtgctccatttactgagaagcacaggtaacacccaagtagaatacatgatccggatcatgaagaaatgggccaaagaaaacagagtgtccatctaaaatagcgccagcgtcctaggaaccagcttctactttgacataaaactggaaatcattttcactccagtttaatctgtgatacagggctctgttttattgacattttccttccttgctctttaagcctcaaggtcagagactgacttgctgagacttagtctcctggctgaacagagtgccatagtctgtgaccctgtatgatcctagtagcaataagattttggacttatctggtgcctttcttccaaaaatgctcagagtacttttatgcaatttactgactttaaggaaaacagtataacttttttttgttagcattttatggcattgtctcctggctgcaataacaaacatctttgatgttcaagaatcagcatcattgtatcatttaactttaaggcgtctctgtacgttatcccattttattggggaattccataaagggttttataacgtcatctctgaatcttgggagaataactagctatgtgtttctaagaaaggcagtaagctactttatcaaactgtccagtcattaataggatagatttatgggattactctttcagtaattaaattgttgatgataataacatgttacagcgcagtaagatgagtattgcaatgttttaaaaggtgagtactatgaaaaaaattgtagtacctctaaaggtattcaagaaacaatgtttatgaatctcactagtccattatagtttggtaccataattattttaggtaacaaagcaggttaggtttttgttaatgtatcttgcttaacaaacatcagtttttgttgttgttgttgttgttgttgttgttgttgtttttgagacggagtctcgctctgtcgcccaggctggagtacagtggtgcgatctcggctcactgcaagctccacctcctgggttcacgccagtctcctgcctcagccttctgagtagctgggactacaggcacccgccaccgcgcccggctaattttttgtatttttagtagagacggggtttcaccgtgttagccacaatgctctccatctcctgacctcgtgatccgcccgtctcagcctcccaaagtgctgggattacaggcatgagccaccgcgcctggcccaaacatcagttttgaaagtagggctacagtgatttatatgtattgtgggcacttattaatgtaacgataataaaacatgaatcgtataaagtcctttgagggaatctcctaatggctaggctctctgtcgtaagtcatattccagccccaggcttctgagctcttataacatacaactgagcattcttaagctcacaacctatttccagaaaagagacccacatctttctatgttttatactacctttgtttttacaccatatagtttttttctattagtttaaggtacctagtgttacaggtctagaaagtgcagagccatccctacctagaagagaatagatgggaagagaactgaaagaaagaattcctcaagcactgaagtcaggaaaatccccgtaggcactgtattagttgttccatttatcccagcactccacttgtggatgaaggagttgtatagaaaggagatgagaaaatggcaggagtggaagcagccaagaagagatcgatgactgaagatctccttcaccttcaggactgtctcaaggggttatttcacctctactcatgaggatggccagtttttctgtcttttatctttagacccatatataatcagttcagagcacaaatcaaaataaactggcctaaataactgaattctaggaagcaaagctacatcttttttcatatgccaaagcttctgtttcctcatgttgttcctactttttaaataataaatggctctcagcatcttaggaactagatgggtcccatctgggtagaacctgctataatttttagaatcactcttgtaattcttacctcacttaaaatattaggaaacacagtaatagaaaagacagggagaactcgtctgcaggttttggcagtgaaatttgtcttccagtgaattgctattattttcaaattgcctatagtcaaaaagcttttccattgatggagacttactttcaaatgagcttgtgttgaattcagcactctagattctctctgacattttcctgtcttttgggaaaaaaaagcagatattccaaaaatggcagaaatctaatttttgtaaactttttcatctataggattgagccaaaaaacatacatactattttaaagaaaggtaccatctaattcttttattaaagatagctacttctgaaatgtcttaacagagtttcaagattgcaaagtagtattgcatagctggttttcttacatgtgatgatggaggagagaggaagacccagacttaggcatgtagtgaaatatgtacagtttctggcatcagtgtactatttatagtctatagcatacattacttgcaaatgggaaaagtattttataattatttttgtacctcaaaataattattatattctactgtattatattcaaattaaagtttattatttgattctt

SEQ ID NO: 190527 - DNA, 1599 bp, Homo sapiens
  Payload ID: 17636
  Gene Name: tetratricopeptide repeat domain 26
  ENST ID: ENST00000495038
  CDS Start-End: 95-1366
gttaccgtggagacagaacgtgctgtgtggatgcggcgaaacgctgaggcgcggccttcgctgtgtggtggggactcacaagaccgacgtcaagatgatgctttcaagggccaaacctgctgtaggcagaggcgtacagcacactgacaaaagaaagaagaaaggtaggaagattccaaaactagaggagctactttcaaaaagagatttcactggagctattaccctgttggagttcaaacgtcatgttggggaagaagaagaggatactaatttgtggattggatattgtgcctttcacctgggtgactacaagagagctctggaggaatacgaaaatgctacaaaagaggaaaattgtaattctgaagtctgggtgaacctagcttgcacctacttctttcttgggatgtataaacaagctgaagcagctggatttaaagcttcaaaaagccgactccaaaaccgcctcctcttccacttggctcacaaggttgttttccgaggaggtgaaggggctttgcaggttttacctcccctagttgatgtcattcctgaagctaggctaaacttggtgatttactaccttcgtcaagatgatgtacaagaagcttataacttaattaaggatctggaacctactactcctcaggagtatattctcaaaggagtggtcaatgcagcccttggccaggaaatgggttcaagggatcatatgaaaattgcccagcagttcttccagttggtgggaggatcagctagtgaatgtgatacaataccagggaggcagtgcatggcttcctgtttcttcctgcttaagcaatttgatgatgttttgatttacctcaactcatttaagagttacttctataatgatgacatctttaactttaattatgcccaagccaaagctgcaacaggcaataccagtgagggcgaagaggcgttcctcttgatccaaagtgagaagatgaaaaatgattacatttacctcagctggttagctcggtgctatattatgaataagaaaccaagactagcctgggaactttatcttaagatggaaacctccggcgagtccttcagtctcttacagctcattgctaatgactgctacaagatgggccagttttactattctgccaaagcttttgatgtccttgagaggctggatcctaaccctgaatattgggaaggcaaacggggtgcctgtgtgggcattttccagatgatcatagctgggagagaacccaaagagacccttcgagaagtgctccatttactgagaagcacaggtaacacccaagtagaatacatgatccggatcatgaagaaatgggccaaagaaaacagagtgtccatctaaaatagcgccagcgtcctaggaaccagcttctactttgacataaaactggaaatcattttcactccagtttaatctgtgatacagggctctgttttattgacattttccttccttgctctttaagcctcaaggtcagagactgacttgctgagacttagtctcctggctgaacagagtgccatagtctgtgaccctgtatgatcctagtagcaataagattttggacttatctg

SEQ ID NO: 190528 - DNA, 1794 bp, Homo sapiens
  Payload ID: 17636
  Gene Name: tetratricopeptide repeat domain 26
  ENST ID: ENST00000478836
  CDS Start-End: 81-1424
agaacgtgctgtgtggatgcggcgaaacgctgaggcgcggccttcgctgtgtggtggggactcacaagaccgacgtcaagatgatgctttcaagggccaaacctgctgtaggcagaggcgtacagcacactgacaaaagaaagaagaaaggtaggaagattccaaaactagaggagctactttcaaaaagagatttcactggagctattaccctgttggagttcaaacgtcatgttggggaagaagaagaggatactaatttgtggattggatattgtgcctttcacctgggtgactacaagagagctctggaggaatacgaaaatgctacaaaagaggaaaattgtaattctgaagtctgggtgaacctagcttgcacctacttctttcttgggatgtataaacaagctgaagcagctggatttaaagcttcaaaaagccgactccaaaaccgcctcctcttccacttggctcacaaggcagaactcaaaagcttgatggacaatgcttcttcatcctttgaatttgctaaagaactcatcaggcacaatctggttgttttccgaggaggtgaaggggctttgcaggttttacctcccctagttgatgtcattcctgaagctaggctaaacttggtgatttactaccttcgtcaagatgtacaagaagcttataacttaattaaggatctggaacctactactcctcaggagtatattctcaaaggagtggtcaatgcagcccttggccaggaaatgggttcaagggatcatatgaaaattgcccagcagttcttccagttggtgggaggatcagctagtgaatgtgatacaataccagggaggcagtgcatggcttcctgtttcttcctgcttaagcaatttgatgatgttttgatttacctcaactcatttaagagttacttctataatgatgacatctttaactttaattatgcccaagccaaagctgcaacaggcaataccagtgagggcgaagaggcgttcctcttgatccaaagtgagaagatgaaaaatgattacatttacctcagctggttagctcggtgctatattatgaataagaaaccaagactagcctgggaactttatcttaagatggaaacctccggcgagtccttcagtctcttacagctcattgctaatgactgctacaagatgggccagttttactattctgccaaagcttttgatgtccttgagaggctggatcctaaccctgaatattgggaaggcaaacggggtgcctgtgtgggcattttccagatgatcatagctgggagagaacccaaagagacccttcgagaagtgctccatttactgagaagcacaggtaacacccaagtagaatacatgatccggatcatgaagaaatgggccaaagaaaacagagtgtccatctaaaatagcgccagcgtcctaggaaccagcttctactttgacataaaactggaaatcattttcactccagtttaatctgtgatacagggctctgttttattgacattttccttccttgctctttaagcctcaaggtcagagactgacttgctgagacttagtctcctggctgaacagagtgccatagtctgtgaccctgtatgatcctagtagcaataagattttggacttatctggtgcctttcttccaaaaatgctcagagtacttttatgcaatttactgactttaaggaaaacagtataacttttttttgttagcattttatggcattgtctcctggctgcaataacaaacatctttgatgttcaagaa

SEQ ID NO: 190529 - DNA, 4299 bp, Homo sapiens
  Payload ID: 17636
  Gene Name: tetratricopeptide repeat domain 26
  Uniprot ID: A0AVF1
  ENST ID: ENST00000464848
  CDS Start-End: 81-1745
agaacgtgctgtgtggatgcggcgaaacgctgaggcgcggccttcgctgtgtggtggggactcacaagaccgacgtcaagatgatgctttcaagggccaaacctgctgtaggcagaggcgtacagcacactgacaaaagaaagaagaaaggtaggaagattccaaaactagaggagctactttcaaaaagagatttcactggagctattaccctgttggagttcaaacgtcatgttggggaagaagaagaggatactaatttgtggattggatattgtgcctttcacctgggtgactacaagagagctctggaggaatacgaaaatgctacaaaagaggaaaattgtaattctgaagtctgggtgaacctagcttgcacctacttctttcttgggatgtataaacaagctgaagcagctggatttaaagcttcaaaaagccgactccaaaaccgcctcctcttccacttggctcacaagtttaatgatgagaaaaaattgatgagctttcatcaaaatcttcaggatgtcacagaagatcaactcagtttggcctcaatccactatatgcgatctcactaccaagaagctatagatatatataagcgaatactgctagataacagggaataccttgcccttaatgtttatgtggccctctgctactacaagttggattactatgatgtgtctcaagaagttttggctgtttaccttcagcaaattcctgatagtaccatcgcactcaatcttaaagcctgtaaccattttcgcctttacaatggcagagcagctgaggcagaactcaaaagcttgatggacaatgcttcttcatcctttgaatttgctaaagaactcatcaggcacaatctggttgttttccgaggaggtgaaggggctttgcaggttttacctcccctagttgatgtcattcctgaagctaggctaaacttggtgatttactaccttcgtcaagatgatgtacaagaagcttataacttaattaaggatctggaacctactactcctcaggagtatattctcaaaggagtggtcaatgcagcccttggccaggaaatgggttcaagggatcatatgaaaattgcccagcagttcttccagttggtgggaggatcagctagtgaatgtgatacaataccagggaggcagtgcatggcttcctgtttcttcctgcttaagcaatttgatgatgttttgatttacctcaactcatttaagagttacttctataatgatgacatctttaactttaattatgcccaagccaaagctgcaacaggcaataccagtgagggcgaagaggcgttcctcttgatccaaagtgagaagatgaaaaatgattacatttacctcagctggttagctcggtgctatattatgaataagaaaccaagactagcctgggaactttatcttaagatggaaacctccggcgagtccttcagtctcttacagctcattgctaatgactgctacaagatgggccagttttactattctgccaaagcttttgatgtccttgagaggctggatcctaaccctgaatattgggaaggcaaacggggtgcctgtgtgggcattttccagatgatcatagctgggagagaacccaaagagacccttcgagaagtgctccatttactgagaagcacaggtaacacccaagtagaatacatgatccggatcatgaagaaatgggccaaagaaaacagagtgtccatctaaaatagcgccagcgtcctaggaaccagcttctactttgacataaaactggaaatcattttcactccagtttaatctgtgatacagggctctgttttattgacattttccttccttgctctttaagcctcaaggtcagagactgacttgctgagacttagtctcctggctgaacagagtgccatagtctgtgaccctgtatgatcctagtagcaataagattttggacttatctggtgcctttcttccaaaaatgctcagagtacttttatgcaatttactgactttaaggaaaacagtataacttttttttgttagcattttatggcattgtctcctggctgcaataacaaacatctttgatgttcaagaatcagcatcattgtatcatttaactttaaggcgtctctgtacgttatcccattttattggggaattccataaagggttttataacgtcatctctgaatcttgggagaataactagctatgtgtttctaagaaaggcagtaagctactttatcaaactgtccagtcattaataggatagatttatgggattactctttcagtaattaaattgttgatgataataacatgttacagcgcagtaagatgagtattgcaatgttttaaaaggtgagtactatgaaaaaaattgtagtacctctaaaggtattcaagaaacaatgtttatgaatctcactagtccattatagtttggtaccataattattttaggtaacaaagcaggttaggtttttgttaatgtatcttgcttaacaaacatcagtttttgttgttgttgttgttgttgttgttgttgttgtttttgagacggagtctcgctctgtcgcccaggctggagtacagtggtgcgatctcggctcactgcaagctccacctcctgggttcacgccagtctcctgcctcagccttctgagtagctgggactacaggcacccgccaccgcgcccggctaattttttgtatttttagtagagacggggtttcaccgtgttagccacaatgctctccatctcctgacctcgtgatccgcccgtctcagcctcccaaagtgctgggattacaggcatgagccaccgcgcctggcccaaacatcagttttgaaagtagggctacagtgatttatatgtattgtgggcacttattaatgtaacgataataaaacatgaatcgtataaagtcctttgagggaatctcctaatggctaggctctctgtcgtaagtcatattccagccccaggcttctgagctcttataacatacaactgagcattcttaagctcacaacctatttccagaaaagagacccacatctttctatgttttatactacctttgtttttacaccatatagtttttttctattagtttaaggtacctagtgttacaggtctagaaagtgcagagccatccctacctagaagagaatagatgggaagagaactgaaagaaagaattcctcaagcactgaagtcaggaaaatccccgtaggcactgtattagttgttccatttatcccagcactccacttgtggatgaaggagttgtatagaaaggagatgagaaaatggcaggagtggaagcagccaagaagagatcgatgactgaagatctccttcaccttcaggactgtctcaaggggttatttcacctctactcatgaggatggccagtttttctgtcttttatctttagacccatatataatcagttcagagcacaaatcaaaataaactggcctaaataactgaattctaggaagcaaagctacatcttttttcatatgccaaagcttctgtttcctcatgttgttcctactttttaaataataaatggctctcagcatcttaggaactagatgggtcccatctgggtagaacctgctataatttttagaatcactcttgtaattcttacctcacttaaaatattaggaaacacagtaatagaaaagacagggagaactcgtctgcaggttttggcagtgaaatttgtcttccagtgaattgctattattttcaaattgcctatagtcaaaaagcttttccattgatggagacttactttcaaatgagcttgtgttgaattcagcactctagattctctctgacattttcctgtcttttgggaaaaaaaagcagatattccaaaaatggcagaaatctaatttttgtaaactttttcatctataggattgagccaaaaaacatacatactattttaaagaaaggtaccatctaattcttttattaaagatagctacttctgaaatgtcttaacagagtttcaagattgcaaagtagtattgcatagctggttttcttacatgtgatgatggaggagagaggaagacccagacttaggcatgtagtgaaatatgtacagtttctggcatcagtgtactatttatagtctatagcatacattacttgcaaatgggaaaagtattttataattatttttgtacctcaaaataattattatattctactgtattatattcaaattaaagtttattatttgattctta

SEQ ID NO: 190530 - DNA, 2756 bp, Homo sapiens
  Payload ID: 17636
  Gene Name: tetratricopeptide repeat domain 26
  ENST ID: ENST00000476296
  CDS Start-End: 71-478
gtgtggatgcggcgaaacgctgaggcgcggccttcgctgtgtggtggggactcacaagaccgacgtcaagatgatgctttcaagggccaaacctgctgtaggcagaggcgtacagcacactgacaaaagaaagaagaaaggtaggaagattccaaaactagaggagctactttcaaaaagagatttcactggagctattaccctgttggagttcaaacgtcatgttggggaagaagaagaggatactaatttgtggattggatattgtgcctttcacctgggtgactacaagagagctctggaggaatacgaaaatgctacaaaagaggaaaattgtaattctgaagtctgggtgaacctagcttgcacctacttctttcttgggatgtataaacaagctgaagcagctggatttaaagcttcaaaaagccgactccaaaaccgcctcctcttccacttggctcacaaggagaaatgaagtagaagacaaagaacctaagggaaataggaagaagagagagacacaatggctaaagaaggaagagttaaaatctctatcacatagatattgatttctctaacaacactaatatgaatctttacatgtcttttccactctcacaattttagtttaatgatgagaaaaaattgatgagctttcatcaaaatcttcaggatgtcacagaagatcaactcagtttggcctcaatccactatatgcgatctcactaccaagaagctatagatatatataagcgaatactgctagataacagggaataccttgcccttaatgtttatgtggccctctgctactacaagttggattactatgatgtgtctcaagaagttttggctgtttaccttcagcaaattcctgatagtaccatcgcactcaatcttaaagcctgtaaccattttcgcctttacaatggcagagcagctgaggcagaactcaaaagcttgatggacaatgcttcttcatcctttgaatttgctaaagaactcatcaggcacaatctggttgttttccgaggaggtgaaggggctttgcaggttttacctcccctagttgatgtcattcctgaagctaggctaaacttggtgatttactaccttcgtcaagatgatgtacaagaagcttataacttaattaaggatctggaacctactactcctcaggagtatattctcaaaggagtggtcaatgcagcccttggccaggaaatgggttcaagggatcatatgaaaattgcccagcagttcttccagttggtgggaggatcagctagtgaatgtgatacaataccagggaggcagtgcatggcttcctgtttcttcctgcttaagcaatttgatgatgttttgatttacctcaactcatttaagagttacttctataatgatgacatctttaactttaattatgcccaagccaaagctgcaacaggcaataccagtgagggcgaagaggcgttcctcttgatccaaagtgagaagatgaaaaatgattacatttacctcagctggttagctcggtgctatattatgaataagaaaccaagactagcctgggaactttatcttaagatggaaacctccggcgagtccttcagtctcttacagctcattgctaatgactgctacaagatgggccagttttactattctgccaaagcttttgatgtccttgagaggctggatcctaaccctgaatattgggaaggcaaacggggtgcctgtgtgggcattttccagatgatcatagctgggagagaacccaaagagacccttcgagaagtgctccatttactgagaagcacaggtaacacccaagtagaatacatgatccggatcatgaagaaatgggccaaagaaaacagagtgtccatctaaaatagcgccagcgtcctaggaaccagcttctactttgacataaaactggaaatcattttcactccagtttaatctgtgatacagggctctgttttattgacattttccttccttgctctttaagcctcaaggtcagagactgacttgctgagacttagtctcctggctgaacagagtgccatagtctgtgaccctgtatgatcctagtagcaataagattttggacttatctggtgcctttcttccaaaaatgctcagagtacttttatgcaatttactgactttaaggaaaacagtataacttttttttgttagcattttatggcattgtctcctggctgcaataacaaacatctttgatgttcaagaatcagcatcattgtatcatttaactttaaggcgtctctgtacgttatcccattttattggggaattccataaagggttttataacgtcatctctgaatcttgggagaataactagctatgtgtttctaagaaaggcagtaagctactttatcaaactgtccagtcattaataggatagatttatgggattactctttcagtaattaaattgttgatgataataacatgttacagcgcagtaagatgagtattgcaatgttttaaaaggtgagtactatgaaaaaaattgtagtacctctaaaggtattcaagaaacaatgtttatgaatctcactagtccattatagtttggtaccataattattttaggtaacaaagcaggttaggtttttgttaatgtatcttgcttaacaaacatcagtttttgttgttgttgttgttgttgttgttgttgttgtttttgagacggagtctcgctctgtcgcccaggc

SEQ ID NO: 190531 - DNA, 1193 bp, Homo sapiens
  Payload ID: 17636
  Gene Name: tetratricopeptide repeat domain 26
  ENST ID: ENST00000474035
  CDS Start-End: 81-896
agaacgtgctgtgtggatgcggcgaaacgctgaggcgcggccttcgctgtgtggtggggactcacaagaccgacgtcaagatgatgctttcaagggccaaacctgctgtaggcagaggcgtacagcacactgacaaaagaaagaagaaaggtaggaagattccaaaactagaggagctactttcaaaaagagatttcactggagctattaccctgttggagttcaaacgtcatgttggggaagaagaagaggatactaatttgtggattggatattgtgcctttcacctgggtgactacaagagagctctggaggaatacgaaaatgctacaaaagaggaaaattgtaattctgaagtctgggtgaacctagcttgcacctacttctttcttgggatgtataaacaagctgaagcagctggatttaaagcttcaaaaagccgactccaaaaccgcctcctcttccacttggctcacaagtttaatgatgagaaaaaattgatgagctttcatcaaaatcttcaggatgtcacagaagatcaactcagtttggcctcaatccactatatgcgatctcactaccaagaagctatagatatatataagcgaatactgctagataacagggaataccttgcccttaatgtttatgtggccctctgctactacaagttggattactatgatgtgtctcaagaagttttggctgtttaccttcagcaaattcctgatagtaccatcgcactcaatcttaaagcctgtaaccattttcgcctttacaatggcagagcagctgaggcagaactcaaaagcttgatggacaatgcttcttcatcctttgaatttgctaaagaactcatcaggcacaatctggtgaataacgatttcccgtcttgactgagttcagtcctactctgctttggtacatcacagcaattagaaagattaataaaaggagatgcgccagcaagtaatgctttactccaagggaacccctcctcactgtggaggagataagttttaaagtactaatctgtttccttaaggaaatccttgttgggagaacaggaatatatttaatatttggaaagaagcacaaggcagtgtagatccaggtgtctgtttttttgagaaagacaaaggaacgtatccctctgtggtttaaaataaatgggaaatatttttgcatctttg

SEQ ID NO: 190532 - DNA, 2876 bp, Homo sapiens
  Payload ID: 17637
  Gene Name: tetratricopeptide repeat domain 27
  Uniprot ID: Q6P3X3
  ENST ID: ENST00000317907
  CDS Start-End: 232-2763
ggaagccagaccagagagcgtgcgtgtttttcccagggtgccccgcgctgctgttatggccgcctccttgaggtagtatccgcacatggaattctagggccgcaggtgtatttacggtaactgtcgccactagatttcagcgcctttggactctcctgttttcactttcttttgttgactcccgtgtggccctcgtgggagcctgttttggctgcagcggtgtctggggtgatgtggaccccggagctggcaattctgaggggattccccactgaggctgagcggcagcaatggaaacaggagggggtcgtcggttcagagagtggatctttcctacaattgctactggaagggaactatgaagccatattcttaaattcaatgactcaaaatatttttaattcaacaacaaccgctgaagaaaagattgatagctacctggagaagcaggtagtaacattcctggattactcaacagatttggacacaacggaaagacaacagttgatatttctacttggtgtgagcagtttgcaactttttgttcagagcaactggacggggccccctgttgacttacaccctcaggactttttgtcatctgttttgttccagcaattcagtgaggttaaaggactggatgcatttgttctgagcctgctcactctagatggtgaatcaatctacagcctgacctcgaagcctatactactgttattagcacgcattatcctagtgaatgtaagacataaactgacagctattcagagcttgccatggtggactttgagatgtgtgaatattcatcagcatttgcttgaggaacgctcacctctgctttttactcttgccgaaaactgtattgatcaagtgatgaaactacagaatctgtttgtagatgattcaggtcgatatttggctattcaattccatctggaatgtgcatatgtgtttttatattattatgagtacagaaaagcaaaagatcagttggatattgctaaggacatcagccaattacaaattgatttgacaggtgctttgggaaaaagaacacggttccaggaaaattatgtggcacaactgattctagatgtaagaagggaaggggatgtcctttcaaattgtgaattcactccagcacccactcctcaggaacatttaaccaagaatcttgagctcaatgatgacaccattctgaatgacataaagttagcagattgtgaacagttccagatgccggatctgtgtgctgaagagatcgctattattcttggaatctgcactaattttcaaaagaataacccagtgcacacattaactgaagtggagcttctggcatttacatcatgtttgctttcacaaccaaagttctgggccattcagacatcagccttgatcctccggacaaaacttgagaaaggaagtactcgccgagtggaacgggcaatgaggcagacacaggctcttgcagaccaatttgaagataaaactacatctgtattggaacgcctgaagattttctattgctgtcaagtaccacctcactgggccattcagcgccaacttgcaagtttgctctttgagttgggatgtaccagttcagcccttcagatatttgaaaagctagaaatgtgggaagatgttgtcatttgttatgaaagagccgggcagcacggaaaggcagaagaaatccttagacaagagctggagaaaaaagaaacgcctagtttatactgcttgcttggagatgtcctcggagaccattcttgctatgacaaggcctgggagttgtcccggtaccgcagtgctcgtgctcagcgctccaaagccctccttcatcttcggaacaaggagtttcaagagtgtgtagagtgcttcgaacgctcggttaagattaatcccatgcagctcggggtgtggttttctctcggttgtgcctatttggccttggaagactatcaaggttcagcaaaggcatttcagcgctgtgtgactctagaacccgataatgctgaagcttggaacaatttgtcaacttcctatatccgattaaaacaaaaagtaaaagcttttagaactttacaagaagctctcaagtgtaactatgaacactggcagatttgggaaaactacatcctcaccagcactgacgttggggaattttcagaagccattaaagcttatcaccggctcttggacttacgtgacaaatacaaagatgttcaggtccttaaaattctagtcagggcagtgattgatgggatgactgatcgaagtggagatgttgcaactggcctcaaaggaaagctgcaggagttatttggcagagtgacttcaagagtgacaaatgatggagaaatctggaggctgtatgcccacgtatatggaaatgggcagagtgaaaagcctgatgaaaatgaaaaggcattccagtgcctctcaaaggcatacaagtgtgacacccagtccaattgttgggagaaagatattacatcatttaaggaagttgttcaaagagccttaggacttgcacatgtggccataaaatgcagtaaaaacaaatccagttcccaagaagctgtacaaatgctttcttctgttcgactcaatttacggggcttgttatctaaagcaaagcaactttttacagatgtggcaactggagaaatgtccagggaattagctgatgacataacagctatggacaccttagtgacagagctccaagacctaagcaaccagtttcgaaatcagtattgattctgctggaagcagattctggaaaaggtgctttcacctgctggtaaaagatacatctgtatatctgaaatgcaagatattgatttttaaaataaatttgttttatgacttaa

SEQ ID NO: 190533 - DNA, 500 bp, Homo sapiens
  Payload ID: 17637
  Gene Name: tetratricopeptide repeat domain 27
  ENST ID: ENST00000454690
  CDS Start-End: 138-263
tagggccgcaggtgtatttacggtaactgtcgccactagatttcagcgcctttggactctcctgttttcactttcttttgttgactcccgtgtggccctcgtgggagcctgttttggctgcagcggtgtctggggtgatgtggaccccggagctggcaattctgaggggattccccactgaggctgagcggcagcaatggaaacaggagggggtcgtcggttcagcactaattttcaaaagaataacccagtgcacacattaactgaagtggagcttctggcatttacatcatgtttgctttcacaaccaaagttctgggccattcagacatcagccttgatcctccggacaaaacttgagaaaggaagtactcgccgagtggaacgggcaatgaggcagacacaggctcttgcagaccaatttgaagataaaactacatctgtattggaacgcctgaagattttctattgctgtcaagtaccacctcactgggccattc

SEQ ID NO: 190534 - DNA, 509 bp, Homo sapiens
  Payload ID: 17637
  Gene Name: tetratricopeptide repeat domain 27
  ENST ID: ENST00000448773
  CDS Start-End: 165-509
cttactcaagctcgggttcttctcctaggcggaagccagaccagagagcgtgcgtgtttttcccagggtgccccgcgctgctgttatggccgcctccttgagagagtggatctttcctacaattgctactggaagggaactatgaagccatattcttaaattcaatgactcaaaatatttttaattcaacaacaaccgctgaagaaaagattgatagctacctggagaagcaggtagtaacattcctggattactcaacagatttggacacaacggaaagacaacagttgatatttctacttggtgtgagcagtttgcaactttttgttcagagcaactggacggggccccctgttgacttacaccctcaggactttttgtcatctgttttgttccagcaattcagtgaggttaaaggactggatgcatttgttctgagcctgctcactctagatggtgaatcaatctacagcctgacctcgaagcctatactactgttattagcacgc

SEQ ID NO: 190535 - DNA, 687 bp, Homo sapiens
  Payload ID: 17637
  Gene Name: tetratricopeptide repeat domain 27
  ENST ID: ENST00000428527
  CDS Start-End: 1-141
ctcggggtgtggttttctctcggttgtgcctatttggccttggaagactatcaaggttcagcaaaggcatttcagcgctgtgtgactctagaacccgatgtctgtgcatattccactgtcttgtttacagaaactttgtagtaagttttgaaaatgctaatgctgaagcttggaacaatttgtcaacttcctatatccgattaaaacaaaaagtaaaagcttttagaactttacaagaagctctcaagtgtaactatgaacactggcagatttgggaaaactacatcctcaccagcactgacgttggggaattttcagaagccattaaagcttatcaccggctcttggacttacgtgacaaatacaaagatgttcaggtccttaaaattctagtcagggcagtgattgatgggatgactgatcgaagtggagatgttgcaactggcctcaaaggaaagctgcaggagttatttggcagagtgacttcaagagtgacaaatgatggagaaatctggaggctgtatgcccacgtatatggaaatgggcagagtgaaaagcctgatgaaaatgaaaaggcattccagtgcctctcaaaggcatacaagtgtgacacccagtccaattgttgggagaaagatattacatcatttaaggaagttgttcaaagagccttaggacttgcacatg

SEQ ID NO: 190536 - DNA, 297 bp, Homo sapiens
  Payload ID: 17637
  Gene Name: tetratricopeptide repeat domain 27
  ENST ID: ENST00000438654
  CDS Start-End: 1-216
ccagtgcacacattaactgaagtggagcttctggcatttacatcatgtttgctttcacaaccaaagttctgggccattcagacatcagccttgatcctccggacaaaacttgagaaaggaagtactcgccgagtggaacgggcaatgaggcagacacaggtggcacatgatgttcacttatcctgtcactggggatgttatttgatcattcagtaagcttgtgtttgtgagatttctccccaagtaaagttactctactcttttcccattgtaattaataaacattttcaggaagtg

SEQ ID NO: 190537 - DNA, 660 bp, Homo sapiens
  Payload ID: 17637
  Gene Name: tetratricopeptide repeat domain 27
  ENST ID: ENST00000433416
  CDS Start-End: 1-302
tttgttatgaaagagccgggcagcacggaaaggcagaagaaatccttagacaagagctggagaaaaaagaaacgcctagtttatactgcttgcttggagatgtcctcggagaccattcttgctatgacaaggcctgggagttgtcccggtaccgcagtgctcgtgctcagcgctccaaagccctccttcatcttcggaacaaggagtttcaagagtgtgtagagtgcttcgaacgctcggttaagattaatcccatgcagggaagcgggaggcctgaggagagggagaagataggagagtagctggtcagtggagcagtcagaacatacacagcatttatcactcggggtgtggttttctctcggttgtgcctatttggccttggaagactatcaaggttcagcaaaggcatttcagcgctgtgtgactctagaacccgataatgctgaagcttggaacaatttgtcaacttcctatatccgattaaaacaaaaagtaaaagcttttagaactttacaagaagctctcaagtgtaactatgaacactggcagatttgggaaaactacatcctcaccagcactgacgttggggaattttcagaagccattaaagcttatcaccggctcttggacttacgtgacaaatacaaagatgttcag

SEQ ID NO: 190538 - DNA, 11795 bp, Homo sapiens
  Payload ID: 17638
  Gene Name: tetratricopeptide repeat domain 28
  Uniprot ID: Q96AY4
  ENST ID: ENST00000397906
  CDS Start-End: 143-7588
gggggcgcgcgcgcggtttgggggcagtgaggggcgccgcggcggcgcgcagcacggcgggaacatggcgcgcggaaccggcgcgcgcgcctagctggcgggaccgttagctcgaggcggacgcggcccgggccccgtggggatggagcagtcgccgccgccggcgcccgagccgacccaagggccgacccccgcaaggagccgaaggcggcgggagccagagtcgccgccggcgtcggcgccgattcctctctttggtgctgacactattggccagagaagtcctgatggaccggtactgagcaaagctgaatttgttgagaaagttcgtcagagtaatcaggcctgtcatgatggagatttccacacagctattgttctgtataatgaagccctggctgttgaccctcagaactgcatcttatacagcaatagatctgcagcctacatgaaaatccagcagtatgacaaggcactggatgatgcaatcaaagctcgacttctcaatcccaagtggccaaaggcatacttccgacagggtgttgccctccagtaccttggacgtcatgccgatgccctggcagcctttgcatctggactggctcaagaccccaagagtctccagcttctggtggggatggtggaagccgccatgaaatctcccatgagagactccctcgagcccacttatcagcagcttcagaaaatgaaactggacaagagtccctttgtggtcgtgtctgtggttgggcaggaactcctgacagctggccatcatggggcctctgtggttgtcttagaagccgcactgaagattggcacctgcagcctcaaactgagaggttctgttttctctgccctgagcagtgcttactggtctcttggaaatacagagaagagcaccggatatatgcagcaggacttggatgtagccaagaccttaggtgaccagacaggagaatgccgagctcatgggaatctgggctctgcattcttctccaaaggaaattaccgggaggctctcactaaccacaggcatcagttggtactcgccatgaaactcaaagatcgagaggcagcttcatcagccttgagcagtctgggccacgtgtacacagccattggagactaccccaatgcactggccagtcacaaacagtgtgttcttcttgccaagcaatccaaagatgaactttctgaagcccgagaacttggcaacatgggagctgtgtatattgccatgggtgactttgagaatgctgtgcagtgccatgagcagcatctgaagatagccaaggacctggggaacaagcgagaagaggcccgggcttatagcaacctgggcagtgcctatcactaccggaggaactttgacaaggccatgtcttaccataactatgtcctggagctggcacaggagttgatggagaaggctattgagatgcgggcctatgctggactaggccatgctgccaggtgcatgcaggatttggagagagctaaacaataccatgagcagcagctgggcattgctgaggatctcaaggaccgggctgcagaggggcgagcatcctccaatctaggaatcatacaccagatgaaaggtgattatgacactgcactgaaactccacaagacccacctgtgcattgcccaggagctgagtgattatgctgcccagggccgtgcctatgggaatatgggcaatgcctacaatgccctgggcatgtacgaccaggcggtcaaataccatcggcaggagctgcagatctccatggaagtgaatgaccgcgcctcacaggcctccacacatgggaaccttgccgtggcctaccaggccctgggtgcccatgaccgggccctgcaacactatcagaaccacttgaacatcgcccgggagctacgagacatccagagcgaggcccgggccctcagcaacctgggcaatttccactgctctcggggagagtatgtccaggctgccccctattatgaacagtacctccggcttgctcccgaccttcaagacatggaaggagaagggaaggtctgccacaatcttggctatgcccattactgccttggaaactatcaggaggcagtgaagtactacgaacaggatctggcactggctaaagaccttcacgacaagttgagccaagcaaaagcctactgcaacttgggcctagcattcaaggctctgctgaatttcagtaaagctgaagagtgtcagaagtacctactgtccctagcccagtctctgaataattcccaggctaaatttcgagccctaggaaacctgggcgatatattcatctgtaaaaaagatataaatggtgcaataaaattctatgagcagcaactgggcttagctcaccaggtaaaggacagaagattagaagccagtgcatatgcagccctgggcactgcataccgaatgatccagaagtatgacaaggccctgggttatcacacacaggaactggaggtatatcaggagctgagtgacttgccaggggagtgcagagctcatgggcacctggctgctgtctacatggcccttgggaaatacacaatggcattcaagtgttatgaagagcaactggatctagggcaaaagctgaaggatccgagtctggaagcccaggtctatggcaacatgggcatcacaaagatgaacatgaatgtgatggaagaagccattggctactttgagcagcaattggccatgctgcagcagctaagtggaaatgagtctgtgctcgacaggggccgggcctatggcaacctgggggattgctacgaagccctgggtgactatgaggaagctatcaaatactatgaacaatatttatctgtcgcgcagagtctgaatcgcatgcaagaccaagccaaggcttaccggggcctgggaaatggacacagggcaatggggagcttgcagcaagcccttgtgtgctttgaaaagaggctcgtggttgctcatgaacttggagaggccttcaataaagcccaggcctatggagagctgggaagtctgcacagccaattagggaattacgaacaagccatttcctgccttgaacgccagctgaacattgctagagatatgaaagaccgagccctggagagtgacgcagcctgtggcctggggggcgtttaccagcagatgggggagtatgacacagccctgcagtaccaccagcttgatctacagatagcagaggaaaccaacaaccccacgtgccagggccgagcctatgggaacctgggcctgacttatgaatccctgggcaccttcgagagggctgtggtctatcaagaacagcacttgagcattgctgcacagatgaatgacttggcggccaagacggtgtcatatagtagccttggaaggacccatcatgccttgcagaactattcccaagcagtcatgtacttacaggaaggtttaaggttagctgagcaactgggccgaagagaagatgaggcaaaaattcgccatggccttggcctctccctttgggctagtggaaacttggaggaggcccaacaccagctttatagggcatcagccttgtttgaaacaatccgacatgaggcacagctgagcacggactacaaactctccctctttgacctgcagacatcatcctaccaggccttgcagcgggtgctcgtcagcctaggccatcatgatgaagccctggctgtggcagaaaggggacggacaagggcatttgctgatcttctggtggaacgacaaacaggacaacaagactccgacccctactccccagtcactattgatcagatcttagagatggtaaatggccagaggggactagtgctttactattccctggctgcaggctatctgtatagctggctgctggctcctggggcaggaattgtgaagtttcatgaacactacctgggtgagaacacagtggaaaactcaagtgacttccaggccagcagcagtgtaacccttccaacagcaaccggctcagccctggagcagcacattgccagtgtccgggaggccctgggggtggagtctcactactcaagggcctgtgccagcagtgagacagagagtgaagcgggagacatcatggaccagcaatttgaagagatgaacaacaaactcaactcggtcactgaccccactggctttctgcggatggttcgccgcaataacctgtttaacaggagctgccagagcatgacgagcctgttcagtaacactgtgtcaccgacccaggacgggacctcctctcttcccaggaggcagagctcgtttgccaagcccccgctccgtgccctgtatgacctgctcatcgcgcccatggaagggggcctgatgcactccagcggccccgtgggccggcaccggcagctcatcctggttctggagggggagctctacctcattcctttcgccctcctgaagggaagctcctccaatgagtacctctacgagcgcttcggcctccttgctgtcccttccatccgctccctcagcgtgcagtccaagtctcacttacggaagaacccgcccacatactccagctccacatccatggcggctgtcatcggcaaccccaagctaccatcggccgtgatggacaggtggctgtgggggcccatgccatcggccgaggaagaggcctacatggtgtccgagctgctgggctgccagcccctagtgggcagtgtggccaccaaggagagggtcatgagtgccctgacccaggctgaatgcgtccactttgccacccacatctcctggaagctgtcggccttggtcctcacgcccagcatggacggcaaccctgccagcagcaagagctccttcggccacccctacacgatccctgagtccttgcgggtgcaggacgatgccagtgatggggagagcatctcggactgcccgcccctgcaggagctgctgcttactgccgccgacgtcctggacctgcagctgcctgtgaagctggtggtgcttggctcctcccaggagtccaacagcaaagtcacagccgacggggtcatcgcgctgacaagggccttcctggctgccggcgctcagtgtgtcctcgtgtctctgtggcctgtgccagtggctgcttctaagatgttcatccatgccttctactcatccctgctgaacggcctgaaagccagcgccgccctgggggaggccatgaaggtggtgcagagcagcaaggccttctcgcacccctccaactgggcagggttcatgctcatcgggagtgacgttaagctgaacagcccctcatcactcatcggccaggccctcacagagatcctgcagcacccggagcgtgcgcgggacgccctgcgagtgctgctgcacctggtggagaaatccctgcagcgcatccagaatgggcagcgcaatgccatgtacacatcccagcagagtgtggagaacaaagtgggcggcatccctggctggcaggccctcctcaccgctgtgggcttccggctggaccccccaaccagtggcctgccagcggctgtcttcttcccaacctccgacccgggcgaccggctccagcagtgcagcagcacactccagtccctgctgggtctgcccaatcctgccctccaagccctttgcaaactcatcactgcctccgagacgggcgagcagctcatcagccgggctgttaaaaatatggttggaatgctccaccaggtgctggttcagctccaggctggcgagaaggagcaggacttggcatcagctcccattcaggtctccatcagcgtccagctgtggcggctcccgggatgccacgagttcctggcagctctaggttttgatctctgtgaagttggtcaggaggaagtaatcctgaaaaccgggaagcaagctaatcgacggactgtgcacttcgcgctccagtccctgctgtctctgtttgattctactgagctacccaagcgcctcagccttgacagctcctcctccctcgagtctcttgcttctgctcagtctgtttccaacgccctgcccttgggttaccagcaaccccccttctctcccaccggtgcggacagcatcgcctcagatgccatctctgtgtacagtctgagctccattgcctcctcaatgagctttgtctccaaacccgagggtggatcagagggtggaggccccggaggacggcaggaccatgaccggtccaagaacgcttacctgcagagatccaccctgcctaggagccagctgcctccccagacccgccctgcaggcaacaaagatgaagaagaatatgaagggttttctatcatcagtaacgagcccttggcgacctaccaagaaaaccgaaacacatgcttctcaccagaccacaaacaaccccaacctgggacagccggaggcatgagagtctcggtgagctccaaagggagcatcagcactccaaattctccagtgaaaatgactctgattcccagccccaactcacccttccaaaaggtgggaaaactagcaagctcagatacaggagaatcagaccagtctagcacagaaacggacagtaccgtgaaatcccaagaagaaagcaacccaaaactggatccacaagagttagcccagaaaattctggaggagacacagagtcatctcattgcggtggagcgtcttcagaggagcggcggccaggtgagcaagagtaataaccctgaagacggcgttcaggcgcccagcagcactgctgtcttcagagcgtcagaaaccagtgcgttcagcaggcctgttctctcccatcagaagagtcagccatcaccagtcactgttaaaccaaagcccccagccaggagctcctccctgcccaaggtgagttccggatatagcagccccaccacctcagagatgtccatcaaagacagcccgagccagcacagtggccggccatcgcccggctgcgactcacagacttcccagctggaccagcctctctttaaactgaagtaccccagctctccttacagcgctcacatttccaaatcaccaaggaacatgtccccaagctccggccaccagtctcctgctggcagtgcaccctccccagctctctcctactcctcagctggatctgctcgctcaagtccagcagacgctcccgacatagacaaactgaaaatggcagccattgatgaaaaggtgcaggctgtccataacctgaagatgttctggcagagcacaccccagcattccacagggccaatgaagatcttccggggggctcctggcacgatgacttccaaaagggatgtcctcagtctgttgaatttgtcaccacggcacaataagaaggaggagggagtggataagcttgaactgaaggagctgtccctgcagcagcatgacggagctccaccgaaagcccctcccaacggacactggcgcaccgagaccacctcgctgggctcactgccgctgcccgccggccctcccgccacagcccccgcgcgccctttgaggcttccttctggaaatggctacaagttcctgtctccaggaagatttttcccttcttccaaatgctaaagcatcttttatacccactgactctgagcagcctgcagatgggggcctggcgtttgcttcagcccttccctgagtgcagtccccccacagccaccagcaccctcatgatgctgtgctctgcaggcgaggggcaccaccacgtccaaaggctgccacacacactggtggcttttctgggccacattcaccaaaagccaggacttctgtggggctggtacaggaggctcatggaatttcctacacacttcaccaaatgtttgtttacctttgaactccctgcttctcatctttgatatgattcttcaccaggattttgtacaaaaatgatcatggttctggggtggggagaggaaagggagcacatattttgctaagaggtatatatgcagtaccttttatacacagaaatacaaatagagctttttctaaggctttcggttgctggttgggggtgggatatatgaaatttcagttgaattctacaggaaagtgttatattagccaaaaacagaaaaatggtttttaaaatgccaatgatttgtaattaaattgtagcaattttggtctcatgatagtgtaatatctcagcaacaatgcaataattcacattgaaacagcgcttccattctgaactctgctctgcaaatgtcttttgggtcccgctgtcaaccaaacttgaattttcttaaaaaaaaaattatgtaactcttatccaggcattttagaactatgcaattgtgatttaaaatgcaactttgtgcttttaaaacattattgaccttttttgtatatggataaacaacttggttttattatcaatagtactttgcatttatagctattatttttaaaagctcaaaaagttttttaaaatgtcaaattttgaatagtcatcaataagtaattatcaagtttggaaggaaaggttgaaatgactccgtttccttataagcaaaaaaaaaaaaaaaaaaaaaaaaaaaaaaaaaaaaatttccatggctaactagatttaaccagaatcccgccttccaggctcctgttcccttttattagctgctgaattttattcccttttcccaactccaggtccctcagttgtcttatatctaaatcctttgccaggtccccacaatcccagcacctgcctctgtgagctgcccccaggccctcaccttggccctggccagcctcctgtgctcctgctgtctgaaggactggcccctcccccactgctgaagccacacgtacagatcctaagcaacagggccttttgctgggacgtatgcctggattatggccaaccgggaagagagagatgtatcttaaaaagtggaggtggacttctcctacagctctgacggtaacttaaattgttgccagcttgaggcaagacaagggaatcatctagttaggggtaaccattaatttattttataaagaaaggaaatgctgaaagtcgtattagtactgagtttagttggagaatttagataagtaagtatcttttaggtaattctaaaattaaaatcctacccacctcactacagggttcctcatgaaggtgggcggccacctggcctgggccaccagcagcacatggagcagacctgaggggcctggcagggggcactgacctcaggatccccaggtgggggttttaaccatgggtgggatctcagcttctgcgcatacactgacaatctcacctgttcctcagtgtactcctctgaaaagaagaaaggataatatttatccaatctgtgttctcctgagctccatcctaggggtttttaatttaaccaacagccatgttgacaaaagccaacaataagcatgtcttattctagccctgatcccaacactgaaagcgaagtactttataaagaagccagcaattatgagggtttctttatgttagtaggggaaaaaatggtaataaaagtaccagtgtagcaagtgaagaccaaatttatagcactgtgcattagatagcaaaatcaggttcttaacaatgaaaagtaaacctcaagtttctaaatccatatgcagatggttaggctgtccctctcttagcaaatctctcagcctccttctttcccaagtgccaaggatccctggagtaaagctctggggtctgtgctctctttctgtgaggggaaggctgcggccctatttgcccctctctagcaaacacccccaccaccctgccgcttcctgtggttattgagccagctaggagttactcatggactctaacctggttttagtcccatgtacatcgttgttttaggtttcatactgaagagccaatggtttatgtggttttattctgtcttaaatataagtttcaaggaagggaaaacaaaagtgataaaatgatagaacagtctagaggccactgtaaagtcaccgccactttacgtgtatgtcagtcttggtgttcttgtatgagtaaaatggatgtaaaatcataaaatcacagtgaatgtttcaggctacactggaaaaagtatgcacttagaattaaaggaaattgtataattcaccaagatttctttgtgtagatcaggggttggcaactatgacccacaggctaagactggtcagcggtctggtttttcacagccatgagctaagttacctttttaaagggttatataagtaattacatcatatttttgattttgcctttggcccacaccacataaaatattcaatacctggcctttttttttttttttgagacagagtctcgctctgtcacccaggatagagtgcactggtgcgattttggctcactgcaacctcttcctcctgggttcaagcaattctccctgcctcagcctctaagtagctgggactacaggcacccactaccatgccttgctaatttttgtatttttaatagagatggggtttcaccatgttggccaggctggtctcgaactcctgacctcaggggatccgcccgccttggcctcccaaactgctgggattacaggtgagccactgcgcccagccaatacctggccttttaagaagtttgctgactcctggtatggatgacagaaaatggaataacgttttgtttctccagtctaggaaaagcaagtcaggtagtggatagactgactggcgtccggggagcccagggtatgtgagggccacgtggatggaagcaaatgcctcctgcatagcccttggctctttgtcccacttgggaggagtccatggatgtaatatttacaaaacaattttttccttaccatttgcagaaagcattgcatatatttccttttagctcaggaaactggcatgccccaccctctgctactccatcagatgtaaatacaatgactataagccgtacaactcccctctcttagaaacctcagcaggaccacagagcaagggagtcaaagctttcttaattctctccagtaaatgactcaactaatttgatttttttaattaagtcaaaatatcaagagaaaaattgctactaaaacttacattttgatccacactgatgtgcaacacaaaatgaaagttttcacctccattccattttttaaaaattcacggtccacactgaaacttgctgggttttagcaggagacaaaggtgtcacccacgctgtcctcatcctgctctctctgtcccagtgacgctccagcatatgatcactgcagccggtccctggcccgtgccgattctgccacctcccagccacacacatttgcagacccacaagaagaactgtagccttgataatttcagttcaggctggaaaaatgccatgcaataatctggtttgctttcagtaagtaggcaacaagtgaaaactgtataattttcatcacctattctgctgttctatctaaaatgagtgtacctgtggtttgtgaactgggcccttgtttgtgccagatccttcaaagatgttccctgtcaggacacctgtggccctgcccctcctcagacaccttcccactggcattcacgttccttatatgcagtgttagccatctttggcctacgtggactttttttgtaaattacaccatttccagacattaaactttttatattatgaaatttaccatgtaaaaagaacttcatatttttattgagattgctaaggcacttggccttcctcctttgtgattttcagtgtctattaaagcatgagttccctcagttttaa

SEQ ID NO: 190539 - DNA, 499 bp, Homo sapiens
  Payload ID: 17638
  Gene Name: tetratricopeptide repeat domain 28
  ENST ID: ENST00000442232
  CDS Start-End: 1-327
gagcagcacattgccagtgtccgggaggccctgggggtggagtctcactactcaagggcctgtgccagcagtgagacagagagtgaagcgggagacatcatggaccagcaatttgaagagatgaacaacaaactcaactcggtcactgaccccactggctttctgcggatggttcgccgcaataacctgtttaacagggatgcaaccaggtttgcggaggcctgggattgggcctggacacatgttcttgctctgccaacttctcagccagtgaaggcaggtgacacttacctccaccaggtgatgcaggctgtggtgataaactagagtgtgaagagctcagagtgcagcctctggccttgccactcacaagctgtaggacactagggaggcagtttcacctctgtcagcctcagtctcgtcatctgtgaaatggggatggcttcttaccctgcagggttcctgtaatgtgggaataaaggagccaatgtataaataa

SEQ ID NO: 190540 - DNA, 905 bp, Homo sapiens
  Payload ID: 17638
  Gene Name: tetratricopeptide repeat domain 28
  ENST ID: ENST00000431039
  CDS Start-End: 1-905
gacgttaagctgaacagcccctcatcactcatcggccaggccctcacagagatcctgcagcacccggagcgtgcgcgggacgccctgcgagtgctgctgcacctggtggagaaatccctgcagcgcatccagaatgggcagcgcaatgccatgtacacatcccagcagagtgtggagaacaaagtgggcggcatccctggctggcaggccctcctcaccgctgtgggcttccggctggaccccccaaccagtggcctgccagcggctgtcttcttcccaacctccgacccgggcgaccggctccagcagtgcagcagcacactccagtccctgctgggtctgcccaatcctgccctccaagccctttgcaaactcatcactgcctccgagacgggcgagcagctcatcagccggctccaccaggtgctggttcagctccaggctggcgagaaggagcaggacttggcatcagctcccattcaggtctccatcagcgtccagctgtggcggctcccgggatgccacgagttcctggcagctctaggttttgatctctgtgaagttggtcaggaggaagtaatcctgaaaaccgggaagcaagctaatcgacggactgtgcacttcgcgctccagtccctgctgtctctgtttgattctactgagctacccaagcgcctcagccttgacagctcctcctccctcgagtctcttgcttctgctcagtctgtttccaacgccctgcccttgggttaccagcaaccccccttctctcccaccggtgcggacagcatcgcctcagatgccatctctgtgtacagtctgagctccattgcctcctcaatgagctttgtctccaaacccgagggtggatcagagggtggaggccccggaggacggcaggacca

SEQ ID NO: 190541 - DNA, 11274 bp, Homo sapiens
  Payload ID: 17638
  Gene Name: tetratricopeptide repeat domain 28
  ENST ID: ENST00000612946
  CDS Start-End: 3-7067
aggcatacttccgacagggtgttgccctccagtaccttggacgtcatgccgatgccctggcagcctttgcatctggactggctcaagaccccaagagtctccagcttctggtggggatggtggaagccgccatgaaatctcccatgagagactccctcgagcccacttatcagcagcttcagaaaatgaaactggacaagagtccctttgtggtcgtgtctgtggttgggcaggaactcctgacagctggccatcatggggcctctgtggttgtcttagaagccgcactgaagattggcacctgcagcctcaaactgagaggttctgttttctctgccctgagcagtgcttactggtctcttggaaatacagagaagagcaccggatatatgcagcaggacttggatgtagccaagaccttaggtgaccagacaggagaatgccgagctcatgggaatctgggctctgcattcttctccaaaggaaattaccgggaggctctcactaaccacaggcatcagttggtactcgccatgaaactcaaagatcgagaggcagcttcatcagccttgagcagtctgggccacgtgtacacagccattggagactaccccaatgcactggccagtcacaaacagtgtgttcttcttgccaagcaatccaaagatgaactttctgaagcccgagaacttggcaacatgggagctgtgtatattgccatgggtgactttgagaatgctgtgcagtgccatgagcagcatctgaagatagccaaggacctggggaacaagcgagaagaggcccgggcttatagcaacctgggcagtgcctatcactaccggaggaactttgacaaggccatgtcttaccataactatgtcctggagctggcacaggagttgatggagaaggctattgagatgcgggcctatgctggactaggccatgctgccaggtgcatgcaggatttggagagagctaaacaataccatgagcagcagctgggcattgctgaggatctcaaggaccgggctgcagaggggcgagcatcctccaatctaggaatcatacaccagatgaaaggtgattatgacactgcactgaaactccacaagacccacctgtgcattgcccaggagctgagtgattatgctgcccagggccgtgcctatgggaatatgggcaatgcctacaatgccctgggcatgtacgaccaggcggtcaaataccatcggcaggagctgcagatctccatggaagtgaatgaccgcgcctcacaggcctccacacatgggaaccttgccgtggcctaccaggccctgggtgcccatgaccgggccctgcaacactatcagaaccacttgaacatcgcccgggagctacgagacatccagagcgaggcccgggccctcagcaacctgggcaatttccactgctctcggggagagtatgtccaggctgccccctattatgaacagtacctccggcttgctcccgaccttcaagacatggaaggagaagggaaggtctgccacaatcttggctatgcccattactgccttggaaactatcaggaggcagtgaagtactacgaacaggatctggcactggctaaagaccttcacgacaagttgagccaagcaaaagcctactgcaacttgggcctagcattcaaggctctgctgaatttcagtaaagctgaagagtgtcagaagtacctactgtccctagcccagtctctgaataattcccaggctaaatttcgagccctaggaaacctgggcgatatattcatctgtaaaaaagatataaatggtgcaataaaattctatgagcagcaactgggcttagctcaccaggtaaaggacagaagattagaagccagtgcatatgcagccctgggcactgcataccgaatgatccagaagtatgacaaggccctgggttatcacacacaggaactggaggtatatcaggagctgagtgacttgccaggggagtgcagagctcatgggcacctggctgctgtctacatggcccttgggaaatacacaatggcattcaagtgttatgaagagcaactggatctagggcaaaagctgaaggatccgagtctggaagcccaggtctatggcaacatgggcatcacaaagatgaacatgaatgtgatggaagaagccattggctactttgagcagcaattggccatgctgcagcagctaagtggaaatgagtctgtgctcgacaggggccgggcctatggcaacctgggggattgctacgaagccctgggtgactatgaggaagctatcaaatactatgaacaatatttatctgtcgcgcagagtctgaatcgcatgcaagaccaagccaaggcttaccggggcctgggaaatggacacagggcaatggggagcttgcagcaagcccttgtgtgctttgaaaagaggctcgtggttgctcatgaacttggagaggccttcaataaagcccaggcctatggagagctgggaagtctgcacagccaattagggaattacgaacaagccatttcctgccttgaacgccagctgaacattgctagagatatgaaagaccgagccctggagagtgacgcagcctgtggcctggggggcgtttaccagcagatgggggagtatgacacagccctgcagtaccaccagcttgatctacagatagcagaggaaaccaacaaccccacgtgccagggccgagcctatgggaacctgggcctgacttatgaatccctgggcaccttcgagagggctgtggtctatcaagaacagcacttgagcattgctgcacagatgaatgacttggcggccaagacggtgtcatatagtagccttggaaggacccatcatgccttgcagaactattcccaagcagtcatgtacttacaggaaggtttaaggttagctgagcaactgggccgaagagaagatgaggcaaaaattcgccatggccttggcctctccctttgggctagtggaaacttggaggaggcccaacaccagctttatagggcatcagccttgtttgaaacaatccgacatgaggcacagctgagcacggactacaaactctccctctttgacctgcagacatcatcctaccaggccttgcagcgggtgctcgtcagcctaggccatcatgatgaagccctggctgtggcagaaaggggacggacaagggcatttgctgatcttctggtggaacgacaaacaggacaacaagactccgacccctactccccagtcactattgatcagatcttagagatggtaaatggccagaggggactagtgctttactattccctggctgcaggctatctgtatagctggctgctggctcctggggcaggaattgtgaagtttcatgaacactacctgggtgagaacacagtggaaaactcaagtgacttccaggccagcagcagtgtaacccttccaacagcaaccggctcagccctggagcagcacattgccagtgtccgggaggccctgggggtggagtctcactactcaagggcctgtgccagcagtgagacagagagtgaagcgggagacatcatggaccagcaatttgaagagatgaacaacaaactcaactcggtcactgaccccactggctttctgcggatggttcgccgcaataacctgtttaacaggagctgccagagcatgacgagcctgttcagtaacactgtgtcaccgacccaggacgggacctcctctcttcccaggaggcagagctcgtttgccaagcccccgctccgtgccctgtatgacctgctcatcgcgcccatggaagggggcctgatgcactccagcggccccgtgggccggcaccggcagctcatcctggttctggagggggagctctacctcattcctttcgccctcctgaagggaagctcctccaatgagtacctctacgagcgcttcggcctccttgctgtcccttccatccgctccctcagcgtgcagtccaagtctcacttacggaagaacccgcccacatactccagctccacatccatggcggctgtcatcggcaaccccaagctaccatcggccgtgatggacaggtggctgtgggggcccatgccatcggccgaggaagaggcctacatggtgtccgagctgctgggctgccagcccctagtgggcagtgtggccaccaaggagagggtcatgagtgccctgacccaggctgaatgcgtccactttgccacccacatctcctggaagctgtcggccttggtcctcacgcccagcatggacggcaaccctgccagcagcaagagctccttcggccacccctacacgatccctgagtccttgcgggtgcaggacgatgccagtgatggggagagcatctcggactgcccgcccctgcaggagctgctgcttactgccgccgacgtcctggacctgcagctgcctgtgaagctggtggtgcttggctcctcccaggagtccaacagcaaagtcacagccgacggggtcatcgcgctgacaagggccttcctggctgccggcgctcagtgtgtcctcgtgtctctgtggcctgtgccagtggctgcttctaagatgttcatccatgccttctactcatccctgctgaacggcctgaaagccagcgccgccctgggggaggccatgaaggtggtgcagagcagcaaggccttctcgcacccctccaactgggcagggttcatgctcatcgggagtgacgttaagctgaacagcccctcatcactcatcggccaggccctcacagagatcctgcagcacccggagcgtgcgcgggacgccctgcgagtgctgctgcacctggtggagaaatccctgcagcgcatccagaatgggcagcgcaatgccatgtacacatcccagcagagtgtggagaacaaagtgggcggcatccctggctggcaggccctcctcaccgctgtgggcttccggctggaccccccaaccagtggcctgccagcggctgtcttcttcccaacctccgacccgggcgaccggctccagcagtgcagcagcacactccagtccctgctgggtctgcccaatcctgccctccaagccctttgcaaactcatcactgcctccgagacgggcgagcagctcatcagccgggctgttaaaaatatggttggaatgctccaccaggtgctggttcagctccaggctggcgagaaggagcaggacttggcatcagctcccattcaggtctccatcagcgtccagctgtggcggctcccgggatgccacgagttcctggcagctctaggttttgatctctgtgaagttggtcaggaggaagtaatcctgaaaaccgggaagcaagctaatcgacggactgtgcacttcgcgctccagtccctgctgtctctgtttgattctactgagctacccaagcgcctcagccttgacagctcctcctccctcgagtctcttgcttctgctcagtctgtttccaacgccctgcccttgggttaccagcaaccccccttctctcccaccggtgcggacagcatcgcctcagatgccatctctgtgtacagtctgagctccattgcctcctcaatgagctttgtctccaaacccgagggtggatcagagggtggaggccccggaggacggcaggaccatgaccggtccaagaacgcttacctgcagagatccaccctgcctaggagccagctgcctccccagacccgccctgcaggcaacaaagatgaagaagaatatgaagggttttctatcatcagtaacgagcccttggcgacctaccaagaaaaccgaaacacatgcttctcaccagaccacaaacaaccccaacctgggacagccggaggcatgagagtctcggtgagctccaaagggagcatcagcactccaaattctccagtgaaaatgactctgattcccagccccaactcacccttccaaaaggtgggaaaactagcaagctcagatacaggagaatcagaccagtctagcacagaaacggacagtaccgtgaaatcccaagaagaaagcaacccaaaactggatccacaagagttagcccagaaaattctggaggagacacagagtcatctcattgcggtggagcgtcttcagaggagcggcggccaggtgagcaagagtaataaccctgaagacggcgttcaggcgcccagcagcactgctgtcttcagagcgtcagaaaccagtgcgttcagcaggcctgttctctcccatcagaagagtcagccatcaccagtcactgttaaaccaaagcccccagccaggagctcctccctgcccaaggtgagttccggatatagcagccccaccacctcagagatgtccatcaaagacagcccgagccagcacagtggccggccatcgcccggctgcgactcacagacttcccagctggaccagcctctctttaaactgaagtaccccagctctccttacagcgctcacatttccaaatcaccaaggaacatgtccccaagctccggccaccagtctcctgctggcagtgcaccctccccagctctctcctactcctcagctggatctgctcgctcaagtccagcagacgctcccgacatagacaaactgaaaatggcagccattgatgaaaaggtgcaggctgtccataacctgaagatgttctggcagagcacaccccagcattccacagggccaatgaagatcttccggggggctcctggcacgatgacttccaaaagggatgtcctcagtctgttgaatttgtcaccacggcacaataagaaggaggagggagtggataagcttgaactgaaggagctgtccctgcagcagcatgacggagctccaccgaaagcccctcccaacggacactggcgcaccgagaccacctcgctgggctcactgccgctgcccgccggccctcccgccacagcccccgcgcgccctttgaggcttccttctggaaatggctacaagttcctgtctccaggaagatttttcccttcttccaaatgctaaagcatcttttatacccactgactctgagcagcctgcagatgggggcctggcgtttgcttcagcccttccctgagtgcagtccccccacagccaccagcaccctcatgatgctgtgctctgcaggcgaggggcaccaccacgtccaaaggctgccacacacactggtggcttttctgggccacattcaccaaaagccaggacttctgtggggctggtacaggaggctcatggaatttcctacacacttcaccaaatgtttgtttacctttgaactccctgcttctcatctttgatatgattcttcaccaggattttgtacaaaaatgatcatggttctggggtggggagaggaaagggagcacatattttgctaagaggtatatatgcagtaccttttatacacagaaatacaaatagagctttttctaaggctttcggttgctggttgggggtgggatatatgaaatttcagttgaattctacaggaaagtgttatattagccaaaaacagaaaaatggtttttaaaatgccaatgatttgtaattaaattgtagcaattttggtctcatgatagtgtaatatctcagcaacaatgcaataattcacattgaaacagcgcttccattctgaactctgctctgcaaatgtcttttgggtcccgctgtcaaccaaacttgaattttcttaaaaaaaaaattatgtaactcttatccaggcattttagaactatgcaattgtgatttaaaatgcaactttgtgcttttaaaacattattgaccttttttgtatatggataaacaacttggttttattatcaatagtactttgcatttatagctattatttttaaaagctcaaaaagttttttaaaatgtcaaattttgaatagtcatcaataagtaattatcaagtttggaaggaaaggttgaaatgactccgtttccttataagcaaaaaaaaaaaaaaaaaaaaaaaaaaaaaaaaaaaaatttccatggctaactagatttaaccagaatcccgccttccaggctcctgttcccttttattagctgctgaattttattcccttttcccaactccaggtccctcagttgtcttatatctaaatcctttgccaggtccccacaatcccagcacctgcctctgtgagctgcccccaggccctcaccttggccctggccagcctcctgtgctcctgctgtctgaaggactggcccctcccccactgctgaagccacacgtacagatcctaagcaacagggccttttgctgggacgtatgcctggattatggccaaccgggaagagagagatgtatcttaaaaagtggaggtggacttctcctacagctctgacggtaacttaaattgttgccagcttgaggcaagacaagggaatcatctagttaggggtaaccattaatttattttataaagaaaggaaatgctgaaagtcgtattagtactgagtttagttggagaatttagataagtaagtatcttttaggtaattctaaaattaaaatcctacccacctcactacagggttcctcatgaaggtgggcggccacctggcctgggccaccagcagcacatggagcagacctgaggggcctggcagggggcactgacctcaggatccccaggtgggggttttaaccatgggtgggatctcagcttctgcgcatacactgacaatctcacctgttcctcagtgtactcctctgaaaagaagaaaggataatatttatccaatctgtgttctcctgagctccatcctaggggtttttaatttaaccaacagccatgttgacaaaagccaacaataagcatgtcttattctagccctgatcccaacactgaaagcgaagtactttataaagaagccagcaattatgagggtttctttatgttagtaggggaaaaaatggtaataaaagtaccagtgtagcaagtgaagaccaaatttatagcactgtgcattagatagcaaaatcaggttcttaacaatgaaaagtaaacctcaagtttctaaatccatatgcagatggttaggctgtccctctcttagcaaatctctcagcctccttctttcccaagtgccaaggatccctggagtaaagctctggggtctgtgctctctttctgtgaggggaaggctgcggccctatttgcccctctctagcaaacacccccaccaccctgccgcttcctgtggttattgagccagctaggagttactcatggactctaacctggttttagtcccatgtacatcgttgttttaggtttcatactgaagagccaatggtttatgtggttttattctgtcttaaatataagtttcaaggaagggaaaacaaaagtgataaaatgatagaacagtctagaggccactgtaaagtcaccgccactttacgtgtatgtcagtcttggtgttcttgtatgagtaaaatggatgtaaaatcataaaatcacagtgaatgtttcaggctacactggaaaaagtatgcacttagaattaaaggaaattgtataattcaccaagatttctttgtgtagatcaggggttggcaactatgacccacaggctaagactggtcagcggtctggtttttcacagccatgagctaagttacctttttaaagggttatataagtaattacatcatatttttgattttgcctttggcccacaccacataaaatattcaatacctggcctttttttttttttttgagacagagtctcgctctgtcacccaggatagagtgcactggtgcgattttggctcactgcaacctcttcctcctgggttcaagcaattctccctgcctcagcctctaagtagctgggactacaggcacccactaccatgccttgctaatttttgtatttttaatagagatggggtttcaccatgttggccaggctggtctcgaactcctgacctcaggggatccgcccgccttggcctcccaaactgctgggattacaggtgagccactgcgcccagccaatacctggccttttaagaagtttgctgactcctggtatggatgacagaaaatggaataacgttttgtttctccagtctaggaaaagcaagtcaggtagtggatagactgactggcgtccggggagcccagggtatgtgagggccacgtggatggaagcaaatgcctcctgcatagcccttggctctttgtcccacttgggaggagtccatggatgtaatatttacaaaacaattttttccttaccatttgcagaaagcattgcatatatttccttttagctcaggaaactggcatgccccaccctctgctactccatcagatgtaaatacaatgactataagccgtacaactcccctctcttagaaacctcagcaggaccacagagcaagggagtcaaagctttcttaattctctccagtaaatgactcaactaatttgatttttttaattaagtcaaaatatcaagagaaaaattgctactaaaacttacattttgatccacactgatgtgcaacacaaaatgaaagttttcacctccattccattttttaaaaattcacggtccacactgaaacttgctgggttttagcaggagacaaaggtgtcacccacgctgtcctcatcctgctctctctgtcccagtgacgctccagcatatgatcactgcagccggtccctggcccgtgccgattctgccacctcccagccacacacatttgcagacccacaagaagaactgtagccttgataatttcagttcaggctggaaaaatgccatgcaataatctggtttgctttcagtaagtaggcaacaagtgaaaactgtataattttcatcacctattctgctgttctatctaaaatgagtgtacctgtggtttgtgaactgggcccttgtttgtgccagatccttcaaagatgttccctgtcaggacacctgtggccctgcccctcctcagacaccttcccactggcattcacgttccttatatgcagtgttagccatctttggcctacgtggactttttttgtaaattacaccatttccagacattaaactttttatattatgaaatttaccatgtaaaaagaacttcatatttttattgagattgctaaggcacttggccttcctcctttgtgattttcagtgtctattaaagcatgagttccctcagttttaa

SEQ ID NO: 190542 - DNA, 1785 bp, Homo sapiens
  Payload ID: 17639
  Gene Name: tetratricopeptide repeat domain 29
  Uniprot ID: Q8NA56
  ENST ID: ENST00000325106
  CDS Start-End: 228-1655
ctctgtttccgtggagacgctctcggcgtcccctgtctccgctccggcggagccaggcttcggaatcactgagagaggagggggcagcgccaacgcccagcacctgccgccggtgggggactgacttcggcggaacggaaaactggagttgtttccctgggccagtgcaccgaggctgaagtctataagcctggagagaccatcagcagtaatctgcaaattccgaaatgaccaccctgcccccactgcccatgacacgcccgaagcttacagccttagccagacagaagctgccttgctcctccagaaaaattccaaggtctcaattgatcaaagaaaaagatgacatagatcattatctagaggtaaatttcaaaggattatcaaaagaggaagttgctgcttataggaactcctacaagaagaatatctgtgtggacatgctgcgagatggttatcataagtccttcaccgagctcttcgctctgatggagcggtgggatgccctgagggaggctgcgagagtcaggtccctcttctggctgcagaagcccctggaggagcagcctgataaactggattacctgtaccattacctgaccagggctgaggacgctgagaggaaagaatccttcgaagatgtacataataacttgtatgctctggcctgttacttcaataattctgaagacaagtgggtaaggaaccacttctatgaacgatgttttaagattgctcagctgatcaaaattgactgtgggaagaaagaagccgaggcacacatgcatatgggtcttctctacgaggaagatggtcagcttctggaagctgctgagcattatgaagcattccatcaattgacacaggggcggatatggaaggatgagacaggccgctctctcaacttgttggcctgtgagagtctcctgaggacttacagattactctcagacaaaatgctagaaaataaagaatacaaacaggccatcaaaattctaataaaagcttctgaaatagccaaagaaggaagtgacaaaaagatggaagcggaagcctcttactacttgggcttagcacacttagctgctgaggaatatgaaacagcattaacagtccttgacacttactgtaaaatctccacagacctggatgatgatctcagtctggggagaggctatgaagccatagccaaggtcctgcagagccaaggagagatgacagaagcaattaaatacttgaaaaaatttgtgaaaattgcaagaaacaattttcaaagcctagatttggtgagagcaagtacaatgcttggggacatctacaatgaaaaaggatactacaacaaagcttctgaatgctttcagcaagcttttgacacaacagtagagctaatgagcatgcctctgatggatgagacaaaagttcactatggaatagcaaaagctcatcagatgatgcttacagtgaacaactatatagagtctgcagatctcaccagcctcaactacctgctgtcatggaaggagagcagaggtaacattgaacctgatccagttactgaagagtttagaggatccacagtggaagctgtatctcaaaactcagaacgtttggaagaactcagtaggtttccaggtgatcaaaaaaatgaaacttaaagcagcttttcacttaacatcaaagcaagaagaaatccatcatgtcaccttagacttcaatacttgtaataggagcatgttacagataatatagagttataataaaacggactatgactcttttcattgg

SEQ ID NO: 190543 - DNA, 1729 bp, Homo sapiens
  Payload ID: 17639
  Gene Name: tetratricopeptide repeat domain 29
  ENST ID: ENST00000398886
  CDS Start-End: 174-1133
aggcttcggaatcactgagagaggagggggcagcgccaacgcccagcacctgccgccggtgggggactgacttcggcggaacggaaaactggagttgtttccctgggccagtgcaccgaggctgaagtctataagcctggagagaccatcagcagtaatctgcaaattccgaaatgaccaccctgcccccactgcccatgacacgcccgaagcttacagccttagccagacagaagctgccttgctcctccagaaaaattccaaggtctcaattgatcaaagaaaaagatgacatagatcattatctagaggtaaatttcaaaggattatcaaaagaggaagttgctgcttataggaactcctacaagaagaatatctgtgtggacatgctgcgagatggttatcataagtccttcaccgagctcttcgctctgatggagcggtgggatgccctgagggaggctgcgagagtcaggtccctcttctggctgcagaagcccctggaggagcagcctgataaactggattacctgtaccattacctgaccagggctgaggacgctgagaggaaagaatccttcgaagatgtacataataacttgtatgctctggcctgttacttcaataattctgaagacaagtgggtaaggaaccacttctatgaacgatgttttaagattgctcagctgatcaaaattgactgtgggaagaaagaagccgaggcacacatgcatatgggtcttctctacgaggaagatggtcagcttctggaagctgctgagcattatgaagcattccatcaattgacacaggggcggatatggaaggatgagacaggccgctctctcaacttgttggcctgtgagagtctcctgaggacttacagattactctcagacaaaatgctagaaaataaagaatacaaacaggccatcaaaattctaataaaagcttctgaaatagccaaagaaggaagtgacaaaaagatggaagcggaagcctcttactacttgggcttagcacacttagctgctgaggaatatgaaacagcattaacagtccttgacacttactgtaaatctccacagacctggatgatgatctcagtctggggagaggctatgaagccatagccaaggtcctgcagagccaaggagagatgacagaagcaattaaatacttgaaaaaatttgtgaaaattgcaagaaacaattttcaaagcctagatttggtgagagcaagtacaatgcttggggacatctacaatgaaaaaggatactacaacaaagcttctgaatgctttcagcaagcttttgacacaacagtagagctaatgagcatgcctctgatggatgagacaaaagttcactatggaatagcaaaagctcatcagatgatgcttacagtgaacaactatatagagtctgcagatctcaccagcctcaactacctgctgtcatggaaggagagcagaggtaacattgaacctgatccagttactgaagagtttagaggatccacagtggaagctgtatctcaaaactcagaacgtttggaagaactcagtaggtttccaggtgatcaaaaaaatgaaacttaaagcagcttttcacttaacatcaaagcaagaagaaatccatcatgtcaccttagacttcaatacttgtaataggagcatgttacagataatatagagttataataaaacggactatgactcttttcattg

SEQ ID NO: 190544 - DNA, 1886 bp, Homo sapiens
  Payload ID: 17639
  Gene Name: tetratricopeptide repeat domain 29
  ENST ID: ENST00000508306
  CDS Start-End: 179-1270
gagccaggcttcggaatcactgagagaggagggggcagcgccaacgcccagcacctgccgccggtgggggactgacttcggcggaacggaaaactggagttgtttccctgggccagtgcaccgaggctgaagtctataagcctggagagaccatcagcagtaatctgcaaattccgaaatgaccaccctgcccccactgcccatgacacgcccgaagcttacagccttagccagacagaagctgccttgctcctccagaaaaattccaaggtctcaattgatcaaagaaaaagatgacatagatcattatctagaggtaaatttcaaaggattatcaaaagaggaagttgctgcttataggaactcctacaagaagaatatctgtgtggacatgctgcgagatggttatcataagtccttcaccgagctcttcgctctgatggagcggtgggatgccctgagggaggctgcgagagtcaggtccctcttctggctgcagaagcccctggaggagcagcctgataaactggattacctgtaccattacctgaccagggctgaggacgctgagaggaaagaatccttcgaagatgtacataataacttgtatgctctggcctgttacttcaataattctgaagacaagtgggtaaggaaccacttctatgaacgatgttttaagattgctcagctgatcaaaattgactgtgggaagaaagaagccgaggcacacatgcatatgggtcttctctacgaggaagatggtcagcttctggaagctgctgagcattatgaagcattccatcaattgacacaggggcggatatggaaggatgagacaggccgctctctcaacttgttggcctgtgagagtctcctgaggacttacagattactctcagacaaaatgctagaaaataaagaatacaaacaggccatcaaaattctaataaaagcttctgaaatagccaaagaaggaagtgacaaaaagatggaagcggaagcctcttactacttgggcttagcacacttagctgctgaggaatatgaaacagcattaacagtccttgacacttactgtaaaatctccacagacctggatgatgatctcagtctggggagaggctatgaagccatagccaaggtcctgcagagagacatgagtctgtcttcaaataattctcacctcttagccttgcttcttatctggaatattttagcctccttcccaggatttgaattcctggtcgattcagtcaaggctaagtgaagagttgaacaattatctggtgaattttggcactaccagccaaggagagatgacagaagcaattaaatacttgaaaaaatttgtgaaaattgcaagaaacaattttcaaagcctagatttggtgagagcaagtacaatgcttggggacatctacaatgaaaaaggatactacaacaaagcttctgaatgctttcagcaagcttttgacacaacagtagagctaatgagcatgcctctgatggatgagacaaaagttcactatggaatagcaaaagctcatcagatgatgcttacagtgaacaactatatagagtctgcagatctcaccagcctcaactacctgctgtcatggaaggagagcagaggtaacattgaacctgatccagttactgaagagtttagaggatccacagtggaagctgtatctcaaaactcagaacgtttggaagaactcagtaggtttccaggtgatcaaaaaaatgaaacttaaagcagcttttcacttaacatcaaagcaagaagaaatccatcatgtcaccttagacttcaatacttgtaataggagcatgttacagataatatagagttataataaaacggactatgactcttttca

SEQ ID NO: 190545 - DNA, 2226 bp, Homo sapiens
  Payload ID: 17639
  Gene Name: tetratricopeptide repeat domain 29
  ENST ID: ENST00000513335
  CDS Start-End: 201-1706
agccaggcttcggaatcactgagagaggagggggcagcgccaacgcccagcacctgccgccggtgggggactgacttcggcggaacggaaaactggagttgtttccctgggccagtgcaccgaggctgaagtctataagcctggagagaccatcagcagtaatctgcaaatggctacactggtgtgggttaagaacttagatgattccgatgttcactgtaacattggaagactctggaactctgtggaaaagtcttcacagctcctctgaatccgaaatgaccaccctgcccccactgcccatgacacgcccgaagcttacagccttagccagacagaagctgccttgctcctccagaaaaattccaaggtctcaattgatcaaagaaaaagatgacatagatcattatctagaggtaaatttcaaaggattatcaaaagaggaagttgctgcttataggaactcctacaagaagaatatctgtgtggacatgctgcgagatggttatcataagtccttcaccgagctcttcgctctgatggagcggtgggatgccctgagggaggctgcgagagtcaggtccctcttctggctgcagaagcccctggaggagcagcctgataaactggattacctgtaccattacctgaccagggctgaggacgctgagaggaaagaatccttcgaagatgtacataataacttgtatgctctggcctgttacttcaataattctgaagacaagtgggtaaggaaccacttctatgaacgatgttttaagattgctcagctgatcaaaattgactgtgggaagaaagaagccgaggcacacatgcatatgggtcttctctacgaggaagatggtcagcttctggaagctgctgagcattatgaagcattccatcaattgacacaggggcggatatggaaggatgagacaggccgctctctcaacttgttggcctgtgagagtctcctgaggacttacagattactctcagacaaaatgctagaaaataaagaatacaaacaggccatcaaaattctaataaaagcttctgaaatagccaaagaaggaagtgacaaaaagatggaagcggaagcctcttactacttgggcttagcacacttagctgctgaggaatatgaaacagcattaacagtccttgacacttactgtaaaatctccacagacctggatgatgatctcagtctggggagaggctatgaagccatagccaaggtcctgcagagccaaggagagatgacagaagcaattaaatacttgaaaaaatttgtgaaaattgcaagaaacaattttcaaagcctagatttggtgagagcaagtacaatgcttggggacatctacaatgaaaaaggatactacaacaaagcttctgaatgctttcagcaagcttttgacacaacagtagagctaatgagcatgcctctgatggatgagacaaaagttcactatggaatagcaaaagctcatcagatgatgcttacagtgaacaactatatagagtctgcagatctcaccagcctcaactacctgctgtcatggaaggagagcagaggtaacattgaacctgatccagttactgaagagtttagaggatccacagtggaagctgtatctcaaaactcagaacgtttggaagaactcagtaggtttccaggtgatcaaaaaaatgaaacttaaagcagcttttcacttaacatcaaagcaagaagaaatccatcatgtcaccttagacttcaatacttgtaataggagcatgttacagataatatagagttataataaaacggactatgactcttttcattggattttgcatttcagtgtgttactataaatttaatccaaaacatctaaatccatgaaaataaaatatattccaattcttagaaatatcagcaatcatccatgaaataaatgatttcctcttatccactattccacaagaaatagtgataccatgaaaccaaaataagaaaatattttctaatgagaaaataattacaagcttaagaaaatctttcatgctgaattcatgtaggaaaatatttgctaaaactctagggaaacttctcaacatagataaaaggagtataagcaattaagcctaccatactgataagtcttgtttgaaacagttttctttacctgtgtaacagtatattttatgatacttttagctgatagcacataataaaac

SEQ ID NO: 190546 - DNA, 565 bp, Homo sapiens
  Payload ID: 17639
  Gene Name: tetratricopeptide repeat domain 29
  ENST ID: ENST00000515315
  CDS Start-End: 285-565
cagcagtaatctgcaaatagattgtagctgtgatacaagagccaaccagcagatcaaagagtacaccaaatttcttctgaataccaacagtggaatggcttcaggcggccttttgatctttgtctcagcacccgatgatgccacactgtagcactgcccacttgctagcactggcggaggttcctgtgggtcctcctaacaggctgattcagcctgagctcctggggctaagctcatttggtagcagccaaagagggctacactggtgtgggttaagaacttagatgattccgatgttcactgtaacattggaagactctggaactctgtggaaaagtcttcacagctcctctgaatccgaaatgaccaccctgcccccactgcccatgacacgcccgaagcttacagccttagccagacagaagctgccttgctcctccagaaaaattccaaggtctcaattgatcaaagaaaaagatgacatagatcattatctagaggtaaatttcaaaggattatcaaaagaggaagttgctgcttataggaactcctacaagaagaatat

SEQ ID NO: 190547 - DNA, 557 bp, Homo sapiens
  Payload ID: 17639
  Gene Name: tetratricopeptide repeat domain 29
  ENST ID: ENST00000502319
  CDS Start-End: 479-557
tgtttccgtggagacgctctcggcgtcccctgtctccgctccggcggagccaggcttcggaatcactgagagaggagggggcagcgccaacgcccagcacctgccgccggtgggggactgacttcggcggaacggaaaactggagttgtttccctgggccagtgcaccgaggctgaagtctataagcctggagagaccatcagcagtaatctgcaaatgtgggggccaaacttagagattgtagctgtgatacaagagccaaccagcagatcaaagagtacaccaaatttcttctgaataccaacagtggaatggcttcaggcggccttttgatctttgtctcagcacccgatgatgccacactgtagcactgcccacttgctagcactggcggaggttcctgtgggtcctcctaacaggctgattcagcctgagctcctggggctaagctcatttggtagcagccaaagagtccgaaatgaccaccctgcccccactgcccatgacacgcccgaagcttacagccttagccagacagaagctgccttgctcctcca

SEQ ID NO: 190548 - DNA, 1777 bp, Homo sapiens
  Payload ID: 17639
  Gene Name: tetratricopeptide repeat domain 29
  ENST ID: ENST00000504425
  CDS Start-End: 228-1652
ctctgtttccgtggagacgctctcggcgtcccctgtctccgctccggcggagccaggcttcggaatcactgagagaggagggggcagcgccaacgcccagcacctgccgccggtgggggactgacttcggcggaacggaaaactggagttgtttccctgggccagtgcaccgaggctgaagtctataagcctggagagaccatcagcagtaatctgcaaattccgaaatgaccaccctgcccccactgcccatgacacgcccgaagcttacagccttagccagacagaagctgccttgctcctccagaaaaattccaaggtctcaattgatcaaagaaaaagatgacatagatcattatctagaggtaaatttcaaaggattatcaaaagaggaagttgctgcttataggaactcctacaagaagaatatctgtgtggacatgctgcgagatggttatcataagtccttcaccgagctcttcgctctgatggagcggtgggatgccctgagggaggctgcgagagtcaggtccctcttctggctgcagaagcccctggaggagcagcctgataaactggattacctgtaccattacctgaccagggctgaggacgctgagaggaaagaatccttcgaagatgtacataataacttgtatgctctggcctgttacttcaataattctgaagacaagtgggtaaggaaccacttctatgaacgatgttttaagattgctcagctgatcaaaattgactgtgggaagaaagaagccgaggcacacatgcatatgggtcttctctacgaggaagatggtcagcttctggaagctgctgagcattatgaagcattccatcaattgacacaggggcggatatggaaggatgagacaggccgctctctcaacttgttggcctgtgagagtctcctgaggacttacagattactctcagacaaaatgctagaaaataaagaatacaaacaggccatcaaaattctaataaaagcttctgaaatagccaaagaaggaagtgacaaaaagatggaagcggaagcctcttactacttgggcttagcacacttagctgctgaggaatatgaaacagcattaacagtccttgacacttactgtaaaatctccacagacctggatgatgatctcagtctggggagaggctatgaagccatagccaaggtcctgcagagccaaggagagatgacagaagcaattaaatacttgaaaaaatttgtgaaaattgcaagaaacaattttcaaagcctagatttggtgagagcaagtacaatgcttggggacatctacaatgaaaaaggatactacaacaaagcttctgaatgctttcagcaagcttttgacacaacagtagagctaatgagcatgcctctgatggatgagacaaaagttcactatggaatagcaaaagctcatcagatgatgcttacagtgaacaactatatagagtctgcagatctcaccagcctcaactacctgctgtcatggaaggagagcagaggtaacattgaacctgatccagttactgagtttagaggatccacagtggaagctgtatctcaaaactcagaacgtttggaagaactcagtaggtttccaggtgatcaaaaaaatgaaacttaaagcagcttttcacttaacatcaaagcaagaagaaatccatcatgtcaccttagacttcaatacttgtaataggagcatgttacagataatatagagttataataaaacggactatgactcttttc

SEQ ID NO: 190549 - DNA, 9084 bp, Homo sapiens
  Payload ID: 17640
  Gene Name: tetratricopeptide repeat domain 3
  Uniprot ID: P53804
  ENST ID: ENST00000354749
  CDS Start-End: 1469-7546
ctgaactagttgccagtgatcttgaaacgtgacagtaaccaagagataaataggtgacaatgacaggaaaattagatgtagtaaaagagagtgtttgagagcagaagctatggcaactaaagactggatttgaatccttcctagcttggtgacatgagcaaattacttgatttaagtgagcattttcccatctgtacagtggagataacgataattgtgcctgctaagaagaattgctgtgaagattagtgaaataatgcatgtaaaacatttggtacagtatgtgacacatagtacaaatagtttgctaggaagattgttattattcttcacttgtgatattgtgaagttttcatacagcaaattggacatcatgagatggattgattaaataaatagatttgaacttcaaggactggtagtgttcttgctttggaaagaagaaacttggtttatcctaataatagtaggataataatggtgaagtgataggtacaagtaatagtgtttatgatgcgctggtgatgataggaaaagaaagccattatatgggcaagagctagaagtaataaaatggtgcatttttcagtgatgtttggcctatgtagctattctctgataactataaaaatccttattattgaagattcttcaggaaaaaaaacccttagtctgaaactttaccaccaatcccccttgccccccattgaaatacgtatttttaaaacatggcttttgataatgtgagggttttttcctttttgcgatttagcagtgctgattgtgtattgcagtagttgtgagagcattagaagcagcagtcgataggaggatggaaggtctggatgccgccttggggagttaggagattggcagacttaccctgtaccactctagccctactcctttgcccaagacagaaacacactgagatggataggagaatatgagcagttgataggaaagttctcagtggagtcaggatttaggttaggccaggagattgagaatataacagtttgtgtatgatgaaatggcatatttcacagaatgcagtaaaagcaggtagggtacaagtgcagcaacaggaagatgtcttttcttcattcagcaaacacttatttgagagcttaccatgtgctaggcacatacaaagataaataagatgcccttgatgatcctctatttaaaggagacatgtaaacaggttaacttagagtagagatggtgaatatgtgaacctgaggaaaggaagaaatagattaaattatctggagagagaggaaaagtcagcagaatggggacgagaatctttcggagctcagtgttctgataggagttatttccttgggcataggttccaagtatttttctaatataccatagaagccaggaaaactttcttctgttatctcaaatgatttaattactgacttgagtttgtgttgtctccttagacttgtgcaccatggacaattttgctgagggagatttcactgtggcggattatgccttgttagaagattgccctcacgtggatgattgtgtctttgctgctgaatttatgagcaatgattatgttcgtgtgactcagctttactgtgatggggtgggtgtgcaatataaagattatatccaaagtgagaggaatttggaatttgacatctgcagtatatggtgtagtaaaccaatttctgtcctgcaagattattgcgatgccattaaaataaacatcttctggccacttctgtttcaacatcaaaacagttccgtaatatcacgattgcatccctgtgtggacgccaacaattcacgtgcttctgagataaatttgaagaaactacaacatcttgagttgatggaagatattgtggatttggcaaagaaagttgctaatgattcattccttattggaggcttattgagaattggttgtaaaatagaaaataaaatcttggcaatggaagaagctctgaattggataaaatatgcaggcgatgtaacaattctaactaaattaggatcaattgacaattgttggcctatgttaagtattttctttactgaatacaagtaccacataactaaaattgtaatggaagactgcaatttgcttgaagaacttaaaactcaaagttgtatggattgtatagaggaaggagaactaatgaaaatgaaaggaaatgaagagttttccaaagaaagatttgatatagctattatctattacaccagagccattgaatatagacctgaaaactaccttctttatggtaaccgagctctttgttttcttcgtactggacagtttagaaatgcactcggtgatggaaagagagccactattctgaagaacacttggccaaagggtcattatcgttattgtgatgctctttctatgctgggggaatatgactgggccctgcaagcaaacataaaagctcaaaaactctgtaaaaatgaccctgagggaatcaaggatctaattcagcagcatgtaaagttacaaaaacaaatagaagacctacaaggtcgaacagcaaataaggatccaattaaagccttttatgaaaacagggcctacacacctaggagtttatcagcacctatatttactacttcacttaactttgtggagaaggaaagagatttcagaaaaattaatcacgaaatggccaacggtggtaatcagaatctaaaggtggcggatgaggcgttgaaggtagatgattgtgactgtcatcctgaattttcaccaccatcaagtcagcctccaaaacataaaggaaaacaaaaatctcgaaacaatgaatcagaaaagttcagttctagttcaccattgactttaccagcagatttgaagaacatcttggagaaacagttttctaaatcttccagagctgcacaccaggattttgctaatataatgaaaatgctgagaagcttaattcaagatggctatatggccttattggagcagcgttgccgcagcgctgcacaggcctttacagagttgctgaacggtttagatcctcaaaaaataaagcaattgaacctggccatgattaactatgttttggtcgtctatggacttgccatttctctccttggaataggacagcctgaggaattatctgaagccgaaaaccagtttaagaggattattgaacactaccccagtgagggccttgattgcttggcctactgtggaattggaaaagtatatttgaaaaaaaacagatttctagaagctctcaatcactttgagaaagcaagaaccttgatttatcgtcttcctggagtgttaacttggcccacgagtaatgtgattattgaagagtctcagccacaaaaaataaagatgctgttagagaaatttgttgaagaatgcaagttccctccagtgccagatgccatttgttgctatcagaagtgccatggatattctaagatccagatatacataactgatccagactttaagggttttatacgcatcagctgttgccagtactgtaaaatagaatttcacatgaattgctggaagaagttaaaaactacaacctttaatgataaaattgacaaggattttctacaaggaatatgtcttacccctgactgtgaaggtgtcatttctaagattatcatcttcagcagtggtggtgaagttaaatgtgaatttgaacacaaggtcataaaagaaaaggttcctccaagacctattctgaaacagaaatgttctagcctagagaaactaagactgaaagaagacaaaaaattgaagagaaagatccaaaaaaaagaagcaaaaaagttagcacaagaaagaatggaggaggacttaagagaaagtaatccacccaaaaatgaagagcagaaagaaactgtagacaatgttcagcgttgtcagttccttgatgacagaattctacagtgtataaagcagtatgctgacaagattaaatccggcatacagaatacagccatgcttctcaaagaattgctttcttggaaagttttgagcacagaagactatacaacctgtttttctagcagaaattttctaaatgaagcagtggactatgttattcgccacttgattcaagaaaataacagagtaaagacaagaatatttctgcatgttttgagtgagcttaaagaagtggagcccaaattagccgcctggatccaaaaacttaatagctttggcttagatgccacaggaactttcttttctcgttatggagcatctcttaaactgcttgattttagtatcatgactttcctctggaatgagaaatatggtcacaaactagactctatagaaggaaagcaacttgattatttctctgagccagcatcattgaaggaagcccgttgtttaatatggctgctagaagaacacagagacaagttcccagcattgcatagtgctttagatgaattctttgatataatggacagccgctgtactgtgttaaggaaacaagatagtggtgaagcaccgtttagttcaaccaaggtgaaaaacaaaagcaagaaaaagaagccaaaggattcaaagcctatgttagttgggtctggaacaacttcagtaacttcaaataatgagatcatcacttcaagtgaagaccatagcaatcgaaattcagattctgcaggcccatttgcagtgcctgaccatcttcggcaagatgtagaagaattcgaagctctctatgaccaacacagtaacgaatatgttgtccgcaataagaagctatgggacatgaacccaaaacaaaaatgttcaactctatatgattacttctctcagtttttggaggaacatggtcccttggacatgagtaacaagatgttctctgcagaatatgagtttttcccagaagaaactcgacagatactagaaaaagcaggaggtttaaaaccttttctcttgggatgccctcgttttgttgtgattgacaactgtattgcactgaagaaggttgcatcacggctcaagaaaaaaaggaagaagaaaaacattaaaacaaaagtagaagaaatttcaaaagcaggggagtatgtacgagttaaactacaactgaatccagctgctagggaatttaaaccagatgtaaagtctaaaccagtgtcagattcatcttcagcaccagcttttgaaaatgtgaaacccaaacctgtgtctgcaaattctcccaagccagcttgtgaagatgtgaaggccaaaccagtatccgacaattcttctagacaagtttctgaggatgggcaacccaaaggggtctcttctaattctcctaaaccaggctctgaggatgcaaattacaagcgagtctcctgtaattcccccaaaccggttcttgaggatgtgaaaccaacttattgggctcaatcccatttggtcacaggatactgtacgtatcttcctttccagagatttgatatcacccagacaccgccagcatacataaacgtgttaccaggtttgccccagtacaccagcatatatacacccttggccagcctttctcctgaatatcagctaccaagatcagtaccagtggtgccgtcttttgtagccaatgacagagcagataaaaatgctgctgcctattttgagggtcatcatttgaatgctgagaatgttgctggtcaccagattgcctctgaaacacagatccttgagggctctttgggaatatctgtaaagtcacactgcagcacaggtgatgctcatacagtcctgagtgagtctaacagaaatgatgagcactgtggaaattctaacaacaaatgtgaagtaattccagaaagcaccagtgcagtaacaaacattccacacgtgcagatggttgccatacaggtatcttggaacataatacaccaagaagtcaatactgagccatataatccttttgaggaacgacaaggggaaatttcacggattgaaaaggagcaccaagtattacaagaccaacttcaagaagtgtatgaaaattatgagcagataaaacttaagggcttagaagagaccagggacctggaagagaagttgaaaaggcacttagaagaaaacaagatctcaaagacggaattagattggttccttcaagatttggaaagagaaattaaaaaatggcaacaggaaaaaaaagaaatccaagaaagactaaaatcactgaagaagaaaattaaaaaggtttcaaatgccagtgaaatgtatacccagaaaaatgatggaaaggaaaaggaacatgaattacatctggatcagtcccttgaaatcagcaacacacttacaaatgagaaaatgaaaatagaagagtatataaagaaagggaaagaggattatgaagagagtcatcagagagctgtggctgcagaggtatccgtacttgaaaactggaaggagagtgaagtgtataagctacagatcatggagtcacaagcagaagcctttctgaagaagctggggctgattagccgtgatcctgcagcatatcctgacatggagtctgatatacgttcatgggaattgtttctttctaatgttacaaaagaaattgagaaagcaaagtctcagtttgaagaacaaattaaggcaattaaaaatggttctcggctcagtgaactttctaaagtgcagatttctgagctttcatttcctgcctgtaacacggttcatcccgagttactccctgagtcttcaggcgacgatggccaagggcttgtgacttctgcaagcgacgtgactggaaaccacgcagcacttcacagggatcctagtgtgttctctgctggtgattccccaggggaggctccttctgcgctgttgccagggccaccccctggtcagcctgaagccactcagctgacagggccaaaacgggctggccaggcagctctgtcagaacgaagccctgtggctgatcggaagcagcctgttcctccaggacgtgctgcgcgttcaagccagtctccaaaaaagccgttcaatagtattattgagcacctgtcagtggtattcccatgttacaacagcactgagcttgctggttttattaaaaaagtgcgaagcaaaaacaagaactcactctcaggattgagtattgatgaaattgtccaaagagtgacagaacacattctagatgaacagaaaaagaaaaagccaaacccaggaaaggacaagaggacttatgagcccagctctgccacccccgtgaccaggtcctcccagggctcaccctcggtggttgttgcaccatcacccaaaaccaaggggcagaaagcagaagatgtccctgtgaggattgcactgggtgcaagttcctgtgaaatatgccacgaggtgttcaaatcaaaaaacgtgcgtgtgctcaaatgtgggcacaagtatcacaaagggtgctttaagcagtggcttaaagggcagagcgcttgcccggcctgccagggtcgtgatctcctgacagaagagtcaccttctggaagaggctggcccagtcagaatcaggagctgccttcctgctcttctaggtagtcacacttcactaaagtgtcatccaccagtgtgttgaatccgaagaatgacaattttctaccactggtgtaaaaaacaaacatttgaagacccttgtgcattgtgtgtcacaaagctaaatacatggaaatcgttaatatcgctgatattaagtaatttccccactctgagtgaatactttgatgattgccaacagtggctaataaaatgacggctaccacactcatgggtcactggggctgcgcagggctctttgaggtgggtggcttcttttggaaagtactatgaacgtctcgaagcagtattctagtgataagaattcttaacatagccaagcgccccacgtttgttccccacgtttgttccccttttctgtttgaaaaacctgttctggtagctccacaagagagatgatactgactttttaaattttttacaagagtctgtattcctgatatgcctatatttttcctcaaagattctgcattttaaggatgggcataagcaaactatattttaataatttatagttaatgttaaaatattggctgatttagaccaaaagattcaaatctcctctttgtgaaatcccatctgcatttgattttttattattttatgttcccccgttagattgttttaagtgtttgcttttcatcttttatagatgtaatctgattttcaaaaatcattaacactttttaattagtatcgactaagactttttccccctggaatcgaggctgtgtgtccgtcatcccagcccccggttggagcctgctctttgaactccgctgccttccttagcagcttctgtcctcttctgtgagtcagtcagcgagtgcttgggatccgcatccagccgtgctgagcacacaacaggctgtgtgtggaaatggccaccaccattctccttccccaccccaccacaaaaagagaagctgtgtctttagacaaccctgaggtatctgtgttacaatcgttctgtgtttgatatttgtgtaaagtatgcatgcagtcttgtactgtgacctaagaacaaaactgtaactgcattagaaaccatgaaaaaattagatattgttttgtgacttttagacagtggtaaatatagaaccatgaattctggtcacattccatttctctccaacatgaaggatcaaaaaatgtttttcaatgtgttctttgttccactggaaacttagagtcatgagtttatgagctgatttggtcaccttcctctgcctttgttcactgtgagttctgatgtcttagtgacttagttcttagaagctcacgccttagtttgaaacagattctccacggtggtccccaaaacactgtctgcatatccataagaattgagcgctatgggtgttaacgtgcatgaggatcagtttgcagcagcaagtacaaaaggagaagaggaacatccgttgaatgagtgtgttttgtacataacttcagatacttgtgaacatgccttatatttgtccaacaactgtcagaataaagaacattctaaaatgagaagttca

SEQ ID NO: 190550 - DNA, 7712 bp, Homo sapiens
  Payload ID: 17640
  Gene Name: tetratricopeptide repeat domain 3
  Uniprot ID: P53804
  ENST ID: ENST00000355666
  CDS Start-End: 106-6183
gtcggctgacgtggagggccggaggtggcggcggcggcggcggcggctgctgctgctgctgcccgcgtccgaggctcgcgggcggcgggcccggacttgtgcaccatggacaattttgctgagggagatttcactgtggcggattatgccttgttagaagattgccctcacgtggatgattgtgtctttgctgctgaatttatgagcaatgattatgttcgtgtgactcagctttactgtgatggggtgggtgtgcaatataaagattatatccaaagtgagaggaatttggaatttgacatctgcagtatatggtgtagtaaaccaatttctgtcctgcaagattattgcgatgccattaaaataaacatcttctggccacttctgtttcaacatcaaaacagttccgtaatatcacgattgcatccctgtgtggacgccaacaattcacgtgcttctgagataaatttgaagaaactacaacatcttgagttgatggaagatattgtggatttggcaaagaaagttgctaatgattcattccttattggaggcttattgagaattggttgtaaaatagaaaataaaatcttggcaatggaagaagctctgaattggataaaatatgcaggcgatgtaacaattctaactaaattaggatcaattgacaattgttggcctatgttaagtattttctttactgaatacaagtaccacataactaaaattgtaatggaagactgcaatttgcttgaagaacttaaaactcaaagttgtatggattgtatagaggaaggagaactaatgaaaatgaaaggaaatgaagagttttccaaagaaagatttgatatagctattatctattacaccagagccattgaatatagacctgaaaactaccttctttatggtaaccgagctctttgttttcttcgtactggacagtttagaaatgcactcggtgatggaaagagagccactattctgaagaacacttggccaaagggtcattatcgttattgtgatgctctttctatgctgggggaatatgactgggccctgcaagcaaacataaaagctcaaaaactctgtaaaaatgaccctgagggaatcaaggatctaattcagcagcatgtaaagttacaaaaacaaatagaagacctacaaggtcgaacagcaaataaggatccaattaaagccttttatgaaaacagggcctacacacctaggagtttatcagcacctatatttactacttcacttaactttgtggagaaggaaagagatttcagaaaaattaatcacgaaatggccaacggtggtaatcagaatctaaaggtggcggatgaggcgttgaaggtagatgattgtgactgtcatcctgaattttcaccaccatcaagtcagcctccaaaacataaaggaaaacaaaaatctcgaaacaatgaatcagaaaagttcagttctagttcaccattgactttaccagcagatttgaagaacatcttggagaaacagttttctaaatcttccagagctgcacaccaggattttgctaatataatgaaaatgctgagaagcttaattcaagatggctatatggccttattggagcagcgttgccgcagcgctgcacaggcctttacagagttgctgaacggtttagatcctcaaaaaataaagcaattgaacctggccatgattaactatgttttggtcgtctatggacttgccatttctctccttggaataggacagcctgaggaattatctgaagccgaaaaccagtttaagaggattattgaacactaccccagtgagggccttgattgcttggcctactgtggaattggaaaagtatatttgaaaaaaaacagatttctagaagctctcaatcactttgagaaagcaagaaccttgatttatcgtcttcctggagtgttaacttggcccacgagtaatgtgattattgaagagtctcagccacaaaaaataaagatgctgttagagaaatttgttgaagaatgcaagttccctccagtgccagatgccatttgttgctatcagaagtgccatggatattctaagatccagatatacataactgatccagactttaagggttttatacgcatcagctgttgccagtactgtaaaatagaatttcacatgaattgctggaagaagttaaaaactacaacctttaatgataaaattgacaaggattttctacaaggaatatgtcttacccctgactgtgaaggtgtcatttctaagattatcatcttcagcagtggtggtgaagttaaatgtgaatttgaacacaaggtcataaaagaaaaggttcctccaagacctattctgaaacagaaatgttctagcctagagaaactaagactgaaagaagacaaaaaattgaagagaaagatccaaaaaaaagaagcaaaaaagttagcacaagaaagaatggaggaggacttaagagaaagtaatccacccaaaaatgaagagcagaaagaaactgtagacaatgttcagcgttgtcagttccttgatgacagaattctacagtgtataaagcagtatgctgacaagattaaatccggcatacagaatacagccatgcttctcaaagaattgctttcttggaaagttttgagcacagaagactatacaacctgtttttctagcagaaattttctaaatgaagcagtggactatgttattcgccacttgattcaagaaaataacagagtaaagacaagaatatttctgcatgttttgagtgagcttaaagaagtggagcccaaattagccgcctggatccaaaaacttaatagctttggcttagatgccacaggaactttcttttctcgttatggagcatctcttaaactgcttgattttagtatcatgactttcctctggaatgagaaatatggtcacaaactagactctatagaaggaaagcaacttgattatttctctgagccagcatcattgaaggaagcccgttgtttaatatggctgctagaagaacacagagacaagttcccagcattgcatagtgctttagatgaattctttgatataatggacagccgctgtactgtgttaaggaaacaagatagtggtgaagcaccgtttagttcaaccaaggtgaaaaacaaaagcaagaaaaagaagccaaaggattcaaagcctatgttagttgggtctggaacaacttcagtaacttcaaataatgagatcatcacttcaagtgaagaccatagcaatcgaaattcagattctgcaggcccatttgcagtgcctgaccatcttcggcaagatgtagaagaattcgaagctctctatgaccaacacagtaacgaatatgttgtccgcaataagaagctatgggacatgaacccaaaacaaaaatgttcaactctatatgattacttctctcagtttttggaggaacatggtcccttggacatgagtaacaagatgttctctgcagaatatgagtttttcccagaagaaactcgacagatactagaaaaagcaggaggtttaaaaccttttctcttgggatgccctcgttttgttgtgattgacaactgtattgcactgaagaaggttgcatcacggctcaagaaaaaaaggaagaagaaaaacattaaaacaaaagtagaagaaatttcaaaagcaggggagtatgtacgagttaaactacaactgaatccagctgctagggaatttaaaccagatgtaaagtctaaaccagtgtcagattcatcttcagcaccagcttttgaaaatgtgaaacccaaacctgtgtctgcaaattctcccaagccagcttgtgaagatgtgaaggccaaaccagtatccgacaattcttctagacaagtttctgaggatgggcaacccaaaggggtctcttctaattctcctaaaccaggctctgaggatgcaaattacaagcgagtctcctgtaattcccccaaaccggttcttgaggatgtgaaaccaacttattgggctcaatcccatttggtcacaggatactgtacgtatcttcctttccagagatttgatatcacccagacaccgccagcatacataaacgtgttaccaggtttgccccagtacaccagcatatatacacccttggccagcctttctcctgaatatcagctaccaagatcagtaccagtggtgccgtcttttgtagccaatgacagagcagataaaaatgctgctgcctattttgagggtcatcatttgaatgctgagaatgttgctggtcaccagattgcctctgaaacacagatccttgagggctctttgggaatatctgtaaagtcacactgcagcacaggtgatgctcatacagtcctgagtgagtctaacagaaatgatgagcactgtggaaattctaacaacaaatgtgaagtaattccagaaagcaccagtgcagtaacaaacattccacacgtgcagatggttgccatacaggtatcttggaacataatacaccaagaagtcaatactgagccatataatccttttgaggaacgacaaggggaaatttcacggattgaaaaggagcaccaagtattacaagaccaacttcaagaagtgtatgaaaattatgagcagataaaacttaagggcttagaagagaccagggacctggaagagaagttgaaaaggcacttagaagaaaacaagatctcaaagacggaattagattggttccttcaagatttggaaagagaaattaaaaaatggcaacaggaaaaaaaagaaatccaagaaagactaaaatcactgaagaagaaaattaaaaaggtttcaaatgccagtgaaatgtatacccagaaaaatgatggaaaggaaaaggaacatgaattacatctggatcagtcccttgaaatcagcaacacacttacaaatgagaaaatgaaaatagaagagtatataaagaaagggaaagaggattatgaagagagtcatcagagagctgtggctgcagaggtatccgtacttgaaaactggaaggagagtgaagtgtataagctacagatcatggagtcacaagcagaagcctttctgaagaagctggggctgattagccgtgatcctgcagcatatcctgacatggagtctgatatacgttcatgggaattgtttctttctaatgttacaaaagaaattgagaaagcaaagtctcagtttgaagaacaaattaaggcaattaaaaatggttctcggctcagtgaactttctaaagtgcagatttctgagctttcatttcctgcctgtaacacggttcatcccgagttactccctgagtcttcaggcgacgatggccaagggcttgtgacttctgcaagcgacgtgactggaaaccacgcagcacttcacagggatcctagtgtgttctctgctggtgattccccaggggaggctccttctgcgctgttgccagggccaccccctggtcagcctgaagccactcagctgacagggccaaaacgggctggccaggcagctctgtcagaacgaagccctgtggctgatcggaagcagcctgttcctccaggacgtgctgcgcgttcaagccagtctccaaaaaagccgttcaatagtattattgagcacctgtcagtggtattcccatgttacaacagcactgagcttgctggttttattaaaaaagtgcgaagcaaaaacaagaactcactctcaggattgagtattgatgaaattgtccaaagagtgacagaacacattctagatgaacagaaaaagaaaaagccaaacccaggaaaggacaagaggacttatgagcccagctctgccacccccgtgaccaggtcctcccagggctcaccctcggtggttgttgcaccatcacccaaaaccaaggggcagaaagcagaagatgtccctgtgaggattgcactgggtgcaagttcctgtgaaatatgccacgaggtgttcaaatcaaaaaacgtgcgtgtgctcaaatgtgggcacaagtatcacaaagggtgctttaagcagtggcttaaagggcagagcgcttgcccggcctgccagggtcgtgatctcctgacagaagagtcaccttctggaagaggctggcccagtcagaatcaggagctgccttcctgctcttctaggtagtcacacttcactaaagtgtcatccaccagtgtgttgaatccgaagaatgacaattttctaccactggtgtaaaaaacaaacatttgaagacccttgtgcattgtgtgtcacaaagctaaatacatggaaatcgttaatatcgctgatattaagtaatttccccactctgagtgaatactttgatgattgccaacagtggctaataaaatgacggctaccacactcatgggtcactggggctgcgcagggctctttgaggtgggtggcttcttttggaaagtactatgaacgtctcgaagcagtattctagtgataagaattcttaacatagccaagcgccccacgtttgttccccacgtttgttccccttttctgtttgaaaaacctgttctggtagctccacaagagagatgatactgactttttaaattttttacaagagtctgtattcctgatatgcctatatttttcctcaaagattctgcattttaaggatgggcataagcaaactatattttaataatttatagttaatgttaaaatattggctgatttagaccaaaagattcaaatctcctctttgtgaaatcccatctgcatttgattttttattattttatgttcccccgttagattgttttaagtgtttgcttttcatcttttatagatgtaatctgattttcaaaaatcattaacactttttaattagtatcgactaagactttttccccctggaatcgaggctgtgtgtccgtcatcccagcccccggttggagcctgctctttgaactccgctgccttccttagcagcttctgtcctcttctgtgagtcagtcagcgagtgcttgggatccgcatccagccgtgctgagcacacaacaggctgtgtgtggaaatggccaccaccattctccttccccaccccaccacaaaaagagaagctgtgtctttagacaaccctgaggtatctgtgttacaatcgttctgtgtttgatatttgtgtaaagtatgcatgcagtcttgtactgtgacctaagaacaaaactgtaactgcattagaaaccatgaaaaaattagatattgttttgtgacttttagacagtggtaaatatagaaccatgaattctggtcacattccatttctctccaacatgaaggatcaaaaaatgtttttcaatgtgttctttgttccactggaaacttagagtcatgagtttatgagctgatttggtcaccttcctctgcctttgttcactgtgagttctgatgtcttagtgacttagttcttagaagctcacgccttagtttgaaacagattctccacggtggtccccaaaacactgtctgcatatccataagaattgagcgctatgggtgttaacgtgcatgaggatcagtttgcagcagcaagtacaaaaggagaagaggaacatccgttgaatgagtgtgttttgtacataacttcagatacttgtgaacatgccttatatttgtccaacaactgtcagaataaagaacattctaaaatg

SEQ ID NO: 190551 - DNA, 2115 bp, Homo sapiens
  Payload ID: 17640
  Gene Name: tetratricopeptide repeat domain 3
  ENST ID: ENST00000399010
  CDS Start-End: 87-989
cggaggtggcggcggcggcggcggcggctgctgctgctgctgcccgcgtccgaggctcgcgggcggcgggcccggacttgtgcaccatggacaattttgctgagggagatttcactgtggcggattatgccttgttagaagattgccctcacgtggatgattgtgtctttgctgctgaatttatgagcaatgattatgttcgtgtgactcagctttactgtgatggggtgggtgtgcaatataaagattatatccaaagtgagaggaatttggaatttgacatctgcagtatatggtgtagtaaaccaatttctgtcctgcaagattattgcgatgccattaaaataaacatcttctggccacttctgtttcaacatcaaaacagttccgtaatatcacgattgcatccctgtgtggacgccaacaattcacgtgcttctgagataaatttgaagaaactacaacatcttgagttgatggaagatattgtggatttggcaaagaaagttgctaatgattcattccttattggaggcttattgagaattggttgtaaaatagaaaataaaatcttggcaatggaagaagctctgaattggataaaatatgcaggcgatgtaacaattctaactaaattaggatcaattgacaattgttggcctatgttaagtattttctttactgaatacaagtaccacataactaaaattgtaatggaagactgcaatttgcttgaagaacttaaaactcaaagttgtatggattgtatagaggaaggagaactaatgaaaatgaaaggaaatgaagagttttccaaagaaagatttgatatagctattatctattacaccagagccattgaatatagacctgaaaactaccttctttatggtaaccgagctctttgttttcttcgtactggacagtttagaacacattctcatggtagaaaatttggaaaatacaagagtttaaaaagaagaaaataaaaatcaccagtaatccaaccaccttggagaataccgctgtattaacgttatgcagcttttagatggcttaagccgtggataaaccgaggctatctagactagaggaatggatgggcttgacacagtcttccatcaataccactgtcctcaacgggttctgacaagaaatgagctgcacatgtctttaggttattgctactggctaggtccagaattgcatttattttgtgctgtttgaaggtgaatttgtatgctttcaagatcagatgaataggttggcaacttggctagcctcttgtgaaaattgaggtgcctgtctgaaatattgcctggcagaaggttttccactttccacttctgagagctgagaggcacaccagggtgtttctgctctctttcatgagtgttgaatgctagacacacaaggaagatccttctaataccttgctgcaacaggaggtgaatcagagtagaagtacagaagctaggtagtttggtgaggtaaaggccaagagcagcttgtggatctatccttgtacctccttgctgatggtctagcttgtggtttaataccatctacatttcactaaagccaggtcagcagcattgttcctttgtttcttattaggcaatcaccaatatatattggatgcctattttattcacgaagtgttttaccacactggttttgctggtgtttcctacctcctcacacattgtctatatgatttgctcagtaatgtagggataatgttttcagagtccatagtatatataactcctgatcaggtgactagatggtgtgacttaaggaaagaacacgttgccagtaattcagatgtgccattgacacaggaggacccatgcctgagaaagacttttatctgagttactgagattaagatgttttgaagctcccaagcagagggatgctggatctgctgtggaaatctggctgagcagctgcagggacagctgggggtaaagcatccaccctcccccagtttggcgaggatgcactcctcagctgttctggaaggccagacttcttatctgctgtcattgaagcaagaattgagatgtccaaagagaacagaaatgggacaatttaatactagaaaggaat

SEQ ID NO: 190552 - DNA, 10363 bp, Homo sapiens
  Payload ID: 17640
  Gene Name: tetratricopeptide repeat domain 3
  Uniprot ID: P53804
  ENST ID: ENST00000399017
  CDS Start-End: 2748-8825
tgtattctttaaatattatgtctcattagtctcttctctcctgctggaactttaactggatatatatatacactaaactgtttccagatcacttattctttatctttcatattttttatctctttgtttctctttaccagaatttacagtgctggataatttcataaggcatatattttagttcaccaattttctcttcaactgtgcctaatatcctctgtaacccatcctgtctcttttttttcttttaacaattgcatttttaattactttttttttttttttttaagatggagtctctctctgtcgcccaggctggagtgcagaggcgcgatctcagctcactgcaagctccgcctcccgggttcacgccattctcctgcctcagcctcccgagtagctgggactacaggcgcccgccaccacgcccggctaatttttttgtatttttagtagagacggggtttcaccgtgttacccaggatggtctcgatctcctgacctcgtcatctgctcacgttggcctcccagagtgctgggattacaggcatgagccaccatgcccggccgcatttttaatttctaaaagttctgcctggttcttttttgatatgtccagtcattcttcatgttctcatgttatatgctgatttttgtgactctatagctattctgtagactatatcagacattcccaatgtctgatatccttgaggagggggatgtctaaatttattgcttttttgtttttttttctgttgtctctcctcaatgtagctgtcacctcatgtgtttggtgatcattgattatgaacttctgtttgatctttgtggtgatcttgagagtctaatttgaggatgcttgctttctgaaagcatttctatcagctttgtctgggagccagaaagtttagctggcatcacttttgagttcctacattttgcttctggcccagggctcagtgtcctgatcctattactgctcttggcaccactacttgtagcactaaactgtagccaggtttaatttctagctcaaggtttgttgcttttgcgtggagagggtgccttcacatgttcccctatttctatgagctcagcaaaaacatccaaaaagtgtttttttttttaatctaggatatacctttttcctcccaacagtacattcccccagagtgtatagttgaccataactgatgggatcagaagctctttattttaatatttaattttagtagtatatttttgtttgattgtattataaaaaattttatggtaccaagcaagctttcttggtgataccaacatttccattaaaactagtttacatctaagttaagatttgagttatcctaaagaaaagtattaagtaaatagcagtacagatggcaaatggattgcacaatatatcctctggatccatagtgaccctgcagagataaacctgtgatggtcaaacaatgtgaaaactgctgtcagagacatgggcagggtgctcttgtttacagagaagaggtgcaaaaatcaacttgatggtagtgggaagatcaggaaatgcttcctgaaattgagtattaagaactaatagacattaggtggttgcagaataagttttgtttaggaaggacaagcagttgggtatgactggcttctaggttgtgtgttgtggagtgactggggataaaagcaggagcaagatcacaaaaggtcttctatgcttatattagggaagttggactttattctcaagctgaagggaagctgttgcatggttttaagcagtaaagtgatatgatcagagttttagaggatgccaagattgaaggcaagtctgaccagttaggagactgcttgttaaattagttcagaggagaaacagtgaaggcagtggcactgggcatgaagaagtatatgtgtgctaattttagatttcttagggaagcagaaatgacaagagttagtggtccattggacagaaatattgaaggagactggggagtctaggttgactcccagggtttaggtttgggcagtaaaatgacatgtagaacaattaactgataaacagcatacagaaagaggaaagaacttcatttcatatgtttgtttttgaggaaaagatgtttgtttttgaacttcctgattcagaggggcttgtgggacatcttggttaagatcctgtagtagttctagtagggtctagaagtcaagagatacaaccccgcctggaaggatttgggagtcttcagcatttggaattttggaagccattgtttactgcagtgcatatgagataatttaaactggtacatagataaacacttgaaaaaattttaatagataggaatttaatgtgtatgagaaacataacttgcacatctaacctttgataatcatggacattatcacttaggccaagtgagctcaataaaagggaaatattaactaaaaatatatgtgatacatggaaatggcaaaaatcacggtgaagctatgcaaacgatgcaagttcagaaagtgctgtgttaagtcatgggtgtggtggataaattcacccaaggagagagtaagagtgagaagaaaagagagttgacattgggtggcggggaatggagaagaagaacccatgaaggaaactgaggaagagcagccagacgaataggaggaaaaccaggagaagatggtctttggagtccaaatgaagagttctgaggaggaagtggtccacagcgtcaaacttgtgcaccatggacaattttgctgagggagatttcactgtggcggattatgccttgttagaagattgccctcacgtggatgattgtgtctttgctgctgaatttatgagcaatgattatgttcgtgtgactcagctttactgtgatggggtgggtgtgcaatataaagattatatccaaagtgagaggaatttggaatttgacatctgcagtatatggtgtagtaaaccaatttctgtcctgcaagattattgcgatgccattaaaataaacatcttctggccacttctgtttcaacatcaaaacagttccgtaatatcacgattgcatccctgtgtggacgccaacaattcacgtgcttctgagataaatttgaagaaactacaacatcttgagttgatggaagatattgtggatttggcaaagaaagttgctaatgattcattccttattggaggcttattgagaattggttgtaaaatagaaaataaaatcttggcaatggaagaagctctgaattggataaaatatgcaggcgatgtaacaattctaactaaattaggatcaattgacaattgttggcctatgttaagtattttctttactgaatacaagtaccacataactaaaattgtaatggaagactgcaatttgcttgaagaacttaaaactcaaagttgtatggattgtatagaggaaggagaactaatgaaaatgaaaggaaatgaagagttttccaaagaaagatttgatatagctattatctattacaccagagccattgaatatagacctgaaaactaccttctttatggtaaccgagctctttgttttcttcgtactggacagtttagaaatgcactcggtgatggaaagagagccactattctgaagaacacttggccaaagggtcattatcgttattgtgatgctctttctatgctgggggaatatgactgggccctgcaagcaaacataaaagctcaaaaactctgtaaaaatgaccctgagggaatcaaggatctaattcagcagcatgtaaagttacaaaaacaaatagaagacctacaaggtcgaacagcaaataaggatccaattaaagccttttatgaaaacagggcctacacacctaggagtttatcagcacctatatttactacttcacttaactttgtggagaaggaaagagatttcagaaaaattaatcacgaaatggccaacggtggtaatcagaatctaaaggtggcggatgaggcgttgaaggtagatgattgtgactgtcatcctgaattttcaccaccatcaagtcagcctccaaaacataaaggaaaacaaaaatctcgaaacaatgaatcagaaaagttcagttctagttcaccattgactttaccagcagatttgaagaacatcttggagaaacagttttctaaatcttccagagctgcacaccaggattttgctaatataatgaaaatgctgagaagcttaattcaagatggctatatggccttattggagcagcgttgccgcagcgctgcacaggcctttacagagttgctgaacggtttagatcctcaaaaaataaagcaattgaacctggccatgattaactatgttttggtcgtctatggacttgccatttctctccttggaataggacagcctgaggaattatctgaagccgaaaaccagtttaagaggattattgaacactaccccagtgagggccttgattgcttggcctactgtggaattggaaaagtatatttgaaaaaaaacagatttctagaagctctcaatcactttgagaaagcaagaaccttgatttatcgtcttcctggagtgttaacttggcccacgagtaatgtgattattgaagagtctcagccacaaaaaataaagatgctgttagagaaatttgttgaagaatgcaagttccctccagtgccagatgccatttgttgctatcagaagtgccatggatattctaagatccagatatacataactgatccagactttaagggttttatacgcatcagctgttgccagtactgtaaaatagaatttcacatgaattgctggaagaagttaaaaactacaacctttaatgataaaattgacaaggattttctacaaggaatatgtcttacccctgactgtgaaggtgtcatttctaagattatcatcttcagcagtggtggtgaagttaaatgtgaatttgaacacaaggtcataaaagaaaaggttcctccaagacctattctgaaacagaaatgttctagcctagagaaactaagactgaaagaagacaaaaaattgaagagaaagatccaaaaaaaagaagcaaaaaagttagcacaagaaagaatggaggaggacttaagagaaagtaatccacccaaaaatgaagagcagaaagaaactgtagacaatgttcagcgttgtcagttccttgatgacagaattctacagtgtataaagcagtatgctgacaagattaaatccggcatacagaatacagccatgcttctcaaagaattgctttcttggaaagttttgagcacagaagactatacaacctgtttttctagcagaaattttctaaatgaagcagtggactatgttattcgccacttgattcaagaaaataacagagtaaagacaagaatatttctgcatgttttgagtgagcttaaagaagtggagcccaaattagccgcctggatccaaaaacttaatagctttggcttagatgccacaggaactttcttttctcgttatggagcatctcttaaactgcttgattttagtatcatgactttcctctggaatgagaaatatggtcacaaactagactctatagaaggaaagcaacttgattatttctctgagccagcatcattgaaggaagcccgttgtttaatatggctgctagaagaacacagagacaagttcccagcattgcatagtgctttagatgaattctttgatataatggacagccgctgtactgtgttaaggaaacaagatagtggtgaagcaccgtttagttcaaccaaggtgaaaaacaaaagcaagaaaaagaagccaaaggattcaaagcctatgttagttgggtctggaacaacttcagtaacttcaaataatgagatcatcacttcaagtgaagaccatagcaatcgaaattcagattctgcaggcccatttgcagtgcctgaccatcttcggcaagatgtagaagaattcgaagctctctatgaccaacacagtaacgaatatgttgtccgcaataagaagctatgggacatgaacccaaaacaaaaatgttcaactctatatgattacttctctcagtttttggaggaacatggtcccttggacatgagtaacaagatgttctctgcagaatatgagtttttcccagaagaaactcgacagatactagaaaaagcaggaggtttaaaaccttttctcttgggatgccctcgttttgttgtgattgacaactgtattgcactgaagaaggttgcatcacggctcaagaaaaaaaggaagaagaaaaacattaaaacaaaagtagaagaaatttcaaaagcaggggagtatgtacgagttaaactacaactgaatccagctgctagggaatttaaaccagatgtaaagtctaaaccagtgtcagattcatcttcagcaccagcttttgaaaatgtgaaacccaaacctgtgtctgcaaattctcccaagccagcttgtgaagatgtgaaggccaaaccagtatccgacaattcttctagacaagtttctgaggatgggcaacccaaaggggtctcttctaattctcctaaaccaggctctgaggatgcaaattacaagcgagtctcctgtaattcccccaaaccggttcttgaggatgtgaaaccaacttattgggctcaatcccatttggtcacaggatactgtacgtatcttcctttccagagatttgatatcacccagacaccgccagcatacataaacgtgttaccaggtttgccccagtacaccagcatatatacacccttggccagcctttctcctgaatatcagctaccaagatcagtaccagtggtgccgtcttttgtagccaatgacagagcagataaaaatgctgctgcctattttgagggtcatcatttgaatgctgagaatgttgctggtcaccagattgcctctgaaacacagatccttgagggctctttgggaatatctgtaaagtcacactgcagcacaggtgatgctcatacagtcctgagtgagtctaacagaaatgatgagcactgtggaaattctaacaacaaatgtgaagtaattccagaaagcaccagtgcagtaacaaacattccacacgtgcagatggttgccatacaggtatcttggaacataatacaccaagaagtcaatactgagccatataatccttttgaggaacgacaaggggaaatttcacggattgaaaaggagcaccaagtattacaagaccaacttcaagaagtgtatgaaaattatgagcagataaaacttaagggcttagaagagaccagggacctggaagagaagttgaaaaggcacttagaagaaaacaagatctcaaagacggaattagattggttccttcaagatttggaaagagaaattaaaaaatggcaacaggaaaaaaaagaaatccaagaaagactaaaatcactgaagaagaaaattaaaaaggtttcaaatgccagtgaaatgtatacccagaaaaatgatggaaaggaaaaggaacatgaattacatctggatcagtcccttgaaatcagcaacacacttacaaatgagaaaatgaaaatagaagagtatataaagaaagggaaagaggattatgaagagagtcatcagagagctgtggctgcagaggtatccgtacttgaaaactggaaggagagtgaagtgtataagctacagatcatggagtcacaagcagaagcctttctgaagaagctggggctgattagccgtgatcctgcagcatatcctgacatggagtctgatatacgttcatgggaattgtttctttctaatgttacaaaagaaattgagaaagcaaagtctcagtttgaagaacaaattaaggcaattaaaaatggttctcggctcagtgaactttctaaagtgcagatttctgagctttcatttcctgcctgtaacacggttcatcccgagttactccctgagtcttcaggcgacgatggccaagggcttgtgacttctgcaagcgacgtgactggaaaccacgcagcacttcacagggatcctagtgtgttctctgctggtgattccccaggggaggctccttctgcgctgttgccagggccaccccctggtcagcctgaagccactcagctgacagggccaaaacgggctggccaggcagctctgtcagaacgaagccctgtggctgatcggaagcagcctgttcctccaggacgtgctgcgcgttcaagccagtctccaaaaaagccgttcaatagtattattgagcacctgtcagtggtattcccatgttacaacagcactgagcttgctggttttattaaaaaagtgcgaagcaaaaacaagaactcactctcaggattgagtattgatgaaattgtccaaagagtgacagaacacattctagatgaacagaaaaagaaaaagccaaacccaggaaaggacaagaggacttatgagcccagctctgccacccccgtgaccaggtcctcccagggctcaccctcggtggttgttgcaccatcacccaaaaccaaggggcagaaagcagaagatgtccctgtgaggattgcactgggtgcaagttcctgtgaaatatgccacgaggtgttcaaatcaaaaaacgtgcgtgtgctcaaatgtgggcacaagtatcacaaagggtgctttaagcagtggcttaaagggcagagcgcttgcccggcctgccagggtcgtgatctcctgacagaagagtcaccttctggaagaggctggcccagtcagaatcaggagctgccttcctgctcttctaggtagtcacacttcactaaagtgtcatccaccagtgtgttgaatccgaagaatgacaattttctaccactggtgtaaaaaacaaacatttgaagacccttgtgcattgtgtgtcacaaagctaaatacatggaaatcgttaatatcgctgatattaagtaatttccccactctgagtgaatactttgatgattgccaacagtggctaataaaatgacggctaccacactcatgggtcactggggctgcgcagggctctttgaggtgggtggcttcttttggaaagtactatgaacgtctcgaagcagtattctagtgataagaattcttaacatagccaagcgccccacgtttgttccccacgtttgttccccttttctgtttgaaaaacctgttctggtagctccacaagagagatgatactgactttttaaattttttacaagagtctgtattcctgatatgcctatatttttcctcaaagattctgcattttaaggatgggcataagcaaactatattttaataatttatagttaatgttaaaatattggctgatttagaccaaaagattcaaatctcctctttgtgaaatcccatctgcatttgattttttattattttatgttcccccgttagattgttttaagtgtttgcttttcatcttttatagatgtaatctgattttcaaaaatcattaacactttttaattagtatcgactaagactttttccccctggaatcgaggctgtgtgtccgtcatcccagcccccggttggagcctgctctttgaactccgctgccttccttagcagcttctgtcctcttctgtgagtcagtcagcgagtgcttgggatccgcatccagccgtgctgagcacacaacaggctgtgtgtggaaatggccaccaccattctccttccccaccccaccacaaaaagagaagctgtgtctttagacaaccctgaggtatctgtgttacaatcgttctgtgtttgatatttgtgtaaagtatgcatgcagtcttgtactgtgacctaagaacaaaactgtaactgcattagaaaccatgaaaaaattagatattgttttgtgacttttagacagtggtaaatatagaaccatgaattctggtcacattccatttctctccaacatgaaggatcaaaaaatgtttttcaatgtgttctttgttccactggaaacttagagtcatgagtttatgagctgatttggtcaccttcctctgcctttgttcactgtgagttctgatgtcttagtgacttagttcttagaagctcacgccttagtttgaaacagattctccacggtggtccccaaaacactgtctgcatatccataagaattgagcgctatgggtgttaacgtgcatgaggatcagtttgcagcagcaagtacaaaaggagaagaggaacatccgttgaatgagtgtgttttgtacataacttcagatacttgtgaacatgccttatatttgtccaacaactgtcagaataaagaacattctaaaatgagaagttca

SEQ ID NO: 190553 - DNA, 893 bp, Homo sapiens
  Payload ID: 17640
  Gene Name: tetratricopeptide repeat domain 3
  ENST ID: ENST00000411496
  CDS Start-End: 1-893
gaaattttctaaatgaagcagtggactatgttattcgccacttgattcaagaaaataacagagtaaagacaagaatatttctgcatgttttgagtgagcttaaagaagtggagcccaaattagccgcctggatccaaaaacttaatagctttggcttagatgccacaggaactttcttttctcgttatggagcatctcttaaactgcttgattttagtatcatgactttcctctggaatgagaaatatggtcacaaactagactctatagaaggaaagcaacttgattatttctctgagccagcatcattgaaggaagcccgttgtttaatatggctgctagaagaacacagagacaagttcccagcattgcatagtgctttagatgaattctttgatataatggatattttcacagcatcatgggaaagattgcatgttacactgacagaatctattaacagccgctgtactgtgttaaggaaacaagatagtggtgaagcaccgtttagttcaaccaaggtgaaaaacaaaagcaagaaaaagaagccaaaggattcaaagcctatgttagttgggtctggaacaacttcagtaacttcaaataatgagatcatcacttcaagtgaagaccatagcaatcgaaattcagattctgcaggcccatttgcagtgcctgaccatcttcggcaagatgtagaagaattcgaagctctctatgaccaacacagtaacgaatatgttgtccgcaataagaagctatgggacatgaacccaaaacaaaaatgttcaactctatatgattacttctctcagtttttggaggaacatggtcccttggacatgagtaacaagatgttctctgcagaatatgagtttttcccagaagaaact

SEQ ID NO: 190554 - DNA, 3606 bp, Homo sapiens
  Payload ID: 17640
  Gene Name: tetratricopeptide repeat domain 3
  ENST ID: ENST00000438055
  CDS Start-End: 110-3606
cgccgtcggctgacgtggagggccggaggtggcggcggcggcggcggcggctgctgctgctgctgcccgcgtccgaggctcgcgggcggcgggcccggacttgtgcaccatggacaattttgctgagggagatttcactgtggcggattatgccttgttagaagattgccctcacgtggatgattgtgtctttgctgctgaatttatgagcaatgattatgttcgtgtgactcagctttactgtgatggggtgggtgtgcaatataaagattatatccaaagtgagaggaatttggaatttgacatctgcagtatatggtgtagtaaaccaatttctgtcctgcaagattattgcgatgccattaaaataaacatcttctggccacttctgtttcaacatcaaaacagttccgtaatatcacgattgcatccctgtgtggacgccaacaattcacgtgcttctgagataaatttgaagaaactacaacatcttgagttgatggaagatattgtggatttggcaaagaaagttgctaaaatcttggcaatggaagaagctctgaattggataaaatatgcaggcgatgtaacaattctaactaaattaggatcaattgacaattgttggcctatgttaagtattttctttactgaatacaagtaccacataactaaaattgtaatggaagactgcaatttgcttgaagaacttaaaactcaaagttgtatggattgtatagaggaaggagaactaatgaaaatgaaaggaaatgaagagttttccaaagaaagatttgatatagctattatctattacaccagagccattgaatatagacctgaaaactaccttctttatggtaaccgagctctttgttttcttcgtactggacagtttagaaatgcactcggtgatggaaagagagccactattctgaagaacacttggccaaagggtcattatcgttattgtgatgctctttctatgctgggggaatatgactgggccctgcaagcaaacataaaagctcaaaaactctgtaaaaatgaccctgagggaatcaaggatctaattcagcagcatgtaaagttacaaaaacaaatagaagacctacaaggtcgaacagcaaataaggatccaattaaagccttttatgaaaacagggcctacacacctaggagtttatcagcacctatatttactacttcacttaactttgtggagaaggaaagagatttcagaaaaattaatcacgaaatggccaacggtggtaatcagaatctaaaggtggcggatgaggcgttgaaggtagatgattgtgactgtcatcctgaattttcaccaccatcaagtcagcctccaaaacataaaggaaaacaaaaatctcgaaacaatgaatcagaaaagttcagttctagttcaccattgactttaccagcagatttgaagaacatcttggagaaacagttttctaaatcttccagagctgcacaccaggattttgctaatataatgaaaatgctgagaagcttaattcaagatggctatatggccttattggagcagcgttgccgcagcgctgcacaggcctttacagagttgctgaacggtttagatcctcaaaaaataaagcaattgaacctggccatgattaactatgttttggtcgtctatggacttgccatttctctccttggaataggacagcctgaggaattatctgaagccgaaaaccagtttaagaggattattgaacactaccccagtgagggccttgattgcttggcctactgtggaattggaaaagtatatttgaaaaaaaacagatttctagaagctctcaatcactttgagaaagcaagaaccttgatttatcgtcttcctggagtgttaacttggcccacgagtaatgtgattattgaagagtctcagccacaaaaaataaagatgctgttagagaaatttgttgaagaatgcaagttccctccagtgccagatgccatttgttgctatcagaagtgccatggatattctaagatccagatatacataactgatccagactttaagggttttatacgcatcagctgttgccagtactgtaaaatagaatttcacatgaattgctggaagaagttaaaaactacaacctttaatgataaaattgacaaggattttctacaaggaatatgtcttacccctgactgtgaaggtgtcatttctaagattatcatcttcagcagtggtggtgaagttaaatgtgaatttgaacacaaggtcataaaagaaaaggttcctccaagacctattctgaaacagaaatgttctagcctagagaaactaagactgaaagaagacaaaaaattgaagagaaagatccaaaaaaaagaagcaaaaaagttagcacaagaaagaatggaggaggacttaagagaaagtaatccacccaaaaatgaagagcagaaagaaactgtagacaatgttcagcgttgtcagttccttgatgacagaattctacagtgtataaagcagtatgctgacaagattaaatccggcatacagaatacagccatgcttctcaaagaattgctttcttggaaagttttgagcacagaagactatacaacctgtttttctagcagaaattttctaaatgaagcagtggactatgttattcgccacttgattcaagaaaataacagagtaaagacaagaatatttctgcatgttttgagtgagcttaaagaagtggagcccaaattagccgcctggatccaaaaacttaatagctttggcttagatgccacaggaactttcttttctcgttatggagcatctcttaaactgcttgattttagtatcatgactttcctctggaatgagaaatatggtcacaaactagactctatagaaggaaagcaacttgattatttctctgagccagcatcattgaaggaagcccgttgtttaatatggctgctagaagaacacagagacaagttcccagcattgcatagtgctttagatgaattctttgatataatggacagccgctgtactgtgttaaggaaacaagatagtggtgaagcaccgtttagttcaaccaaggtgaaaaacaaaagcaagaaaaagaagccaaaggattcaaagcctatgttagttgggtctggaacaacttcagtaacttcaaataatgagatcatcacttcaagtgaagaccatagcaatcgaaattcagattctgcaggcccatttgcagtgcctgaccatcttcggcaagatgtagaagaattcgaagctctctatgaccaacacagtaacgaatatgttgtccgcaataagaagctatgggacatgaacccaaaacaaaaatgttcaactctatatgattacttctctcagtttttggaggaacatggtcccttggacatgagtaacaagatgttctctgcagaatatgagtttttcccagaagaaactcgacagatactagaaaaagcaggaggtttaaaaccttttctcttgggatgccctcgttttgttgtgattgacaactgtattgcactgaagaaggttgcatcacggctcaagaaaaaaaggaagaa

SEQ ID NO: 190555 - DNA, 999 bp, Homo sapiens
  Payload ID: 17640
  Gene Name: tetratricopeptide repeat domain 3
  ENST ID: ENST00000428693
  CDS Start-End: 1-952
tgatcctgcagcatatcctgacatggagtctgatatacgttcatgggaattgtttctttctaatgttacaaaagaaattgagaaagcaaaggttcatcccgagttactccctgagtcttcaggcgacgatggccaagggcttgtgacttctgcaagcgacgtgactggaaaccacgcagcacttcacagggatcctagtgtgttctctgctggtgattccccaggggaggctccttctgcgctgttgccagggccaccccctggtcagcctgaagccactcagctgacagggccaaaacgggctggccaggcagctctgtcagaacgaagccctgtggctgatcggaagcagcctgttcctccaggacgtgctgcgcgttcaagccagtctccaaaaaagccgttcaatagtattattgagcacctgtcagtggtattcccatgttacaacagcactgagcttgctggttttattaaaaaagtgcgaagcaaaaacaagaactcactctcaggattgagtattgatgaaattgtccaaagagtgacagaacacattctagatgaacagaaaaagaaaaagccaaacccaggaaaggacaagaggacttatgagcccagctctgccacccccgtgaccaggtcctcccagggctcaccctcggtggttgttgcaccatcacccaaaaccaaggggcagaaagcagaagatgtccctgtgaggattgcactgggtgcaagttcctgtgaaatatgccacgaggtgttcaaatcaaaaaacgtgcgtgtgctcaaatgtgggcacaagtatcacaaagggtgctttaagcagtggcttaaagggcagagcgcttgcccggcctgccagggtcgtgatctcctgacagaagagtcaccttctggaagaggctggcccagtcagaatcaggagctgccttcctgctcttctaggtagtcacacttcactaaagtgtcatccaccagtgtgttgaatccgaagaa

SEQ ID NO: 190556 - DNA, 3771 bp, Homo sapiens
  Payload ID: 17640
  Gene Name: tetratricopeptide repeat domain 3
  ENST ID: ENST00000418766
  CDS Start-End: 235-3771
gccacccgctccctcccgccgtcggctgacgtggagggccggaggtggcggcggcggcggcggcggctgctgctgctgctgcccgcgtccgaggctcgcgggcggcgggcccgggtgagtgcacacccggcgcgctgccgggctcccggatgtgtcaccttgtcccgctgcagccgagatgccgggggagcggggccttccacaccccctccgtgggtgtgtgacttgtgcaccatggacaattttgctgagggagatttcactgtggcggattatgccttgttagaagattgccctcacgtggatgattgtgtctttgctgctgaatttatgagcaatgattatgttcgtgtgactcagctttactgtgatggggtgggtgtgcaatataaagattatatccaaagtgagaggaatttggaatttgacatctgcagtatatggtgtagtaaaccaatttctgtcctgcaagattattgcgatgccattaaaataaacatcttctggccacttctgtttcaacatcaaaacagttccgtaatatcacgattgcatccctgtgtggacgccaacaattcacgtgcttctgagataaatttgaagaaactacaacatcttgagttgatggaagatattgtggatttggcaaagaaagttgctaatgattcattccttattggaggcttattgagaattggttgtaaaatagaaaataaaatcttggcaatggaagaagctctgaattggataaaatatgcaggcgatgtaacaattctaactaaattaggatcaattgacaattgttggcctatgttaagtattttctttactgaatacaagtaccacataactaaaattgtaatggaagactgcaatttgcttgaagaacttaaaactcaaagttgtatggattgtatagaggaaggagaactaatgaaaatgaaaggaaatgaagagttttccaaagaaagatttgatatagctattatctattacaccagagccattgaatatagacctgaaaactaccttctttatggtaaccgagctctttgttttcttcgtactggacagtttagaaatgcactcggtgatggaaagagagccactattctgaagaacacttggccaaagggtcattatcgttattgtgatgctctttctatgctgggggaatatgactgggccctgcaagcaaacataaaagctcaaaaactctgtaaaaatgaccctgagggaatcaaggatctaattcagcagcatgtaaagttacaaaaacaaatagaagacctacaaggtcgaacagcaaataaggatccaattaaagccttttatgaaaacagggcctacacacctaggagtttatcagcacctatatttactacttcacttaactttgtggagaaggaaagagatttcagaaaaattaatcacgaaatggccaacggtggtaatcagaatctaaaggtggcggatgaggcgttgaaggtagatgattgtgactgtcatcctgaattttcaccaccatcaagtcagcctccaaaacataaaggaaaacaaaaatctcgaaacaatgaatcagaaaagttcagttctagttcaccattgactttaccagcagatttgaagaacatcttggagaaacagttttctaaatcttccagagctgcacaccaggattttgctaatataatgaaaatgctgagaagcttaattcaagatggctatatggccttattggagcagcgttgccgcagcgctgcacaggcctttacagagttgctgaacggtttagatcctcaaaaaataaagcaattgaacctggccatgattaactatgttttggtcgtctatggacttgccatttctctccttggaataggacagcctgaggaattatctgaagccgaaaaccagtttaagaggattattgaacactaccccagtgagggccttgattgcttggcctactgtggaattggaaaagtatatttgaaaaaaaacagatttctagaagctctcaatcactttgagaaagcaagaaccttgatttatcgtcttcctggagtgttaacttggcccacgagtaatgtgattattgaagagtctcagccacaaaaaataaagatgctgttagagaaatttgttgaagaatgcaagttccctccagtgccagatgccatttgttgctatcagaagtgccatggatattctaagatccagatatacataactgatccagactttaagggttttatacgcatcagctgttgccagtactgtaaaatagaatttcacatgaattgctggaagaagttaaaaactacaacctttaatgataaaattgacaaggattttctacaaggaatatgtcttacccctgactgtgaaggtgtcatttctaagattatcatcttcagcagtggtggtgaagttaaatgtgaatttgaacacaaggtcataaaagaaaaggttcctccaagacctattctgaaacagaaatgttctagcctagagaaactaagactgaaagaagacaaaaaattgaagagaaagatccaaaaaaaagaagcaaaaaagttagcacaagaaagaatggaggaggacttaagagaaagtaatccacccaaaaatgaagagcagaaagaaactgtagacaatgttcagcgttgtcagttccttgatgacagaattctacagtgtataaagcagtatgctgacaagattaaatccggcatacagaatacagccatgcttctcaaagaattgctttcttggaaagttttgagcacagaagactatacaacctgtttttctagcagaaattttctaaatgaagcagtggactatgttattcgccacttgattcaagaaaataacagagtaaagacaagaatatttctgcatgttttgagtgagcttaaagaagtggagcccaaattagccgcctggatccaaaaacttaatagctttggcttagatgccacaggaactttcttttctcgttatggagcatctcttaaactgcttgattttagtatcatgactttcctctggaatgagaaatatggtcacaaactagactctatagaaggaaagcaacttgattatttctctgagccagcatcattgaaggaagcccgttgtttaatatggctgctagaagaacacagagacaagttcccagcattgcatagtgctttagatgaattctttgatataatggacagccgctgtactgtgttaaggaaacaagatagtggtgaagcaccgtttagttcaaccaaggtgaaaaacaaaagcaagaaaaagaagccaaaggattcaaagcctatgttagttgggtctggaacaacttcagtaacttcaaataatgagatcatcacttcaagtgaagaccatagcaatcgaaattcagattctgcaggcccatttgcagtgcctgaccatcttcggcaagatgtagaagaattcgaagctctctatgaccaacacagtaacgaatatgttgtccgcaataagaagctatgggacatgaacccaaaacaaaaatgttcaactctatatgattacttctctcagtttttggaggaacatggtcccttggacatgagtaacaagatgttctctgcagaatatgagtttttcccagaagaaactcgacagatactagaaaaagcaggaggtttaaaaccttttctcttgggatgccctcgttttgttgtgattgacaactgtattgcactgaagaaggttgcatcacggctcaag

SEQ ID NO: 190557 - DNA, 2451 bp, Homo sapiens
  Payload ID: 17640
  Gene Name: tetratricopeptide repeat domain 3
  ENST ID: ENST00000450533
  CDS Start-End: 110-2451
cgccgtcggctgacgtggagggccggaggtggcggcggcggcggcggcggctgctgctgctgctgcccgcgtccgaggctcgcgggcggcgggcccggacttgtgcaccatggacaattttgctgagggagatttcactgtggcggattatgccttgttagaagattgccctcacgtggatgattgtgtctttgctgctgaatttatgagcaatgattatgttcgtgtgactcagctttactgtgatggggtgggtgtgcaatataaagattatatccaaagtgagaggaatttggaatttgacatctgcagtatatggtgtagtaaaccaatttctgtcctgcaagattattgcgatgccattaaaataaacatcttctggccacttctgtttcaacatcaaaacagttccgtaatatcacgattgcatccctgtgtggacgccaacaattcacgtgcttctgagataaatttgaagaaactacaacatcttgagttgatggaagatattgtggatttggcaaagaaagttgctaatgattcattccttattggaggcttattgagaattggttgtaaaatagaaaataaaatcttggcaatggaagaagctctgaattggataaaatatgcaggcgatgtaacaattctaactaaattaggatcaattgacaattgttggcctatgttaagtattttctttactgaatacaagtaccacataactaaaattgtaatggaagactgcaatttgcttgaagaacttaaaactcaaagttgtatggattgtatagaggaaggagaactaatgaaaatgaaaggaaatgaagagttttccaaagaaagatttgatatagctattatctattacaccagagccattgaatatagacctgaaaactaccttctttatggtaaccgagctctttgttttcttcgtactggacagtttagaaatgcactcggtgatggaaagagagccactattctgaagaacacttggccaaagggtcattatcgttattgtgatgctctttctatgctgggggaatatgactgggccctgcaagcaaacataaaagctcaaaaactctgtaaaaatgaccctgagggaatcaaggatctaattcagcagcatgtaaagttacaaaaacaaatagaagacctacaaggtcgaacagcaaataaggatccaattaaagccttttatgaaaacagggcctacacacctaggagtttatcagcacctatatttactacttcacttaactttgtggagaaggaaagagatttcagaaaaattaatcacgaaatggccaacggtggtaatcagaatctaaaggtggcggatgaggcgttgaaggtagatgattgtgactgtcatcctgaattttcaccaccatcaagtcagcctccaaaacataaaggaaaacaaaaatctcgaaacaatgaatcagaaaagttcagttctagttcaccattgactttaccagcagatttgaagaacatcttggagaaacagttttctaaatcttccagagctgcacaccaggattttgctaatataatgaaaatgctgagaagcttaattcaagatggctatatggccttattggagcagcgttgccgcagcgctgcacaggcctttacagagttgctgaacggtttagatcctcaaaaaataaagcaattgaacctggccatgattaactatgttttggtcgtctatggacttgccatttctctccttggaataggacagcctgaggaattatctgaagccgaaaaccagtttaagaggattattgaacactaccccagtgagggccttgattgcttggcctactgtggaattggaaaagtatatttgaaaaaaaacagatttctagaagctctcaatcactttgagaaagcaagaaccttgatttatcgtcttcctggagtgttaacttggcccacgagtaatgtgattattgaagagtctcagccacaaaaaataaagatgctgttagagaaatttgttgaagaatgcaagttccctccagtgccagatgccatttgttgctatcagaagtgccatggatattctaagatccagatatacataactgatccagactttaagggttttatacgcatcagctgttgccagtactgtaaaatagaatttcacatgaattgctggaagaagttaaaaactacaacctttaatgataaaattgacaaggattttctacaaggaatatgtcttacccctgactgtgaaggtgtcatttctaagattatcatcttcagcagtggtggtgaagttaaatgtgaatttgaacacaaggtcataaaagaaaaggttcctccaagacctattctgaaacagaaatgttctagcctagagaaactaagactgaaagaagacaaaaaattgaagagaaagatccaaaaaaaagaagcaaa

SEQ ID NO: 190558 - DNA, 831 bp, Homo sapiens
  Payload ID: 17640
  Gene Name: tetratricopeptide repeat domain 3
  ENST ID: ENST00000414818
  CDS Start-End: 1-831
gaaccttgatttatcgtcttcctggagtgttaacttggcccacgagtaatgtgattattgaagagtctcagccacaaaaaataaagatgctgttagagaaatttgttgaagaatgcaagttccctccagtgccagatgccatttgttgctatcagaagtgccatggatattctaagatccagatatacataactgatccagactttaaggattttctacaaggaatatgtcttacccctgactgtgaaggtgtcatttctaagattatcatcttcagcagtggtggtgaagttaaatgtgaatttgaacacaaggtcataaaagaaaaggttcctccaagacctattctgaaacagaaatgttctagcctagagaaactaagactgaaagaagacaaaaaattgaagagaaagatccaaaaaaaagaagcaaaaaagttagcacaagaaagaatggaggaggacttaagagaaagtaatccacccaaaaatgaagagcagaaagaaactgtagacaatgttcagcgttgtcagttccttgatgacagaattctacagtgtataaagcagtatgctgacaagattaaatccggcatacagaatacagccatgcttctcaaagaattgctttcttggaaagttttgagcacagaagactatacaacctgtttttctagcagaaattttctaaatgaagcagtggactatgttattcgccacttgattcaagaaaataacagagtaaagacaagaatatttctgcatgttttgagtgagcttaaagaagtggagcccaaattagccgcctggatccaaaaacttaatagctttg

SEQ ID NO: 190559 - DNA, 2025 bp, Homo sapiens
  Payload ID: 17640
  Gene Name: tetratricopeptide repeat domain 3
  ENST ID: ENST00000540756
  CDS Start-End: 170-2008
gtggagggccggaggtggcggcggcggcggcggcggctgctgctgctgctgcccgcgtccgaggctcgcgggcggcgggcccggaaatgcactcggtgatggaaagagagccactattctgaagaacacttggccaaagggtcattatcgttattgtgatgctctttctatgctgggggaatatgactgggccctgcaagcaaacataaaagctcaaaaactctgtaaaaatgaccctgagggaatcaaggatctaattcagcagcatgtaaagttacaaaaacaaatagaagacctacaaggtcgaacagcaaataaggatccaattaaagccttttatgaaaacagggcctacacacctaggagtttatcagcacctatatttactacttcacttaactttgtggagaaggaaagagatttcagaaaaattaatcacgaaatggccaacggtggtaatcagaatctaaaggtggcggatgaggcgttgaaggtagatgattgtgactgtcatcctgaattttcaccaccatcaagtcagcctccaaaacataaaggaaaacaaaaatctcgaaacaatgaatcagaaaagttcagttctagttcaccattgactttaccagcagatttgaagaacatcttggagaaacagttttctaaatcttccagagctgcacaccaggattttgctaatataatgaaaatgctgagaagcttaattcaagatggctatatggccttattggagcagcgttgccgcagcgctgcacaggcctttacagagttgctgaacggtttagatcctcaaaaaataaagcaattgaacctggccatgattaactatgttttggtcgtctatggacttgccatttctctccttggaataggacagcctgaggaattatctgaagccgaaaaccagtttaagaggattattgaacactaccccagtgagggccttgattgcttggcctactgtggaattggaaaagtatatttgaaaaaaaacagatttctagaagctctcaatcactttgagaaagcaagaaccttgatttatcgtcttcctggagtgttaacttggcccacgagtaatgtgattattgaagagtctcagccacaaaaaataaagatgctgttagagaaatttgttgaagaatgcaagttccctccagtgccagatgccatttgttgctatcagaagtgccatggatattctaagatccagatatacataactgatccagactttaagggttttatacgcatcagctgttgccagtactgtaaaatagaatttcacatgaattgctggaagaagttaaaaactacaacctttaatgataaaattgacaaggattttctacaaggaatatgtcttacccctgactgtgaaggtgtcatttctaagattatcatcttcagcagtggtggtgaagttaaatgtgaatttgaacacaaggtcataaaagaaaaggttcctccaagacctattctgaaacagaaatgttctagcctagagaaactaagactgaaagaagacaaaaaattgaagagaaagatccaaaaaaaagaagcaaaaaagttagcacaagaaagaatggaggaggacttaagagaaagtaatccacccaaaaatgaagagcagaaagaaactgtagacaatgttcagcgttgtcagttccttgatgacagaattctacagtgtataaagcagtatgctgacaagattaaatccggcatacagaatacagccatgcttctcaaagaattgctttcttggaaagttttgagcacagaagactatacaacctgtttttctagcagaaattttctaaatgaagcagtggactatgttattcgccacttgattcaagaaaataacagagtaaagacaagaatatttctgcatgttttgagtgagcttaaagaagtggagcccaaattagccgcctggatccaaaaacttaatagctttggtatgtccctttatattccagagcaataaactttaatacgaagggg

SEQ ID NO: 190560 - DNA, 5975 bp, Homo sapiens
  Payload ID: 17641
  Gene Name: tetratricopeptide repeat domain 30A
  Uniprot ID: Q86WT1
  ENST ID: ENST00000355689
  CDS Start-End: 266-2263
gcggcgccacaggaacgatgcatgccgggaccgggaagattcagtctctgaacggcccggagtagtcgtctttccccttctgactgccgccacgctgcagtccagaatatttgaagatcaaaccgaacttgagagactaacgagaacggtccctttttattcctaacagattccttccgtggcaaagtaacccgtcgtcttccgtttccggttgcccggttgccctgttgccgtggtaaccgcacgcataacagccgtggtggttatggctggtctgagcggcgcgcagatccccgacggggagtttaccgcgctagtgtaccggctcatccgcgatgcccgctacgccgaggcggtgcagctgctgggccgagaactgcagcggagccccaggagccgtgccggcctgtcgctgctaggctactgctactaccgcctgcaggagttcgcgctggcggccgagtgctatgagcagctgggccagctgcacccggaactggagcagtaccgcctgtaccaggcccaggccctgtacaaggcctgcctttatccggaggccactcgggtcgccttccttctcctggataaccccgcctaccacagccgggtcctccgcctgcaagctgccatcaagtatagcgagggcgatctgccagggtccaggagcctggtggagcagctgctgagtggggaagggggagaagaaagtggaggcgacaatgagaccgatggccaggtcaacctgggttgtttgctctacaaggagggacagtatgaagctgcatgctccaagttttctgccacactgcaggcctcgggctaccagcctgacctttcctacaacctggctttggcctattacagcagccgacagtatgcctcagcactgaagcatatcgctgagattattgagcgtggcatccgccagcatcctgagctaggtgtgggcatgaccaccgagggctttgatgttcgcagtgttggcaacaccttagttctccatcagactgctctggtggaagccttcaaccttaaggcagccatagaataccaactgagaaactatgaggtagctcaagaaaccctcaccgacatgccacccagggcagaggaagagttggaccctgtgaccctgcacaaccaggcactaatgaacatggatgccaggcctacagaagggtttgaaaagctacagtttttgctccaacagaatccctttcctccagagacttttggcaacctgttgctgctctactgtaaatatgagtattttgacctggcagcagatgtcctggcagaaaatgcccatttgacgtataagttcctcacaccctatctctatgacttcttagatgccctgatcacttgccagacagctcctgaagaggctttcattaagcttgatgggctagcagggatgctgactgagcagcttcggagactcaccaagcaagtacaggaagcaagacacaacagagatgatgaagctatcaaaaaggcagtgaatgaatatgatgaaaccatggagaaatacattcctgtgttgatggctcaggcaaaaatctactggaatcttgaaaattatccaatggtggaaaaggtcttccgcaaatctgtggaattctgtaacgaccatgatgtgtggaagttgaatgtggctcatgttctgttcatgcaggaaaacaaatacaaagaagccattggtttctatgaacccatagtcaagaagcattatgataacatcctgaatgtcagtgctattgtactggctaatctctgtgtttcctatattatgacaagtcaaaatgaagaagcagaggagttgatgaggaagattgaaaaggaggaagagcagctctcttatgatgacccaaatcggaaaatgtaccatctctgcattgtgaatttggtgataggaactctttattgtgccaaaggaaactatgagtttggtatttctcgagttatcaaaagcttggagccttataataaaaagctgggaacagatacctggtattatgccaaaagatgcttcctgtccttgttagaaaacatgtcaaaacacatgatagtcattcatgacagtgttattcaagaatgtgtccagtttttaggacactgtgaactttatggcacaaacatacctgctgttattgaacaacccctcgaagaagaaagaatgcatgttgggaagaatacagtcacagatgagtccagacaattgaaagctttgatttatgagattataggatggaataagtagttatgactgatagtggcttttttcaaaatggctttcttacgtaccacacttttttttatctgtatttagccttggcatctttatatttgtcttattttgaatcttatccactttgtaagaacaagtttatgtttgagcaactttttcatttaatccagaagggtagggactatgcagtgtaagctgcatcacttctgctttcttcctactagtgacaatcatctggtcttgccctcaagcaacaattgctagagtaacatctttgtataagcaagtaaccccagatagagttgacgtttcagctttgggctgtcaaaagggtatgtcatggaccaaagcactgttagtacgggtatgtttgcatttggtcactgatatgtaaatgactgctagcccacggctggaccacttctcaatcagcaaataaagccatgtctattttgctatctcagcatagactatgctgtctgataaatctaattcttaactctatttctccagttttttagtcctttaactttctggattgcaacgaagtctagtttagacctctaagcccttttagaagtacaagtataatgggaatttcttttcttggttcttttcaggttatgaggtttggtcagtgacaaaattttttttcataatttggttgattggttgcttcttaagttttataataaacgtttttcttcatgttctatttttgattttacagaaatgattttgcctccttgtggatactgacatatattaagtgtggaagcttattaatatttttggttttttaaaaactgaaatttttaatttttactttttaattttttaggaaaaaataagcactgaactgagaatgagaagaataaaagtatgagttccataccttctaattttaggctgtcagaaattcctttattctttgggatttcacaatcatttgaactatcagaagcctttacaattacttttagctgtaacatccgattctgtataagccacatagaaaaaagttgcctttctttttttatgacctggatatataagcaaatcagctaggaaatatataattgtattttatattaatgttttctaggattttggcttacagtaaatgttaacccctatggtaagtgattgttattgttggatgttatactgattattaataagaaatttggatttttgcctttttacctggaatttttgcttacagccgtagctatgaatatatatagggtggtccccagtctctgttatggttgcgcataaattaataattttataagtatttagaaatggtataattctcttaacttcctctttcagtttttgtactaatgtttgtttttgttcgggaagaggagatttgcttttaatccttccaaaaaatgatgaaccaccgttccattcagtagtttgacaagctgttataatgtgtattttttcctcaattattcttgaaatatttagagcctctcctgcttctaacatgaaggcctttagatgccagtctgccagaaatctggaaacagaggaaccggtgaagtgaagatgtaatggagatttagctaatgatgtacttcacaatccaccttggatctcctgcatgtccaaatctcagtagttaatcaagtgtctgctgccattaacagaacagaagtaatggataacagaatggaaataagagatgccagaactacttccataactaactcaccaaatcaaatcatcagtcctcatattcttgttttatttaatacaaggagaagaggccatgcactttccaaaaggtcaaagccacatagaataggaaggcaatctctagtttaaagctttctcttggagtgttttctccccctgtcttcaaagggtctacttgagagatagtggtgtttactgctgcagcatgtatcacaagataagaaatgaaaaatcaatctttcttaccaccctgttctctttcccttttttatcttttcccttttgtcaattatagaattatagggacatttttctctgatagctggaagttgaacctcaaccaggtataaaagatgcataacaaccttttagcagtaagtgtcaagtgagtgagcactatgattatcaaggtgactttggaaaccttttaaaaatgcatttttgcaaaacaagataacatatattgataaaaagtgactctcagattggtaatgccagaaaaaattttaagaggactcaccaaaagtactagatctatgtaagttgtagaatagagtgaagtttttttatatatttgtggtagcctccatcttttaaactttttgaactcagtagaaaaacagactgaaattttaaagacatgcagtatttgtatcattttaaattctgtaacactgggaattaaatatactcaactttagaggacacttgccttactgtaatctataatcattttatattgaaaaatagggccagacattagccaaacggtaattaatttactagccataggtatagtgtttaatattctcttggggagtgagtctttactaagtgattactctatacttgataccactattaattgaggttcttttggttgtttaattaaatcagctcctttggatttgggccaagattgatccaccacatactgaaatccgttctacaacatcataatgtgtatttactagaaaaggacttgcttcataaggaaaaattattagaatatagagacttataagtacatttctagtgtgaaaaataagcatttgttagtttaagtgagacctgccaataacttgattgcaaatattaatatcatgtgaacatataaaatgggcccaaatccttgttcaaaagtgaaatttgcacgtttgtgaaataaaacacatcaatatcaatgactgaataccttaattcaaaacagcaaatggctaaaattatactatgcaagcaggaccctagtaagttatgtgggaaagcatttattgctgctaatattttattttcaattatttcattaggagagtcaaatgcttaagatagaggacacatgactaaaagtttcaccagcactcatggcatctgctataaaacatgtgtccacagagtacccacaaactctcaagatcttaagtctcaacagtaaattactggttagtttttctaatcagagtctcaacgtcttagtcccaattcttccaaattttccaaaaccatacactatagtgtatatggaaaggagaatatgtacttttgtgaatataaagtgtctgttccatttttagtcatgaagtaccataggaagagatggtcacaccctaacattgtaaagcaaaagaaagcttcaggaatcagaccataacagcaacactttgctgaaaaatatttaattagaaggcaataccacatactcacatatgctaaggagtgcaattattttgtatgtttactggaaaaggcaaaaaatttttctgtagttaaaacaatatttttgtttctagaacttttgttcttgtactgattcattaccattaaactgttttcacaaaatgccaaagaacagaggagagctatacatgatttgaccaagacgctgcaagtagtttcagaaactgaggagactatttttctgacaatgtatataagatctataatgaaatgattggtaaaattataaaatggttctggaaataatcatgtaaaatataaaatgggaaattgtaaa

SEQ ID NO: 190561 - DNA, 4017 bp, Homo sapiens
  Payload ID: 17642
  Gene Name: tetratricopeptide repeat domain 30B
  Uniprot ID: Q8N4P2
  ENST ID: ENST00000408939
  CDS Start-End: 252-2249
gcggaaccactggaacggtgcatgccgggacgagtagattcagtctctgaacggcccggagtagtctttcccctcctgaatgccgccactccgcagtccagagtatttgaagatcaagctgaaattgagagactgacgagagtggtccctttttgttcctaacagatttcttgcgacaaggaaaccggcagtcttccgcttccggttgctctgttgccatagtaaccgcacccataacagccgtggtggttatggctggcctgagcggcgcgcagatccccgacggggagttcaccgcggtcgtgtaccgcctcatccgcaatgcacgctacgccgaggcggtgcagctgctgggcggagaactgcagcggagccctaggagccgcgccggcctgtcgctgctaggctactgctactaccgcctgcaggagttcgcgctggcggccgagtgctatgagcagctgggccagctgcacccggaactggagcagtaccgcctgtaccaggcccaggccctgtacaaggcctgcctttatgcggaggccacccgggtcgccttccttctcctggataaccccgcctaccacagccgggtcctccgcctgcaagctgctatcaagtacagcgagggcgatctgccagggtccaggagcctggtagagcagctgccgagtagggaagggggagaggaaagtgggggcgagaatgagaccgatggccagatcaacctgggttgtttgctctacaaggagggacagtatgaagctgcatgctccaagttttttgccgccctgcaggcctcgggctaccagcctgacctttcctacaacctggctttggcctattacagcagccgacagtatgcttcagcactgaagcatatcgctgagattattgagcgtggcatccgccagcaccctgagctaggtgtgggcatgaccactgagggcattgatgttcgcagtgttggcaacaccttagtcctccatcagactgctctggtggaagccttcaaccttaaggcagctatagaataccaactgagaaactatgaggcagctcaagaagccctcactgacatgccacccagggcagaggaagagttggaccctgtgaccctacacaaccaggcactaatgaacatggatgccaggcctacagaagggtttgaaaagctacagtttttgctccaacagaatccctttcctccagagacttttggcaacctgttgctgctctactgtaaatatgagtattttgacctggcagcagatgtcctggcagaaaatgcccatttgatttataagttcctcacaccctatctctatgacttcttggacgctgtgatcacttgccagacagctcctgaagaggctttcattaagcttgatgggctagcagggatgctgactgaggtcctccggaaacttaccatacaagtacaggaagcaagacacaatagagatgatgaagctatcaaaaaggcagtgaatgaatatgatgaaaccatggagaaatacattcctgtgttgatggctcaggcaaaaatctactggaatcttgaaaattatccaatggtggaaaagatcttccgcaaatctgtggaattctgtaacgaccatgatgtgtggaagttgaatgtggctcatgttctgttcatgcaggaaaacaaatacaaagaagccattggtttctatgaacccatagtcaagaagcattatgataacatcctgaatgtcagtgctattgtactggctaatctctgtgtttcctatattatgacaagtcaaaatgaagaagcagaggagttgatgaggaagattgaaaaggaggaagagcagctctcttatgatgacccagataagaaaatgtaccatctctgcattgtgaatttggtgataggaactctttattgtgccaaaggaaattatgactttggtatttctcgagttatcaaaagcttggaaccttacaacaaaaagctgggaacagacacctggtattatgccaaaagatgcttcctgtccttgttagaaaacatgtcaaaacacacaatcatgcttcgtgatagtgttattcaagaatgtgtccagtttctagaacactgtgaacttcatggcagaaacatacctgctgttattgaacaacccctggaagaagaaagaatgcatgttggaaagaatacagtcacatatgagtctaggcagttaaaagctttgatttatgagattataggatggaatatatagtaatagctgatagtggcatttatcaaatggctttgttatgtaaatttgcatcgctttatttaccctttggcatctttatatttgttacatgttgaactttgtacacttatgcattataaaaaaaaaagtagctaaaacttttgctgttaaatttcccagaaagtgacatattctaagaacttttaccccaggagttatgaaaaattccaaacttatgaggaatgtttatatcagaagttgtaatacgtttgtttcctttcctctgttatcttttgtgctttgacgtatcttgaggggtctttgcacaaggattacatcattcagggaccaagcactatctcagtaatagttaagagtagtctttaaataatcatttcagggattgtgtgagagtagtctcacaatttacactcattaatttgtaatgcatactttttatatagactttaggatattttggcagtgtttattcatatggatataattctttacctaaccaaaattccttaggttataagtggttttaacgtgcaaaagtcagtaaaaaattttgttgccttaacaaaattatggtgctataatgtagagacaatgaacgattatcaaagaacaaatttccctggttttcttttgttccctttaataatttaaatatatgaacaagatacactgttactattttccatgataactttttaaatatctctgtgagaaataacagagctatcctgagaactcaggggtttgtttaagagacacaggttttgttatgtttgttgcccaggctagtatccagctcctaggcttaagcatactcccacttcagcttcccaagtagctgggactactggcacaaatcactgggtccagttctcagttcttaattcctacctttgtgtttgcaatttaggatatgctggctgtacagtgtttccatgttgtagcctcttgaataaggaaaaatctcagccaccaggtctgaccaaaaaggtcaattctaagttgtaatgttcatttcatgtccgcaactcccaagagttatttggagttcccactgggaaccacatgcattctgatcaggcattttattttctgaaccttacaagagccttactatttgatttcccactcctcactcctctcttcccacaaaaagtaactgtcaatcctaacttgacctggcttagaaaaatcaagtgtattagactgaatcatatgcagttgttgattttgacagtttttgatgtacaaaactagcagtttctcatagctcaacctagtagctttcttctgaatgatagggaacctctgccataatgagatgattttttccttcaaggaaaaggaaccacttagccacataagtactgataagaaacatgctcagcataattcctctgtagcatgacctcctgagtgctcaaattgtattataccaggaaatttggcttattgtgaagttcaatggttttgaatttatggcattttaaatcttaattatctgagctgctatcatttaccactgatgctttagtctcacatgtggaggacaagcaatgtttagtgacctcttcactgcatcccatagcacattcaatgtctgggaaatgttctttgtttgacaacttctgtactaaaagtgttgctgcagtagctttgtgcccctgtcagtcttggtagccccttaagatttggaaagtaaatgaactgaaatcttgttttcaatggccatattaaaattctttttttttttcctgtttcttctaaa

SEQ ID NO: 190562 - DNA, 3235 bp, Homo sapiens
  Payload ID: 17643
  Gene Name: tetratricopeptide repeat domain 31
  Uniprot ID: Q49AM3
  ENST ID: ENST00000233623
  CDS Start-End: 8-1567
agatgcgatggcgccgattccaaagactgtggggcggatcaagctagactgctctctacggcccagctgcccactggaggtcgctgctgcacccaaactttgcaaggaattcggtccagaggattacggcgaagaggacatagtggattttcttcgacggcttgtggagagtgatccccagggcctgcaccggatccatgtggatgggagcagcgggcggctgcagctgtggcaccatgattacctcctgggccacttggatgatgaagggaaatcaactggacagagtgacaggggcaagggggctgagggactgggcacctactgtggtctccgcaagtccttcctgtatcctccccaagagtctgagccctgccctcaaagcccctctgcctctgccaccttccccagtgtctcagacagcctgcttcaggtggccatgccccagaagctcctggtgacagaagaggaagccaatcgcctggctgaggagctggtggctgaggaggagcgcatgaaacagaaagcagagaaaaagcgactcaagaagaagcgtcaaaaggaacggaagcgacaggagcgtttggagcagtactgtggggagcccaaggccagcactacctcagatggagatgagagccccccatccagccctggaaacccagttcagggacagtgtggtgaagaagaggactcactggatctatctagcacttttgtgtctctggctttgcgcaaggttggggattggcccctcagtgcccgcagagagaagggactgaaccaggagccccaaggcaggggtctggccctccagaagatgggtcaagaggaagagagccctccaagagaggagaggccccagcagagtccaaaggtacaggcatctccgggactgctggcagctgccttacaacagagccaggaactggcaaagttgggtaccagctttgctcaaaatggtttctaccatgaggccgtggtcctcttcacccaggccttgaagctcaacccccaggaccaccggttatttggaaatcgttccttctgccatgagcggttgggtcagccagcgtgggccctggctgatgcccaggtggcccttaccctacggcctggctggccccggggcctcttccgcctgggcaaggccttgatgggactacagcgcttcagagaggcagctgctgtgtttcaggaaactctgagaggtgggtcccagcctgacgcagcccgagagctccgctcttgccttctccacctcacactgcagggtcagcgaggaggaatctgtgcaccacctctgtcacctggggccctccagccacttccccatgctgagctggcaccctcaggcctaccttccctcaggtgccctcgaagcactgctttgaggtcccctggcctgtctccactcttgcattatccttcatgtcaccgaagccaccccaaccagcccctctcccagactcagagtagaaggccccatcctctcaagccccaggacccttcaaagggctgggacatcctgggacttgggctccagcatctgtctcaggccagatgagggggcaccggtccctcatagggcagggccatgtatatatcccttggtgggggacatagtgtggtgacagttcactgcatattttgagaccttattctctagatccatagttaatgatgccctggcagtcattcctcttgccatggggaagcttctgatgagagaaaggagccccacatccactgaaacatcctttggttctcaagcttcttctggaggcagtaaggaaaaataaaacccaccaaggctcaagaagggaactatagaaaagttcaggtttttaggctatagcagagacagtgagaaagcatctgggcctttctcttcctcttggtccaggggacctcattcaccaactagagcttggtgtacaggaacggggtcacagtgctgagggggcttgagtcccacctttcagcttgatggatgctcacctcttctcagccccagctcgtgccctgtttttctagccatagcccccagattactcacagctcctcatgccatttcctgtccagattgctatgtatgactctgacctctcttgtccagtggtctggtgctcacctcctctcactgctagaatattcaccaagggtttgcatttgggaagtcccttaccagctcctgcttagagctggtagggccatacatgtccacactcccaactggtggctctcccgctgaatggggcctcagcaggtgcccaagctgctacaaccttggccactctgtttctccaccccagcactgggcatggtaattagcctttccccatgttaatttattcagttttttcaagggtcaactgaattccccacttcctgggtaagaagcatgatctccttttaatttcacgtctaagatcctggcagcttcccctagctggttcctctgtagtcctgctgggactgtcagctcatttaaatgtgggtctgcagaaggctttaggtctcccccaacccccttacctttcacagaggaacctttcatcaggataaatgattattgctgccctgtgggtcttgctcaatactgttcatacctggagagagaaggtattgaaacatctcctttatgtgtgactttcccaaatttttaaaaattgtttatggtttaggccccttaaatactgtgtagcaggatgaagtctaccattaccagctgggtcaccttggatgggtctgtcaacatctaagcctcagttccctcacctgtaaaaatgagggtagtccctacctcataagggatattgtgaggatggaaagcgaaagtgtgagaaaatacctcccaagtgcctggtacatagtgggtgctaaataaaccactttttgtctgcaactgtcctacatagtcatgcttcccacaataggaagagaggagtgtgggtgaattggtgctgaaattcacaaaatccagagttctgggactggattctcaaagtgtgctttctaggctagcagcatcagcatcatccaggaacttactagaaatgcaatttctcaggctgggcacggtggctcacgcctgtaatctcagcactttgggaggccaagatgggtggatcacctgaggtcaggagtttgagaccagcctgaccaacatggagaaacgcctcctctgctaaaaatacaaaattagccaggtgtggtgtcacatgcctgtaat

SEQ ID NO: 190563 - DNA, 3358 bp, Homo sapiens
  Payload ID: 17643
  Gene Name: tetratricopeptide repeat domain 31
  ENST ID: ENST00000410003
  CDS Start-End: 10-1032
gtagatgcgatggcgccgattccaaagactgtggggcggatcaagctagactgctctctacggcccagctgcccactggaggtcgctgctgcacccaaactttgcaaggaattcggtccagaggattacggcgaagaggacatagtggattttcttcgacggcttgtggagagtgatccccagggcctgcaccggatccatgtggatgggagcagcgggcggctgcagctgtggcaccatgattacctcctgggccacttggatgatgaagggaaatcaactggacagagtgacaggggcaagggggctgagggactgggcacctactgtggtctccgcaagtccttcctgtatcctccccaagagtctgagccctgccctcaaagcccctctgcctctgccaccttccccagtgtctcagacagcctgcttcaggtggccatgccccagaagctcctggtgacagaagaggaagccaatcgcctggctgaggagctggtggctgaggaggagcgcatgaaacagaaagcagagaaaaagcgactcaagaagaagcgtcaaaaggaacggaagcgacaggagcgtttggagcagtactgtggggagcccaaggccagcactacctcagatggagatgagagccccccatccagccctggaaacccagttcagggacagtgtggtgaagaagaggactcactggatctatctagcacttttgtgtctctggctttgcgcaaggttggggattggcccctcagtgcccgcagagagaagggactgaaccaggagccccaaggcaggggtctggccctccagaagatgggtcaagaggaagagagccctccaagagaggagaggccccagcagagtccaaaggtacaggcatctccgggactgctggcagctgccttacaacagagccaggaactggcaaagttgggtaccagctttgctcaaaatggtttctaccatgaggccgtggtcctcttcacccaggccttgaagctcaacccccaggaccaccggtaggtgggggcttggccagggcagggcagagtgttgaggactcagacctttggccaccttctgtctttatcaggttatttggaaatcgttccttctgccatgagcggttgggtcagccagcgtgggccctggctgatgcccaggtggcccttaccctacggcctggctggccccggggcctcttccgcctgggcaaggccttgatgggactacaggtaataggtctggggctggaaacaggagagatttgagtgggatggagtggggagagggtctatgttgactttctagataagcttctagtaccaaagtgtcacaatggttgtggtactaggagcaggggccagttttagaaagggtacttttaagcaccttgacacctaatcttttctttctgatccctctgggaccaaagcgcttcagagaggcagctgctgtgtttcaggaaactctgagaggtgggtcccagcctgacgcagcccgagagctccgctcttgccttctccacctcacactggtaagggggccaggcacactgtcatgctgaggcgggtatcagggagaattggctgggactgcaataccaagcctcaggtggctaaggagggggcggggaaggatgggtggaatgagaggcatgggctctcctgcttaaaagaaggatctggtgcccttctctctcccttctcagcagggtcagcgaggaggaatctgtgcaccacctctgtcacctggggccctccagccacttccccatgctgagctggcaccctcaggcctaccttccctcaggtgccctcgaagcactgctttgaggtcccctggcctgtctccactcttgcattatccttcatgtcaccgaagccaccccaaccagcccctctcccagactcagagtagaaggccccatcctctcaagccccaggacccttcaaagggctgggacatcctgggacttgggctccagcatctgtctcaggccagatgagggggcaccggtccctcatagggcagggccatgtatatatcccttggtgggggacatagtgtggtgacagttcactgcatattttgagaccttattctctagatccatagttaatgatgccctggcagtcattcctcttgccatggggaagcttctgatgagagaaaggagccccacatccactgaaacatcctttggttctcaagcttcttctggaggcagtaaggaaaaataaaacccaccaaggctcaagaagggaactatagaaaagttcaggtttttaggctatagcagagacagtgagaaagcatctgggcctttctcttcctcttggtccaggggacctcattcaccaactagagcttggtgtacaggaacggggtcacagtgctgagggggcttgagtcccacctttcagcttgatggatgctcacctcttctcagccccagctcgtgccctgtttttctagccatagcccccagattactcacagctcctcatgccatttcctgtccagattgctatgtatgactctgacctctcttgtccagtggtctggtgctcacctcctctcactgctagaatattcaccaagggtttgcatttgggaagtcccttaccagctcctgcttagagctggtagggccatacatgtccacactcccaactggtggctctcccgctgaatggggcctcagcaggtgcccaagctgctacaaccttggccactctgtttctccaccccagcactgggcatggtaattagcctttccccatgttaatttattcagttttttcaagggtcaactgaattccccacttcctgggtaagaagcatgatctccttttaatttcacgtctaagatcctggcagcttcccctagctggttcctctgtagtcctgctgggactgtcagctcatttaaatgtgggtctgcagaaggctttaggtctcccccaacccccttacctttcacagaggaacctttcatcaggataaatgattattgctgccctgtgggtcttgctcaatactgttcatacctggagagagaaggtattgaaacatctcctttatgtgtgactttcccaaatttttaaaaattgtttatggtttaggccccttaaatactgtgtagcaggatgaagtctaccattaccagctgggtcaccttggatgggtctgtcaacatctaagcctcagttccctcacctgtaaaaatgagggtagtccctacctcataagggatattgtgaggatggaaagcgaaagtgtgagaaaatacctcccaagtgcctggtacatagtgggtgctaaataaaccactttttgtctgcaa

SEQ ID NO: 190564 - DNA, 833 bp, Homo sapiens
  Payload ID: 17643
  Gene Name: tetratricopeptide repeat domain 31
  ENST ID: ENST00000414247
  CDS Start-End: 1-740
aaggcaggggtctggccctccagaagatgggtcaagaggaagagagccctccaagagaggagaggccccagcagagtccaaaggtacaggcatctccgggactgctggcagctgccttacaacagagccaggaactggcaaagttgggtaccagctttgctcaaaatggtttctaccatgaggccgtggtcctcttcacccaggccttgaagctcaacccccaggaccaccggttatttggaaatcgttccttctgccatgagcggttgggtcagccagcgtgggccctggctgatgcccaggtggcccttaccctacggcctggctggccccggggcctcttccgcctgggcaaggccttgatgggactacaggaaactctgagaggtgggtcccagcctgacgcagcccgagagctccgctcttgccttctccacctcacactgggtcagcgaggaggaatctgtgcaccacctctgtcacctggggccctccagccacttccccatgctgagctggcaccctcaggcctaccttccctcaggtgccctcgaagcactgctttgaggtcccctggcctgtctccactcttgcattatccttcatgtcaccgaagccaccccaaccagcccctctcccagactcagagtagaaggccccatcctctcaagccccaggacccttcaaagggctgggacatcctgggacttgggctccagcatctgtctcaggccagatgagggggcaccggtccctcatagggcagggccatgtatatatcccttggtgggggacatagtgtggtgacagttcactgcatattttgagacctt

SEQ ID NO: 190565 - DNA, 2806 bp, Homo sapiens
  Payload ID: 17643
  Gene Name: tetratricopeptide repeat domain 31
  ENST ID: ENST00000424122
  CDS Start-End: 15-365
tcactgtagatgcgatggcgccgattccaaagactgtggggcggatcaagctagactgctctctacggcccagctgcccactggaggtcgctgctgcacccaaactttgcaaggaattcggtccagaggattacggcgaagagattacctcctgggccacttggatgatgaagggaaatcaactggacagagtgacaggggcaagggggctgagggactgggcacctactgtggtctccgcaagtccttcctgtatcctccccaagagtctgagccctgccctcaaagcccctctgcctctgccaccttccccagtgtctcagacagcctgcttcaggtggccatgccccagaagctcctggtgacagaagaggaagccaatcgcctggctgaggagctggtggctgaggaggagcgcatgaaacagaaagcagagaaaaagcgactcaagaagaagcgtcaaaaggaacggaagcgacaggagcgtttggagcagtactgtggggagcccaaggccagcactacctcagatggagatgagagccccccatccagccctggaaacccagttcagggacagtgtggtgaagaagaggactcactggatctatctagcacttttgtgtctctggctttgcgcaaggttggggattggcccctcagtgcccgcagagagaagggactgaaccaggagccccaaggcaggggtctggccctccagaagatgggtcaagaggaagagagccctccaagagaggagaggccccagcagagtccaaaggcatctccgggactgctggcagctgccttacaacagagccaggaactggcaaagttgggtaccagctttgctcaaaatggtttctaccatgaggccgtggtcctcttcacccaggccttgaagctcaacccccaggaccaccggttatttggaaatcgttccttctgccatgagcggttgggtcagccagcgtgggccctggctgatgcccaggtggcccttaccctacggcctggctggccccggggcctcttccgcctgggcaaggccttgatgggactacagcgcttcagagaggcagctgctgtgtttcaggaaactctgagaggtgggtcccagcctgacgcagcccgagagctccgctcttgccttctccacctcacactgcagggtcagcgaggaggaatctgtgcaccacctctgtcacctggggccctccagccacttccccatgctgagctggcaccctcaggcctaccttccctcaggtgccctcgaagcactgctttgaggtcccctggcctgtctccactcttgcattatccttcatgtcaccgaagccaccccaaccagcccctctcccagactcagagtagaaggccccatcctctcaagccccaggacccttcaaagggctgggacatcctgggacttgggctccagcatctgtctcaggccagatgagggggcaccggtccctcatagggcagggccatgtatatatcccttggtgggggacatagtgtggtgacagttcactgcatattttgagaccttattctctagatccatagttaatgatgccctggcagtcattcctcttgccatggggaagcttctgatgagagaaaggagccccacatccactgaaacatcctttggttctcaagcttcttctggaggcagtaaggaaaaataaaacccaccaaggctcaagaagggaactatagaaaagttcaggtttttaggctatagcagagacagtgagaaagcatctgggcctttctcttcctcttggtccaggggacctcattcaccaactagagcttggtgtacaggaacggggtcacagtgctgagggggcttgagtcccacctttcagcttgatggatgctcacctcttctcagccccagctcgtgccctgtttttctagccatagcccccagattactcacagctcctcatgccatttcctgtccagattgctatgtatgactctgacctctcttgtccagtggtctggtgctcacctcctctcactgctagaatattcaccaagggtttgcatttgggaagtcccttaccagctcctgcttagagctggtagggccatacatgtccacactcccaactggtggctctcccgctgaatggggcctcagcaggtgcccaagctgctacaaccttggccactctgtttctccaccccagcactgggcatggtaattagcctttccccatgttaatttattcagttttttcaagggtcaactgaattccccacttcctgggtaagaagcatgatctccttttaatttcacgtctaagatcctggcagcttcccctagctggttcctctgtagtcctgctgggactgtcagctcatttaaatgtgggtctgcagaaggctttaggtctcccccaacccccttacctttcacagaggaacctttcatcaggataaatgattattgctgccctgtgggtcttgctcaatactgttcatacctggagagagaaggtattgaaacatctcctttatgtgtgactttcccaaatttttaaaaattgtttatggtttaggccccttaaatactgtgtagcaggatgaagtctaccattaccagctgggtcaccttggatgggtctgtcaacatctaagcctcagttccctcacctgtaaaaatgagggtagtccctacctcataagggatattgtgaggatggaaagcgaaagtgtgagaaaatacctcccaagtgcctggtacatagtgggtgctaaataaaccactttttgtctgcaa

SEQ ID NO: 190566 - DNA, 2161 bp, Homo sapiens
  Payload ID: 17643
  Gene Name: tetratricopeptide repeat domain 31
  ENST ID: ENST00000449459
  CDS Start-End: 10-360
gtagatgcgatggcgccgattccaaagactgtggggcggatcaagctagactgctctctacggcccagctgcccactggaggtcgctgctgcacccaaactttgcaaggaattcggtccagaggattacggcgaagagattacctcctgggccacttggatgatgaagggaaatcaactggacagagtgacaggggcaagggggctgagggactgggcacctactgtggtctccgcaagtccttcctgtatcctccccaagagtctgagccctgccctcaaagcccctctgcctctgccaccttccccagtgtctcagacagcctgcttcaggtggccatgccccagaagctcctggtgacagaagaggaagccaatcgcctggctgaggagctggtggctgaggaggagcgcatgaaacagaaagcagagaaaaagcgactcaagaagaaggtggctagagcatggctggagggtgcaggggagccaaagggatttgggagagggaaagaggaaactttgtgggaacaggagagagctcaagatggcctgcagtggactctcttgccaggaggacacaaggggcccagggactggggggtctctcacaggccatctggtgcagtggttctggaatcctactgtgctgcctaggtaggaatctgcctccttacatgaggcctcttgctggtgcctctcttgtctgctttttcacctgcaaaatgaggataataatgatgcctgtctcatagagctgcaaagatggaatgcgaaatcttagcccagcacacgacatacagtaagtgttcaaaatacatcattgttaccattactattgcagcgtcaaaaggaacggaagcgacaggagcgtttggagcagtactgtggggagcccaaggccagcactacctcagatggagatgagagccccccatccagccctggaaacccagttcagggacagtgtggtgaagaagaggactcactggatctatctagcacttttgtgtctctggctttgcgcaaggttggggattggcccctcagtgcccgcagagagaagggactgaaccaggagccccaaggcaggggtctggccctccagaagatgggtcaagaggaagagagccctccaagagaggagaggccccagcagagtccaaaggcatctccgggactgctggcagctgccttacaacagagccaggaactggcaaagttgggtaccagctttgctcaaaatggtttctaccatgaggccgtggtcctcttcacccaggccttgaagctcaacccccaggaccaccggtaggtgggggcttggccagggcagggcagagtgttgaggactcagacctttggccaccttctgtctttatcaggttatttggaaatcgttccttctgccatgagcggttgggtcagccagcgtgggccctggctgatgcccaggtggcccttaccctacggcctggctggccccggggcctcttccgcctgggcaaggccttgatgggactacaggtaataggtctggggctggaaacaggagagatttgagtgggatggagtggggagagggtctatgttgactttctagataagcttctagtaccaaagtgtcacaatggttgtggtactaggagcaggggccagttttagaaagggtacttttaagcaccttgacacctaatcttttctttctgatccctctgggaccaaagcgcttcagagaggcagctgctgtgtttcaggaaactctgagaggtgggtcccagcctgacgcagcccgagagctccgctcttgccttctccacctcacactggtaagggggccaggcacactgtcatgctgaggcgggtatcagggagaattggctgggactgcaataccaagcctcaggtggctaaggagggggcggggaaggatgggtggaatgagaggcatgggctctcctgcttaaaagaaggatctggtgcccttctctctcccttctcagcagggtcagcgaggaggaatctgtgcaccacctctgtcacctggggccctccagccacttccccatgctgagctggcaccctcaggcctaccttccctcaggtgccctcgaagcactgctttgaggtcccctggcctgtctccactcttgcattatccttca

SEQ ID NO: 190567 - DNA, 958 bp, Homo sapiens
  Payload ID: 17643
  Gene Name: tetratricopeptide repeat domain 31
  Uniprot ID: Q49AM3
  ENST ID: ENST00000442235
  CDS Start-End: 10-867
gtagatgcgatggcgccgattccaaagactgtggggcggatcaagctagactgctctctacggcccagctgcccactggaggtcgctgctgcacccaaactttgcaaggaattcggtccagaggattacggcgaagaggacatagtggattttcttcgacggcttgtggagagtgatccccagggcctgcaccggatccatgtggatgggagcagcgggcggctgcagctgtggcaccatgattacctcctgggccacttggatgatgaagggaaatcaactggacagagtgacaggggcaagggggctgagggactgggcacctactgtggtctccgcaagtccttcctgtatcctccccaagagtctgagccctgccctcaaagcccctctgcctctgccaccttccccagtgtctcagacagcctgcttcaggtggccatgccccagaagctcctggtgacagaagaggaagccaatcgcctggctgaggagctggtggctgaggaggagcgcatgaaacagaaagcagagaaaaagcgactcaagaagaagcgtcaaaaggaacggaagcgacaggagcgtttggagcagtactgtggggagcccaaggccagcactacctcagatggagatgagagccccccatccagccctggaaacccagttcagggacagtgtggtgaagaagaggactcactggatctatctagcacttttgtgtctctggctttgcgcaaggttggggattggcccctcagtgcccgcagagagaagggactgaaccaggagccccaaggcaggggtctggccctccagaagatgggtcaagaggaagagagccctccagccacttccccatgctgagctggcaccctcaggcctaccttccctcaggtgccctcgaagcactgctttgaggtcccctggcctgtctccactcttgcattatccttca

SEQ ID NO: 190568 - DNA, 822 bp, Homo sapiens
  Payload ID: 17644
  Gene Name: tetratricopeptide repeat domain 32
  Uniprot ID: Q5I0X7
  ENST ID: ENST00000333610
  CDS Start-End: 133-588
ataaggcacaaacctagcgccaaggttggctgtcaaggtagattccagggtgtggaagtggctttgtggtgccacctctaaccgctcggaggtcaacccccattctacaccgaaaactaggccttggctgctatggaaggacagcggcaagaaagccacgcaaccctaacactcgcccaggctcatttcaacaatggagagtacgcggaggccgaggcactgtactccgcttacattcgccggtgcgcttgcgcggcctccagcgacgagagtcccgggagcaaatgcagccctgaggatttggctactgcatataacaacagggggcaaatcaagtacttcagggttgatttttatgaagccatggatgactacacatctgccatagaagtccaacccaattttgaagttccatattacaacagagggttgatactgtataggctgggatattttgatgatgctttggaagatttcaagaaggtcttagacttaaatcctggatttcaagatgctactttgagcttaaaacagactattctagacaaagaagaaaaacaaagaagaaatgttgcaaaaaattattgatatttttaacttaatggaagtattgattcatgatccttacatctgcatctagttatcagtaatttagatattgagctattttgatttatatttaagaaattaatacattagcactgaaagttaaatagtgtgtttaaggtagttaatttcaggttgaatgggttttttttaatgaagtgtaaataataccaatgtataagtgtatattattatattaaatattatagtaaaaag

SEQ ID NO: 190569 - DNA, 735 bp, Homo sapiens
  Payload ID: 17644
  Gene Name: tetratricopeptide repeat domain 32
  ENST ID: ENST00000402414
  CDS Start-End: 103-261
tgtcaaggtagattccagggtgtggaagtggctttgtggtgccacctctaaccgctcggaggtcaacccccattctacaccgaaaactaggccttggctgctatggaaggacagcggcaagaaagccacgcaaccctaacactcgcccaggctcatttcaacaatggagagtacgcggaggccgaggcactgtactccgcttacattcgccggtgcgcttgcgcggcctccagcgacgagagtcccgggaggatattttgatgatgctttggaagatttcaagaaggtcttagacttaaatcctggatttcaagatgctactttgagcttaaaacagactattctagacaaagaagaaaaacaaagaagaaatgttgcaaaaaattattgatatttttaacttaatggaagtattgattcatgatccttacatctgcatctagttatcagtaatttagatattgagctattttgatttatatttaagaaattaatacattagcactgaaagttaaatagtgtgtttaaggtagttaatttcaggttgaatgggttttttttaatgaagtgtaaataataccaatgtataagtgtatattattatattaaatattatagtaaaaaggaatgtgtggtattttcttcagcaaaactatttttgtgatttttttattctcaactttttatttaaaaaatgttacatctgcagaaaagttgaaagtataataaactctt

SEQ ID NO: 190570 - DNA, 779 bp, Homo sapiens
  Payload ID: 17644
  Gene Name: tetratricopeptide repeat domain 32
  ENST ID: ENST00000431392
  CDS Start-End: 521-779
ctcctatctttgcctctggagctcacggtcggcgcttgtcataacccagcactaggactgagcgggcggacgttcgtctttctagaaaggcctaggcgaggcctaggacgagggcggcggagaacgcggggagaagcccacccgtgaggagccagctgccgcgacggtgcggagagatttccgggaaccaagccctctgcgcgatcctcgggcgcgggccgccgcctctcaccccgccgtctctccttccacgttcctcattcgcacccagagacttaggacagataggaattttccactcgtgattttagctggcgggaaatccgcgacctgggaagggaaggggtcacggctgcgtagggccacagtaccgcgactcccatctcagtgtcacggcgcaggctcttggtggtgtttttcacttgtgaaaaacgtttaaatatgtggaagagagcataacgaacgtctaggtgtttatcacttggcttaagcattatcagtttacctattgtattcatccatggatgtttcagaaggaaccaccatgtcatcatcacatagttacttaatatcaagtcgtcagtgttggaaccattctgatcgactaataagcaaatgcagccctgaggatttggctactgcatataacaacagggggcaaatcaagtacttcagggttgatttttatgaagccatggatgactacacatctgccatagaagtccaacccaattttgaagttccatattacaacagagggttgatactgtataggctgg

SEQ ID NO: 190571 - DNA, 2612 bp, Homo sapiens
  Payload ID: 17645
  Gene Name: tetratricopeptide repeat domain 33
  Uniprot ID: Q6PID6
  ENST ID: ENST00000337702
  CDS Start-End: 154-942
gcggtgacttctgggatttgtggtcccggagaagagattggcggaggggaaagactgagtcgtctttcctttgcccgcttctgtggactgttcgaacgcccaggggtgggccaaacccgtttcttaggaaaccaggaatccagggaaggcagaatggcttcctttgggtggaagaggaaaattggtgagaaggtctcaaaggtcacttcccagcagtttgaagctgaagctgctgatgagaaggatgtagttgacaacgatgaagggaactggcttcatgccattaaacgtaggaaagaaattcttcttgaaggctgtgctgagaaaagtaaacagctgaaggatgaaggagccagtttggctgaaaataaaagatatcgggaggcaattcagaagtgggatgaagcactacagttaactccaaatgatgctaccctatacgagatgaaatcacaggtgctaatgtctcttcatgaaatgttcccagcagtacatgcagcagaaatggccgtccagcaaaatccacattcatgggagtcttggcagactttgggacgtgctcaacttggtttaggagagataatcctggcaattcgaagttttcaagtagcccttcacatctatccaatgaaccctgaaatatggaaagaagacctctcttgggcaagaacgctccaggagcagcagaaggtagcacagaggattaaaaaaagtgaagcaccagctgaagtaacacacttttcaccaaagtcaattccagactatgactttgaaagtgatgagattgttgctgtttgtgcagctattgctgagaaagagaagacagtttcagcaaataaaacaatggttattgtgtctgcttctggggccatagagactgtaactgaaaaggaggatggtgctacaccaccagatggctctgtttttatcaaagcccgatgaagcagtatgcataggattatttgaatctgtctttttgattgcctcttgaagttttgacatagagacatttactctggagatagataggagaacgcctggttgtaaaatatgtttttcagatgaggcatataaaaactaaaatggcaggattattgtatagtgtttggaatatgctttgataagttatgatttatatttctcaaggttaaaattctgagtaaaatggtctttgattaataaacttagtttaatctgaatatgtaaatgaatacattttaaagacaaaacttgaaaaatgtattcttgaatagtgaataatttgatcaatgttactgaaatgctgtctcaacttttgttttatgataaaggaagtgtgtgatttccctccctctgagaaatatactgcgcttaatatttgctgtctttttcttgcttcattagagtaagtctgtcagaaagcttgaatatttttgacattcattttgattcaaagttgtcatttggttatatgtggaatctttgaaagtttggctgaaaatgcacacaaatgtgtacattctgaacattttctgaagtttctcttaattctgatttgtgtttctgttttgactttgaagttgtaacaatgatagttgtctccttcagtatttggtaaaagtgtaaagtattgataaatatgagaatgatggttttattttttaattgttacagtaagtaatccttaccacaaatgagtcatttttaaaatatgcatttttaaatgaatggcttttacagataggttaatgacaattgtactgctatattatcccagtcaaaaccaatactttcttttctttattttacaaagctttaaaaaccctggaaacaacttacttcttgcttgtgtctttccatttgatgactgggaattacttttctagataactttttttgaaactactcagtgaaatgaaaaataattacaattttaaatagctaattatatctttctaaaaataaaaaagtagggctgttattagagtgccaatgaataaataacttaagcacaaaatacatagaaattggaatgtgatttatagtacaatctcatgagtatgaaaaggctatattaaaaaaaattttattgaaagtccacagtcatattcacaaaccaatactgtcattgctaatctgaactattatttttatactatatattgtagtacaataatatagaactgttgggttctgttacttctgacactcaggaagatactattggtgtattaattttatctttgttagagatgaaagtagcccactttatgttaaagatcttactactgttggagcttataagtaatgatctacattttttatgaagatggtttttaaaacttttgttttattggaatgcatatctcttttcagggttggagaaattagcacttgccttgaaaagaatattctttccttaagttatatcatcagaaaattagctctggttagagaggttagtttcagagtgctccaaaaaatatgttaattattttattttgtttaataaagaacattctcaaaacgtaaataggtatctagagaagtgagtactcaacatttggtatattgttttgagtaatggatgtttgttttttgtgtaatttgtgaataaatagtttttttctgca

SEQ ID NO: 190572 - DNA, 7257 bp, Homo sapiens
  Payload ID: 17646
  Gene Name: tetratricopeptide repeat domain 34
  Uniprot ID: A8MYJ7
  ENST ID: ENST00000401095
  CDS Start-End: 165-1865
ggggactgctgcgggtgctggcgggcagcgcgttcctgggcacgctggactatgtcaccgcctgcaggctgcggcccgaggaggcgctgctggccgccaaggcctacgtgccctggaaccagcgggggctgctgctggtggtgctgcgggaggaggcccgtgggatgctgcagcgatctccacgcgccgggccgtccagagcgcagggccggagggaggccgcagagacgggcggccccaccacgcaggagggggtcgcctgcggcgtgcaccagctggccacactgctgatggagctggattcagaggacgaggcctctcgcctcctggcggctgatgccctgtaccgcctgggccgcctggaggagacccacaaggccctgctggtggccctatcccggaggccccaggcagcccctgtgctggcacgactggccctgctgcagctgaggaggggcttcttctatgacgccaaccagttggtgaagaagctggtccagtctggtgacaccgcctgcctccagcccaccctggacgtcttctgccacgaggaccggcagctgcttcaaggccactgccacgccagggccctggccatcctgcgggcacggccaggcggggccgacggcagggttcacaccaaggaggccatcgcctacctgtctctggccatctttgccgcaggaagccaggcaagtgagtccctccttgcccgagcccgctgctatgggttcctgggccagaagaagacggccatgttcgacttcaacacagtgctgcgggctgagccggggaacgtgcaggcactgtgtggacgggcgttggtgcacctggccctagaccagctgcaggaagccgtggacgacatcgtctctgctctgaagctcggccccgggactgtggtccctgagctccgctctctgaagccggaagcccaggccctcatcacacagggcctctactcccactgccgggcccttctgagccagctgccagacactggggcccctctcgaggacaaggacacccagggcctccttgctgtgggggaggcgctgatcaaaatcgactcagggcaaccgcactggcacctcctcctggcagacattctcatggcacagggcagctacgaggaagctggcacccacctggaaaaagccctgcaccgtgccccaacgtcagaggcagcccgggcccggctgggcctgctccagctcaagaagggagacgtgccaggggctgcaagggacctgcagagcctggccgaggtggatgccccggatctcagctgcctgctgcatctcctggaggcctcggagcggcagagccttgcccaggcggcggcccaggaagccggcaccctcctggacgcagggcaacccaggcaggcgctgggctactgttcgctgtctgtcctggccagtggcagcagtgcctgtcacctgcgtctgcgggccacctgcctggccgagttgcaggagtttggccgggcccttagggacctggaccatgtgctccaggaggcgctgggggatggtgacctcccaaggcgggcagaggacttctgccgtcagggtcgcctgctgctgagcctgggggatgaggcggcggccgcaggggcctttgcccaggccctgaagctggcgccctccttggcccagaacagcctgtgcaggcagccaggccgggcccccactgcacgcatgttccttctccgcgggcagtgctgcctggaggagcagcgtcacgcagaggcctggacggcggtagagagcggcctcctggtggaccccgaccaccgtggcctgaagagactgaaggccagaatccggagggaggcatcctcaggctgctggctacagtgactgggcctgaccctctcccagccctaatcacggggccaccctagcatctgcacctgatgtccaggcccaggggtgtacccagctccctaaatcggggaggtacctgccctgccctctccacacccccttcccagccctccccacacaccccttcccaaccctccccacaaccccccttcccaaccctccccacagccccccttcccaccctccccacacaccccttcccagccctcccccttcccagccctccccacaccaccttcccagccctccccatacctcccttcccagccctccccatacctcccttcccagccctccccacaccccccttccctgccctccccacaccccgcttccctgccccagcatgagtcagtgttggacagccagcctcacacctctgccttgggaaggacaggggacagcttcctacttgcatgaagggaccatcctagaagcttcacagtcccttctaccaccagcaacctggtccctgcagttggggccctcttggcccacacctggggctcagaccttgaagaagcagccccaggtctcgtccctggcctgggatcctacaggttggacaggtttgaggccagactcctggggcccttggggagatggtaccagccccagaagcccctccctgggtgtgaagctgcgttttgcttggaccctgagccttgggccagcctccagtagagcctgagccctctccagagacagagctcccaaatgggcccagccagcccataccccaagctgacctttcagggtgctttcatgggggcccttcatcgagaatccagtgtgctgggggtaaacttcctccctcctccacaggcccctcccttccaagcagagggaccaccgaggggccctgatgagcacagtccccaggctcccaccagacctgtctcccgaagctgctgggaggtatcagtgcttccacagagcgagagaacagcttgttcttatacgtgcgttaaatgtccccaggccttgcagctgccagtgagcttggggacttctgggtggggcagaggcagccagcctttgcccatcactgtgagtgtcacagactgaggcctcagcccggggctttctctcatggccatgggcgagagacatgctgggtgagctgactcggtgcaaaacgtgcccccaagccctgcctgacttcaccctggggagacagggccacgaccccccctcctggcttctctctcctcctgggcacttgcatttgtcccatttctgtccccttctctgccgcttccttccatggtcttgaacccacagatagaccccctgcctctccacccacttcgcttctgggatcatctgacgaaccccagtccagggggtcaggcagggaggggccctattcctcgccctgcatggaagtggggcccccaggcggcaggtgcagggctgggtagcccccctcctcctcaggcctcacccactcctcaacccccatgcaccttcatcagctggcaccgcctatgtgtctctggccacaggggtctgggtaaagggtcagtgcctcccaccttgagtacctcggggatgggcagcccacagtgggagagggccctgacagggaccttcagccccgctcctcgccttccccgctcggaatcttcacgcagtccccctcttccggggttccccagcgcaggcaccaatttgatccatcttccgcctgccagctccccatccacccttccctccctgtcttcacccgtgtgctcaaggactcaacaaacacctgtcagcagcccaagagctaagttcagggacacgcaagttcctcgggtcaggtgggccagtcggcactgaggcagaggaggcaagggctggtccagagagcctggtcacagcagaagggcctgctccaatgtcggggccaggtggaggcagtggggaggcgtcccctaggggtgcccttccccaccacgttccctgctcctaccgtcctcctcgcctgggatgtcctgccccatccatccgtgcaaggctgagtgtagatgccagccccgctgaggctcctcctggacctcaggatcgctgtgtttctcccccaccagggggctgccccctctaccaccagctcacccagcaggtatctctcatcagcctttggcctggctccttgctgggctctgaatgtctgcattcccccaaactttatgtgttgcgatcctaacccccaaggttatggtatcagaagtggggcttttgggagatgaccaggggtggaacctcatgagtgggattagtgtccttataaaagagaccccagagttctcccaagcccctccaccatgtggagacccagtgagaagctgtctgtgaaccaggaagggatcctcactagagagcgagctggcaccttcatcttgggcttccagcctccagaactgtgagaaataagtatctgttgatgaaccacctgtctctgctattctgttggggcagtccagatagacaaagacatgcccgttcccgcggcccaccacctctgccctgagcacagtgggtgagtctcggttccccttatcccatccctgctggggtccagccctggcttttcctgaggtagtttctccaggaccaagcagacacccacaaccagcagcccttaaggcatggacgcactcgtccctgaggcctgggtgtcccgcctggaggggcatgtccacagctgctctgggtcctgacgctccaggagctcacgctgtctgcagatccaccacttccctgggcagtccccggcctgcgtcttcctcagtgctcagctggaggtggagagaaatcaggctgggacggagggtggcccttgctttgcacgattcctgcctcgacgttacaccagggacattccagcatctccccttcattaactgtagaccgccagcaaatccagatttcattcaaccaagtaaactggtagagtcatttccagcagctaatgtgagctagcgcattaaattcagaatctctagtaagtgtacctgcatcaataaagccaagccggtccagctgcattaataccctaccctccattcccacacggttcccaggtctccgtgtgtgaatttgtaacatcttacgagcattttggtgtgaaagtggttccttcctgagtcaggctttgtacttgacccttcccctccctgggagtacactgaggttctagaggcaacagggtggctatggtggttaaataaaatgagcatcatttctaggcacctggccaggtaagcttatcacagcattttcaagcagaacaaaaaaaataaataaaggctactctcagatcttggaggacaagctgcttcccctggaaggagaggctcagagaaccagggggttcacaattctcagcttcatctgagcccaaccagacatccccatgccaagcttcagcatccagttccttcccactcagtgcccacgtttcagtagtgaggctgtgagtgtgagccacacagcagtcacacaactcagagttaaactgtgcatccgagttgtagcagcagcagccccgaggctctcaggaacaagggactcttccatggccatggcagtcctgattctctgtctatgacttaaactgagtttagagacctgaacgtgtggttccttcctgttagtgctgctggacactcaggggaccccccacagccctcgtggttgtggtcatcctcgtggccgtgacagcctcacacagcagcacgtgggttcccgaggccctcaattctgctggtgcctcacagccagcatgggggatggcttggttaactgtgaagctcccccaacaacactgtgggccaacagcctccccttcccactggccaggagatcggcctgcagcccagcccaagcaacaaccacactaacctaatccccggaccccaccttttgatagtgacaggaggcagacaaatcctaggcagacagggacaggttcccagtgaaaccccacctccgagccaaagacagtttaaagcctgaaagccaagctacaaattaaatcctcagcctggattgagaacccatcttcccatttggctgctttcctctgattgatccccacccttcacctattttacatgtacctatcttttcctaattcattttctacactggcatgcccacctttgagtggtacctttgtttaagccttttttgcataatcagaagccaatcagcatgcactcccccattctgagcccataaatgccccggacccagccacactaggagagaaaccacctgacttcaggtcgggaaccacccgtgcatcccctctctgctgagagctgttccgtctctcaataaaattcttctctgcccttctcacacttcgattggcagcatctcctcattcttcttggacacgggacaagaacttgggaactgccatacatgggtacaagctataacacaagcaggctggaacatgcccagcccagccacaggctgagctggtgaacagccaggtgtggcccaggcaggctgagtgggtgggccacctcctgcggcaggtagcatggccaagagaggcctggggagggggggtgtcagcagccagaggtacctggctggcaaagtgaccaaagaggtacctgactgtgtcactttgagggcctgtctctggggaccccctcctagtatgaatttatgtatcagttggggtctacttgggagatggaaaccacaacagtgattctaatagcatgaatttaatgtgcagaatttttcattagttctgggtaaaaacagctctagggaatcatggaggttgcaaccacaaaattcagagaggtgacctggctggcgacactggtgataatggtcacctgccatgcagcctttcagctcaggtgggcacactcctctgcccctgcccacttcctctcccaggtgaatcttgaccacacctgtgcctggcactgtgcacacattctctgttgttcaactctgcgatcaatctggaaaaaaaagaaaaaaaaaaaacctttttaggagagtaaaaggaaaataaatcttggggccccaaaatcactaagccaaagggaaaagtcaagctgggaactgcttagggcaagcctgcctccaattccattcaaagtcattcccccgctcgctgagatagatgcatatctgattgccttctttggaaaggctcatcagaaactcaaaagaatgtaactctatcttacatgtgttgattgatgtctcatatctccctaaaatgtataaaaccaagctgtcctctgaccaccttgggcacatgtcaggacctcctgaggctgtgtcacaggtgtgcatccttaattttggcaaaataaacttcccaaattggctgaga

SEQ ID NO: 190573 - DNA, 1826 bp, Homo sapiens
  Payload ID: 17646
  Gene Name: tetratricopeptide repeat domain 34
  Uniprot ID: A8MYJ7
  ENST ID: ENST00000611612
  CDS Start-End: 125-1825
cacgctggactatgtcaccgcctgcaggctgcggcccgaggaggcgctgctggccgccaaggcctacgtgccctggaaccagcgggggctgctgctggtggtgctgcgggaggaggcccgtgggatgctgcagcgatctccacgcgccgggccgtccagagcgcagggccggagggaggccgcagagacgggcggccccaccacgcaggagggggtcgcctgcggcgtgcaccagctggccacactgctgatggagctggattcagaggacgaggcctctcgcctcctggcggctgatgccctgtaccgcctgggccgcctggaggagacccacaaggccctgctggtggccctatcccggaggccccaggcagcccctgtgctggcacgactggccctgctgcagctgaggaggggcttcttctatgacgccaaccagttggtgaagaagctggtccagtctggtgacaccgcctgcctccagcccaccctggacgtcttctgccacgaggaccggcagctgcttcaaggccactgccacgccagggccctggccatcctgcgggcacggccaggcggggccgacggcagggttcacaccaaggaggccatcgcctacctgtctctggccatctttgccgcaggaagccaggcaagtgagtccctccttgcccgagcccgctgctatgggttcctgggccagaagaagacggccatgttcgacttcaacacagtgctgcgggctgagccggggaacgtgcaggcactgtgtggacgggcgttggtgcacctggccctagaccagctgcaggaagccgtggacgacatcgtctctgctctgaagctcggccccgggactgtggtccctgagctccgctctctgaagccggaagcccaggccctcatcacacagggcctctactcccactgccgggcccttctgagccagctgccagacactggggcccctctcgaggacaaggacacccagggcctccttgctgtgggggaggcgctgatcaaaatcgactcagggcaaccgcactggcacctcctcctggcagacattctcatggcacagggcagctacgaggaagctggcacccacctggaaaaagccctgcaccgtgccccaacgtcagaggcagcccgggcccggctgggcctgctccagctcaagaagggagacgtgccaggggctgcaagggacctgcagagcctggccgaggtggatgccccggatctcagctgcctgctgcatctcctggaggcctcggagcggcagagccttgcccaggcggcggcccaggaagccggcaccctcctggacgcagggcaacccaggcaggcgctgggctactgttcgctgtctgtcctggccagtggcagcagtgcctgtcacctgcgtctgcgggccacctgcctggccgagctgcaggagtttggccgggcccttagggacctggaccatgtgctccaggaggcgctgggggatggtgacctcccaaggcgggcagaggacttctgccgtcagggtcgcctgctgctgagcctgggggatgaggcggcggccgcaggggcctttgcccaggccctgaagctggcgccctccttggcccagaacagcctgtgcaggcagccaggccgggcccccactgcacgcatgttccttctccgcgggcagtgctgcctggaggagcagcgtcacgcagaggcctggacggcggtagagagcggcctcctggtggaccccgaccaccgtggcctgaagagactgaaggccagaatccggagggaggcatcctcaggctgctggctacagtgac

SEQ ID NO: 190574 - DNA, 874 bp, Homo sapiens
  Payload ID: 17647
  Gene Name: tetratricopeptide repeat domain 36
  Uniprot ID: A6NLP5
  ENST ID: ENST00000302783
  CDS Start-End: 24-593
ttgggattttggagttgagcaccatggggactccaaatgatcaggcagtgctgcaggccatcttcaaccctgacaccccatttggagacattgttggattggacctcggagaggaagcagaaaaggaagaacgagaagaagatgaagttttccctcaagcacagctggaacagtccaaggccctggagctgcagggggtgatggcagcagaggctggggacctcagcacagccctggagaggtttggccaagccatctgcctgctgcctgagagggcttcagcctacaacaaccgtgcccaggcccggcgactccagggagacgtggcaggcgccctggaggatctggaacgcgcggtggagctgagcggcggccggggccgcgccgcccgccagagctttgtgcagcgcggactcctggcgcggctgcagggccgagacgacgacgcccgcagggacttcgagagggcggcacggctgggcagccccttcgcgcggcgccagctggtgctgctcaacccctacgccgcgctgtgcaaccgcatgctggccgacatgatggggcagctgcgccgcccccgtgacagccgctgagcgccgcggacccgggcgtccgcgggcgaggggacgggactgggccctgaaccaataaagccgtcgggcctcaccgactccgcctgctcctgcgtcctgcccgcgcccggagagaagggcactcgggggtactcggcgcgggctggggaccagccggggggtggtgagccgcggccgcccacctgccgggtaagggcccctcgggcccgtggtcgggcatcgattggccccgcctggcgcagcccccgcccctgcagcggactgcggtgctcatcagacct

SEQ ID NO: 190575 - DNA, 986 bp, Homo sapiens
  Payload ID: 17647
  Gene Name: tetratricopeptide repeat domain 36
  ENST ID: ENST00000533501
  CDS Start-End: 24-170
ttgggattttggagttgagcaccatggggactccaaatgatcaggcagtgctgcaggccatcttcaaccctgacaccccatttggagacattgttggattggacctcggagaggaagcagaaaaggaagaacgagaagaagagaataccaccaccagaacagaagactgaaataaggcagggcatggttgctcagttgagtggttccaatatagcaagcacaaccagtaaccgttaaacactgtcacaagccaagctccaaactaactcttccgcactggaacagtccaaggccctggagctgcagggggtgatggcagcagaggctggggacctcagcacagccctggagaggtttggccaagccatctgcctgctgcctgagagggcttcagcctacaacaaccgtgcccaggcccggcgactccagggagacgtggcaggcgccctggaggatctggaacgcgcggtggagctgagcggcggccggggccgcgccgcccgccagagctttgtgcagcgcggactcctggcgcggctgcagggccgagacgacgacgcccgcagggacttcgagagggcggcacggctgggcagccccttcgcgcggcgccagctggtgctgctcaacccctacgccgcgctgtgcaaccgcatgctggccgacatgatggggcagctgcgccgcccccgtgacagccgctgagcgccgcggacccgggcgtccgcgggcgaggggacgggactgggccctgaaccaataaagccgtcgggcctcaccgactccgcctgctcctgcgtcctgcccgcgcccggagagaagggcactcgggggtactcggcgcgggctggggaccagccggggggtggtgagccgcggccgcccacctgccgggtaagggcccctcgggcccgtggtcgggcatcgattggccccgcctggcgcagcccccgcccctgcagcggactgcggtgctcatcagacct

SEQ ID NO: 190576 - DNA, 1009 bp, Homo sapiens
  Payload ID: 17647
  Gene Name: tetratricopeptide repeat domain 36
  ENST ID: ENST00000528570
  CDS Start-End: 24-170
ttgggattttggagttgagcaccatggggactccaaatgatcaggcagtgctgcaggccatcttcaaccctgacaccccatttggagacattgttggattggacctcggagaggaagcagaaaaggaagaacgagaagaagagaataccaccaccagaacagaagactgaaataaggcagggcatggttgctcagttgagtggttccaatatagcaagcacaaccagtaaccgttaaacactgtcacaagccaagctccaaactaactcttccgcaatgaagttttccctcaagcacagctggaacagtccaaggccctggagctgcagggggtgatggcagcagaggctggggacctcagcacagccctggagaggtttggccaagccatctgcctgctgcctgagagggcttcagcctacaacaaccgtgcccaggcccggcgactccagggagacgtggcaggcgccctggaggatctggaacgcgcggtggagctgagcggcggccggggccgcgccgcccgccagagctttgtgcagcgcggactcctggcgcggctgcagggccgagacgacgacgcccgcagggacttcgagagggcggcacggctgggcagccccttcgcgcggcgccagctggtgctgctcaacccctacgccgcgctgtgcaaccgcatgctggccgacatgatggggcagctgcgccgcccccgtgacagccgctgagcgccgcggacccgggcgtccgcgggcgaggggacgggactgggccctgaaccaataaagccgtcgggcctcaccgactccgcctgctcctgcgtcctgcccgcgcccggagagaagggcactcgggggtactcggcgcgggctggggaccagccggggggtggtgagccgcggccgcccacctgccgggtaagggcccctcgggcccgtggtcgggcatcgattggccccgcctggcgcagcccccgcccctgcagcggactgcggtgctcatcagacct

SEQ ID NO: 190577 - DNA, 5706 bp, Homo sapiens
  Payload ID: 17648
  Gene Name: tetratricopeptide repeat domain 37
  Uniprot ID: Q6PGP7
  ENST ID: ENST00000358746
  CDS Start-End: 300-4994
atgagtcctgggaaaggcgcatgcgctctcattgcagcctcggcgtttgtagaagaggagcatctgctccagatggaaaatgggtaaggaacaatcaaattcaattcgggaagaatatagaggtggtaataattggtaaaagtctgcagggttttttttaaccaaaggaaactggtttgagaaaattgtgaaatcagcattgaaatttgttacctactccaatcaagatttgcaaactacaaaaaaatcattctgaagctttcacctataaatatataccaagataatttcagataagaatgtccagcaaggaagtgaagactgctctaaaaagtgctagagatgcaatcagaaacaaagaatacaaagaagctttgaaacactgtaagacagtgttaaagcaagagaaaaataactataatgcctgggtttttattggcgttgctgcagctgaactagaacaacctgatcaggcccagagtgcctataaaaaagctgctgaattagagccagaccaattactagcttggcaggggttagcaaacttgtatgagaaatataatcacataaatgctaaggatgacttgcctggtgtttaccaaaagctcctggatctttatgagagtgttgacaagcagaagtggtgtgatgtctgcaagaaacttgtggatctatattaccaagaaaagaaacacctagaggtggctcgaacatggcacaagttgataaaaacacggcaggaacaaggtgcagaaaatgaagagcttcatcaactatggagaaaattgactcagttcctggctgaaagtacagaggaccagaataatgaaactcagcaattgctttttactgcttttgagaatgcactgggattatcagataagattcctagtgaagatcaccaagtactttataggcatttcattcagagtttatccaaatttcctcatgagtctgctagattgaagaaggcctgtgaaggaatgataaacatctatcctactgtacagtatccattagaagtgctttgtttgcatttaattgaatcaggaaatcttactgatgaggggcagcagtattgttgtagattagtggaaatggattcaaaaagtggtccaggcctcattggcttaggcattaaagcattacaagacaaaaagtatgaagatgctgttaggaacctaacagaagggttaaaggaaagccctgtctgcacaagtggatggtatcatctggcagaagcccaagtcaaaatgcatagacctaaagaagctgttctttcatgcagtcaagctctgaagatcgtagataatcttggtgcgtctggtaacagtctttatcagaggaatctttgtcttcatttgaaagcagaggctttgattaaactctcagattatgactcttcagaggaagcaattcgtacgcttgatcagatttctgatgcagataatatcccaggacttttggttctcaaaagcttggcctatcggaacaaaggttcatttgatgaagctgcaaagattatggaagaccttctctcttcttaccctgacctagctgaagttcatgcccttgaggctttgattcatttcaccaaaaaggactatctacaagcagaaaaatgttttcagagagctcttgagaaagataccgaagttgcagaatatcattaccaacttggattaacatactggttcatgggtgaagagacaagaaaagataaaacaaaggctcttacccactttctgaaggctgcaagactggatacatatatgggcaaagttttctgctatttaggtcattattatagagacgtagtgggagataaaaacagagctcgtggatgttataggaaagcctttgaattagatgacactgatgctgaatctggagctgcagcagttgacctaagtgtggagcttgaagatatggaaatggctttagctatcctaacaacagtaactcaaaaggcaagtgctggaacggcaaaatgggcctggcttaggcgaggactatactatttgaaagctggtcagcattctcaagcagtggctgatttacaggcagcattaagagcagacccaaaggacttcaattgttgggaatcgttaggagaagcatacttaagcagaggaggctacacaacagccttgaagtccttcacaaaagccagtgagctgaacccagaatccatatacagtgtgtttaaggttgcagcaatacagcaaatcctaggcaaatataaggaggctgtagctcaataccagatgatcattaaaaagaaagaagattatgtgcctgctttaaaaggtttgggtgaatgccatcttatgatggcaaaagcagctctagttgattatcttgatggaaaagccgtagactacatagaaaaagcactggaatattttacttgtgctctacagcatcgagctgatgtgtcctgcctctggaagctagctggggatgcttgtacctgtctgtatgctgtcgcaccatctaaagtgaatgttcatgttttaggagtccttctaggtcagaaagaaggaaaacaagtattaaagaaaaatgagctcctccaccttggaggaaggtgttatggtcgtgcattaaaactgatgtctacatctaatacatggtgtgaccttggaattaattattatcgccaagcacaacatctagcagaaacaggcagcaacatgaatgatcttaaggagttgctggagaaatctttacattgtctgaaaaaagcagtgagactcgacagtaataatcacttatactggaatgctcttggtgtggttgcatgttacagtggtattggaaattatgcccttgctcagcactgtttcatcaaatcaatccagtcagaacaaattaatgctgttgcatggaccaacttgggagtgttatacctcacaaatgaaaacattgagcaagctcatgaggctttcaaaatggctcaatcccttgatccatcttatttaatgtgctggattggacaagctcttattgctgaggcagttggaagttatgacaccatggatctcttcaggcacactacagaactaaatatgcatactgaaggagcattaggttatgcgtattgggtctgcacaacattgcaagataaaagcaacagagaaacagagctgtaccagtacaacatcctccagatgaatgctattccagcagcacaagttattttgaataaatatgtagaaagaattcagaattatgccccagctttcacaatgttgggttacttaaacgaacatctacaactgaaaaaggaagcagcaaatgcataccaaagggcaattttgttgttacagactgcagaagaccaagatacttacaatgttgcaataagaaattacggcagattgttatgttccactggtgaatatgataaagctatccaggcttttaagtcaacaccccttgaagtgttagaagacatcataggttttgcattggctttattcatgaaggggctttataaagagagcagcaaagcctatgagagagccttgtctattgttgaatcggagcaagacaaagcccatatcttgacagctctggcaataactgaatataaacaaggaaaaacggatgtagccaagacattgctatttaaatgctctatcttaaaggaaccaaccacagaaagccttcaagccctgtgtgctctagggttggcaatgcaggatgctacactgtcaaaagcagcacttaatgagttactgaagcacatcaaacacaaagacagtaattatcagaggtgccttcttacatcagcgatttatgcactccaaggccgcagtgtggctgtgcaaaaacaaatatctaaagctgttcacagcaaccctggtgaccctgctctttggtctctgttgtctcgagttgttgcacagtatgctcaacgaaatgcaaagggaggtgttgtagcaggaaatgtggctcatattctggactcaaatcatggaaagaaggcattactgtacactgcggtaaatcagttggctatgggaagcagttcagcagaagatgaaaaaaatactgcactaaagaccattcagaaggcagctctcctttctccaggtgatcctgctatctgggctgggctaatggcagcctgtcacgctgatgataaactggccttagtgaacaacactcagccaaagaggatagatttatacttggcactgttatctgctgtttctgcttcaattaaagacgaaaaattctttgaaaattacaaccagtcccttgaaaagtggtctctctcacaagctgtcactggtctaatagacacaggaagaatatctgaagctgaaactctctgcacaaagaatttaaaaagtaaccctgatcagccagccgttatcttacttttgagacaagttcagtgtaaaccactcctggagtcacaaaagccactcccagatgctgtacttgaagaactacaaaaaacagtcatgtccaactcaacctctgttccagcttggcagtggctggcacatgtgtatcaatcccaaggaatgatgagagctgcagagatgtgttacagaaagagtctacaattggcatcccaacggggcagttggagtgggaagctctcaagtctgttgagactagcactacttgcattaaaagtctgtatggctaacatttccaatgatcactggccatctttggttcaagaggctacaactgaggccttgaagctttgcttttgtccactggctgttcttttacaagctttgttacaattcaaacgcaaaatgggggcaagagagacacggcgtcttttggaaagagtggtatatcagcctgggtatcccaaatctattgcatcaactgcacgttggtacctactgagacacttatatgccaaagatgactatgagcttattgacgtgctggtaaacaatgccaaaactcatggagatacaagagcattggaactgaatcagagattgtcctcacaataacattggattattttatagtaaggaagcaaagaaaaagctgtaagaatgaagcaatgaatcaagacttctacccaaagcaacatttttttaaactatatttattccttttctaaaggaatctagagaagttgaagtttttaagttaggaatgcaattttctgttaactccaaacctgattttaatctgaaaaaaaaaaaatttaatttgggaaaaccagaatgaaaggaaaaccattattgccttggttgcttaacattatttgtaaaccattattttctgcatcttgcatggtgcacaatagaatatcttttactgtaatcccttacaataaagccttaatagccattttctatgtaatatgcaaaagtagattagcacaatgcacaattttcttttgttaaaaatcaaattcaaagatttaattcttgctatgaattctaaagttcggcaaaccaattcatcataaaatccaaataatcttgtaacctatttatctagtgattcatctccaattctgttgaaaaagcataatataaatgttgatgagactagactctaatggatatgtttatataattccaaacactcaggtgtgtgaatgcatttaaaaacattaatggaaaataatgctgataatatttaattgatcatgcaattccttcaattatgatggaaagacttgaactttctgaaataaaacaaaaatacagc

SEQ ID NO: 190578 - DNA, 797 bp, Homo sapiens
  Payload ID: 17648
  Gene Name: tetratricopeptide repeat domain 37
  ENST ID: ENST00000513232
  CDS Start-End: 1-102
gataatatcccaggacttttggttctcaaaagcttggcctatcggaacaaaggttcatttgatgaagctgcaaagctgaagttcatgcccttgaggctttgattcatttcaccaaaaaggactatctacaagcagaaaaatgttttcagagagctcttgagaaagataccgaagttgcagaatatcattaccaacttggattaacatactggttcatgggtgaagagacaagaaaagataaaacaaaggctcttacccactttctgaaggctgcaagactggatacatatatgggcaaagttttctgctatttaggtcattattatagagacgtagtgggagataaaaacagagctcgtggatgttataggaaagcctttgaattagatgacactgatgctgaatctggagctgcagcagttgacctaagtgtggagcttgaagatatggaaatggctttagctatcctaacaacagtaactcaaaaggcaagtgctggaacggcaaaatgggcctggcttaggcgaggactatactatttgaaagctggtcagcattctcaagcagtggctgagcagcattaagagcagacccaaaggacttcaattgttgggaatcgttaggagaagcatacttaagcagaggaggctacacaacagccttgaagtccttcacaaaagccagtgagctgaacccagaatccatatacagtgtgtttaaggttgcagcaatacagcaaatcctaggcaaatataaggaggctgtagctcaataccagatgatcattaaaaagaaag

SEQ ID NO: 190579 - DNA, 664 bp, Homo sapiens
  Payload ID: 17648
  Gene Name: tetratricopeptide repeat domain 37
  ENST ID: ENST00000505578
  CDS Start-End: 1-393
acacggcaggaacaaggtgcagaaaatgaagagcttcatcaactatggagaaaattgactcagttcctggctgaaagtacagaggaccagaataatgaaactcagcaattgctttttactgcttttgagaatgcactgggattatcagataagattcctagtgaagatcaccaagtactttataggcatttcattcagagtttatccaaatttcctcatgagtctgctagattgaagaaggcctgtgaaggaatgataaacatctatcctactgtacagtatccattagaagtgctttgtttgcatttaattgaatcaggaaatggctttagctatcctaacaacagtaactcaaaaggcaagtgctggaacggcaaaatgggcctggcttaggcgaggactatactatttgaaagctggtcagcattctcaagcagtggctgatttacaggcagcattaagagcagacccaaaggacttcaattgttgggaatcgttaggagaagcatacttaagcagaggaggctacacaacagccttgaagtccttcacaaaagccagtgagctgaacccagaatccatatacagtgtgtttaaggttgcagcaatacagcaaatcctaggcaaatataaggaggctgtagctcaataccagatgatcatt

SEQ ID NO: 190580 - DNA, 2102 bp, Homo sapiens
  Payload ID: 17648
  Gene Name: tetratricopeptide repeat domain 37
  ENST ID: ENST00000514952
  CDS Start-End: 270-2102
attgcagcctcggcgtttgtagaagaggagcatctgctccagatggaaaatgggtaaggaacaatcaaattcaattcgggaagaatatagaggtggtaataattggtaaaagtctgcagggttttttttaaccaaaggaaactggtttgagaaaattgtgaaatcagcattgaaatttgttacctactccaatcaagatttgcaaactacaaaaaaatcattctgaagctttcacctataaatatataccaagataatttcagataagaatgtccagcaaggaagtgaagactgctctaaaaagtgctagagatgcaatcagaaacaaagaatacaaagaagctttgaaacactgtaaggggttagcaaacttgtatgagaaatataatcacataaatgctaaggatgacttgcctggtgtttaccaaaagctcctggatctttatgagagtgttgacaagcagaagtggtgtgatgtctgcaagaaacttgtggatctatattaccaagaaaagaaacacctagaggtggctcgaacatggcacaagttgataaaaacacggcaggaacaaggtgcagaaaatgaagagcttcatcaactatggagaaaattgactcagttcctggctgaaagtacagaggaccagaataatgaaactcagcaattgctttttactgcttttgagaatgcactgggattatcagataagattcctagtgaagatcaccaagtactttataggcatttcattcagagtttatccaaatttcctcatgagtctgctagattgaagaaggcctgtgaaggaatgataaacatctatcctactgtacagtatccattagaagtgctttgtttgcatttaattgaatcaggaaatcttactgatgaggggcagcagtattgttgtagattagtggaaatggattcaaaaagtggtccaggcctcattggcttaggcattaaagcattacaagacaaaaagtatgaagatgctgttaggaacctaacagaagggttaaaggaaagccctgtctgcacaagtggatggtatcatctggcagaagcccaagtcaaaatgcatagacctaaagaagctgttctttcatgcagtcaagctctgaagatcgtagataatcttggtgcgtctggtaacagtctttatcagaggaatctttgtcttcatttgaaagcagaggctttgattaaactctcagattatgactcttcagaggaagcaattcgtacgcttgatcagatttctgatgcagataatatcccaggacttttggttctcaaaagcttggcctatcggaacaaaggttcatttgatgaagctgcaaagattatggaagaccttctctcttcttaccctgacctagctgaagttcatgcccttgaggctttgattcatttcaccaaaaaggactatctacaagcagaaaaatgttttcagagagctcttgagaaagataccgaagttgcagaatatcattaccaacttggattaacatactggttcatgggtgaagagacaagaaaagataaaacaaaggctcttacccactttctgaaggctgcaagactggatacatatatgggcaaagttttctgctatttaggtcattattatagagacgtagtgggagataaaaacagagctcgtggatgttataggaaagcctttgaattagatgacactgatgctgaatctggagctgcagcagttgacctaagtgtggagcttgaagatatggaaatggctttagctatcctaacaacagtaactcaaaaggcaagtgctggaacggcaaaatgggcctggcttaggcgaggactatactatttgaaagctggtcagcattctcaagcagtggctgatttacaggcagcattaagagcagacccaaaggacttcaattgttgggaatcgttaggagaagcatacttaagcagaggaggctacacaacagccttgaagtccttcacaaaagccagtgagctgaacccagaatccatatacagtgtgtttaaggttgcagcaatacagcaaatcctaggcaaatataaggaggctgtagctcaataccagatgatcatt

SEQ ID NO: 190581 - DNA, 577 bp, Homo sapiens
  Payload ID: 17648
  Gene Name: tetratricopeptide repeat domain 37
  ENST ID: ENST00000513823
  CDS Start-End: 292-577
ctgctccaggtgggtttggatttctgtcggttttgcacaagggatcctaaaggcgattgaaatgatggaaaatgggtaaggaacaatcaaattcaattcgggaagaatatagaggtggtaataattggtaaaagtctgcagggttttttttaaccaaaggaaactggtttgagaaaattgtgaaatcagcattgaaatttgttacctactccaatcaagatttgcaaactacaaaaaaatcattctgaagctttcacctataaatatataccaagataatttcagataagaatgtccagcaaggaagtgaagactgctctaaaaagtgctagagatgcaatcagaaacaaagaatacaaagaagctttgaaacactgtaagacagtgttaaagcaagagaaaaataactataatgcctgggtttttattggcgttgctgcagctgaactagaacaacctgatcaggcccagagtgcctataaaaaagctgctgaattagagccagaccaattactagcttggcaggggttagcaaacttgtatgagaaatataatcacataaatgctaaggatgact

SEQ ID NO: 190582 - DNA, 2610 bp, Homo sapiens
  Payload ID: 17649
  Gene Name: tetratricopeptide repeat domain 38
  Uniprot ID: Q5R3I4
  ENST ID: ENST00000381031
  CDS Start-End: 77-1486
tttccgcgaccgccccgcccactcccaggaaggcccgggtgcccagagctcgcggtggactccgacccggcgcaacatggccgcagcctcgcctctgcgcgactgccaggcctggaaggatgcgaggctcccgctctccaccacaagcaacgaagcctgcaagctgttcgatgccacgctgacccagtatgtaaaatggaccaatgacaagagtctcggtggcatcgagggctgcctgtcaaagctcaaagcagcagatccaacctttgtgatgggccacgccatggctactggccttgtgctgattggcactggaagctccgtgaagctggacaaagagctggacctggctgtgaagacaatggtggagatttcaagaacccagccgctgacaaggcgggagcagctgcacgtgtctgcagtagagacatttgccaatgggaactttccgaaagcctgtgaactatgggaacagattctccaggaccacccgacagacatgttggccctgaaattttcccatgatgcttatttttacctgggctatcaggaacagatgagagattctgttgctcgaatttaccccttctggacacctgacatccccctaagcagctatgtgaaaggcatctactcttttggcttgatggaaaccaacttctacgaccaggcagaaaaactcgccaaagaggctttatctattaacccgacagacgcatggtcggtgcacaccgtcgctcacatccacgagatgaaagcagagatcaaggatgggttggaattcatgcagcactcagagaccttctggaaggactctgatatgttggcttgtcataactattggcactgggctttatatctgattgagaagggcgaatatgaggccgcgctgaccatctacgatacccacatccttcccagcctgcaggccaacgatgcaatgctggacgtggtggacagctgctccatgctctaccgcctgcagatggaaggagtgtctgtgggccagcggtggcaggatgtcctgcctgtggcccggaagcacagccgagaccacatcctgctgttcaatgacgcacacttcctgatggcatccctgggtgcacacgacccccagaccacacaggagctgctgaccaccctgcgggacgccagcgaatccccaggggagaactgccagcacctcctggcccgagacgtggggctgcccctgtgccaggccctggtggaggctgaggacgggaaccctgaccgcgtcctggagctgctcctgcccatccgctaccggatcgtccagctcggtgggagcaatgcccagagagacgtcttcaaccagctgctgattcacgcggccttaaactgcacctccagcgtccataagaacgtagcccggagccttctgatggagcgtgatgccttgaagcccaactcgcccctgaccgagcggctcatccgcaaggcagctaccgtccacctcatgcagtgagccagcctggccgcctccaccctgcagaacctcagtggtggcgtcactgcgtccagtcagctgctccaccgggttagggtcaggagacggccagagcctgtttgttagggctgttagagggtgatcttcagttttacaggaagtgggtcacgggttaattttaaatgtgattccgaatctcctttcagtcctcgagaagggccaatgagcatttttcagcagtcacagccagtgtgagtgctgctctttccacctgccttgcaaattctgtttcccaggggaatgtgtctactgcctggtggttcaaaggttggaaggcagggcagaggtgggggctgattctgctgggacaggtcttccagaggcagcctccccccactgcctgtccccgtccccaccaggctgcccttgggatggaccttttcattcttttctttatattctagacagtctctgttgtctcattgtgttgctgtcccatttttcaggtgagggtaccggggtaggggagtggcctgcccagggtcacactatgagaggcccccacctgctgcctttggacgcagccccctgctgctgcatccaccacccttcttacagatcagcgcgcacatggggtccttctgctgtctctggggcgagtcttggagccccctggggggctctgttggtgctgatttggacccgtttctctttttaaactgcacatcataacagggcttcatgtcgagcatgattttaatcataaatgcacttctgaggtgcaaggattgagctcagagctgctctgttgtggcaaaacccaaagtgctgtgatgtgtggctgtgacaagcctggagcgggtcctgtgagcgccgcctctgtctcctgcttccccactgaacgcctgctgaatgtgccgctgactcagctgtgctgctttcagccctcctgtgaggggcggtcccagtgcacagatgtttttcaagttcctcagtttgtactgaaattagggattcatcagggcaggaagcaggcaggcctctcagaagggagaggaggcctccaaatctattgagtccccacagtttgctcaagcccaggcaaatttctgtgattaaaatgaattcatcagttcctccaa

SEQ ID NO: 190583 - DNA, 630 bp, Homo sapiens
  Payload ID: 17649
  Gene Name: tetratricopeptide repeat domain 38
  ENST ID: ENST00000417709
  CDS Start-End: 80-241
ccctttccgcgaccgccccgcccactcccaggaaggcccgggtgcccagagctcgcggtggactccgacccggcgcaacatggccgcagcctcgcctctgcgcgactgccaggcctggaaggatgcgaggctcccgctctccaccacaagcaacgaagcctgcaagctgttcgatgccacgctgacccaggactctgagtggtgggtggacagcggtgggtgcagtggggatgttttttgaggatgctggcctccccgggcctcccattgtggcctgctgagggtctgatgcagggctcggctgcttaggacgtgggatcctgtcctgggatgaatcttatgtaaaatggaccaatgacaagagtctcggtggcatcgagggctgcctgtcaaagctcaaagcagcagatccaacctttgtgatgggccacgccatggctactggccttgtgctgattggcactggaagctccgtgaagctggacaaagagctggacctggctgtgaagacaatggtggagatttcaagaacccagccgctgacaaggcgggagcagctgcacgtgtctgcagtagagacatttgccaatgggaactttccgaaagcctgtgaactatgggaacagattc

SEQ ID NO: 190584 - DNA, 582 bp, Homo sapiens
  Payload ID: 17649
  Gene Name: tetratricopeptide repeat domain 38
  ENST ID: ENST00000451998
  CDS Start-End: 1-359
acttcctgatggcatccctgggtgcacacgacccccagaccacacaggagctgctgaccaccctgcgggacgccagcgaatccccaggggagaactgccagcacctcctggcccgagacgtggggctgcccctgtgccaggccctggtggaggctgaggacgggaaccctgaccgcgtcctggagctgctcctgcccatccgctaccggatcgtccagctcggtgggagcaatgcccagagagacgtcttcaaccagctgctgattcacgcggccttaaactgcacctccagcgtccataagaacgtagcccgaggcaaggtctcactcggtcatccaggttggaatgcagtggtgtgatcacagttcactgtaaactcaaactcctgggctcaaggaatcttcctgcctcatccttccatcgtgcagggattacaggggagccttctgatggagcgtgatgccttgaagcccaactcgcccctgaccgagcggctcatccgcaaggcagctaccgtccacctcatgcagtgagccagcctggccgcctccaccctgcagaacctcagtggtggcgtcactg

SEQ ID NO: 190585 - DNA, 828 bp, Homo sapiens
  Payload ID: 17649
  Gene Name: tetratricopeptide repeat domain 38
  ENST ID: ENST00000422713
  CDS Start-End: 1-629
tcgagggctgcctgtcaaagctcaaagcagcagatccaacctttgtgatgggccacgccatggctactggccttgtgctgattggcactggaagctccgtgaagctggacaaagagctggacctggctgtgaagacaatggtggagatttcaagaacccagccgctgacaaggcgggagcagctgcacgtgtctgcagtagagacatttgccaatgggaactttccgaaagcctgtgaactatgggaacagattctccaggaccacccgacagacatgttggccctgaaattttcccatgatgcttatttttacctgggctatcaggaacagatgagagattctgttgctcgaatttaccccttctggacacctgacatccccctaagcagctatgtgaaaggcatctactcttttggcttgatggaaaccaacttctacgaccaggcagaaaaactcgccaaagaggctttatctattaacccgacagacgcatggtcggtgcacaccgtcgctcacatccacgagatgaaagcagagatcaaggatgggttggaattcatgcagcactcagagaccttctggaagggcctggtcaggaggagcgagcagcctcttcaaagcacatgagctgcaccatgacggggaccctctgtgggatgtggaaacgcagaggaagcattaaactcaactgggcttggggggacagtggctagggaaggcatcctggagggggcaacctctgagttggctactgaaggatgagcaggactctgatatgttggcttgtcataactattggcactgggctttatatctgattgagaag

SEQ ID NO: 190586 - DNA, 821 bp, Homo sapiens
  Payload ID: 17649
  Gene Name: tetratricopeptide repeat domain 38
  ENST ID: ENST00000421359
  CDS Start-End: 33-821
agagctcgcggtggactccgacccggcgcaacatggccgcagcctcgcctctgcgcgactgccaggcctggaaggatgcgaggctcccgctctccaccacaagcaacgaagcctgcaagctgttcgatgccacgctgacccagtatgtaaaatggaccaatgacaagagtctcggtggcatcgagggctgcctgtcaaagctcaaagcagcagatccaacctttgtgatgggccacgccatggctactggccttgtgctgattggcactggaagctccgtgaagctggacaaagagctggacctggctgtgaagacaatggtggagatttcaagaacccagccgctgacaaggcgggagcagctgcacgtgtctgcagtagagacatttgccaatgggaactttccgaaagcctgtgaactatgggaacagattctccaggaccacccgacagacatgttggccctgaaattttcccatgatgcttatttttacctgggctatcaggaacagatgagagattctgttgctcgaatttaccccttctggacacctgacatccccctaagcagctatgtgaaaggcatctactcttttggcttgatggaaaccaacttctacgaccaggcagaaaaactcgccaaagaggcaccaactctttgtcttcaacaccagcaccccacagacaactactgggcaggaaaagcaggctgtgatggggccaggagtggtaacacatgggctctgtgtctgcagccccaggctggtgagggtaggaggagccagggcaggagcaggcaggcggcaggcacaggcacagcc

SEQ ID NO: 190587 - DNA, 162 bp, Homo sapiens
  Payload ID: 17649
  Gene Name: tetratricopeptide repeat domain 38
  ENST ID: ENST00000629918
  CDS Start-End: 1-162
atggccgcagcctcgcctctgcgcgactgccaggcctggaaggatgcgaggctcccgctctccaccacaagcaacgaagcctgcaagctgttcgatgccacgctgacccaggactctgagtggtgggtggacagcggtgggtgcagtggggatgttttttga

SEQ ID NO: 190588 - DNA, 2173 bp, Homo sapiens
  Payload ID: 17650
  Gene Name: tetratricopeptide repeat domain 39A
  ENST ID: ENST00000262675
  CDS Start-End: 176-1828
cacgttcagagcagccttccccacctgcctcgtggcgttcactcctgtggggtgggccctgttactctcatccccattacagatgaggaaactgagacacagcacttaagtgacttgtcatcggtcacccaggaggactcctgagagcagcctccatgaggccctggaccagtgcatgaccgccctggacctcttcctcaccaaccagttctcagaagcactcagctacctcaagcccagaaccaaggaaagcatgtaccactcactgacatatgccaccatcctggagatgcaggccatgatgacctttgaccctcaggacatcctgcttgccggcaacatgatgaaggaggcacagatgctgtgtcagaggcaccggaggaagtcttctgtaacagattccttcagcagcctggtgaaccgccccacgctgggccaattcactgaagaggaaatccacgctgaggtctgctatgcagagtgcctgctgcagcgagcagccctgaccttcctgcaggacgagaacatggtgagcttcatcaaaggcggcatcaaagttcgaaacagctaccagacctacaaggagctggacagccttgttcagtcctcacaatactgcaagggtgagaaccacccgcactttgaaggaggagtgaagcttggtgtaggggccttcaacctgacactgtccatgcttcctactaggatcctgaggctgttggagtttgtggggttttcaggaaacaaggactatgggctgctgcagctggaggagggagcgtcagggcacagcttccgctctgtgctctgtgtcatgctcctgctgtgctaccacaccttcctcaccttcgtgctcggtactgggaacgtcaacatcgaggaggccgagaagctcttgaagccctacctgaaccggtaccctaagggtgccatcttcctgttctttgcagggaggattgaagtcattaaaggcaacattgatgcagccatccggcgtttcgaggagtgctgtgaggcccagcagcactggaagcagttccaccacatgtgctactgggagctgatgtggtgcttcacctacaagggccagtggaagatgtcctacttctacgccgacctgctcagcaaggagaactgctggtccaaggccacctacatttacatgaaggccgcctacctcagcatgtttgggaaggaggaccacaagccgttcggggacgacgaagtggaattatttcgagctgtgccaggcctgaagctcaagattgctgggaaatctctacccacagagaagtttgccatccggaagtcccggcgctacttctcctccaaccctatctcgctgccagtgcctgctctggaaatgatgtacatctggaacggctacgccgtgattgggaagcagccgaaactcacggatgggatacttgagattatcactaaggctgaagagatgctggagaaaggcccagagaacgagtactcagtggatgacgagtgcttggtgaaattgttgaaaggcctgtgtctgaaatacctgggccgtgtccaggaggccgaggagaattttaggagcatctctgccaatgaaaagaagattaaatatgaccactacttgatcccaaacgccctgctggagctggccctgctgcttatggagcaagacagaaacgaagaggccatcaaacttttggaatctgccaagcaaaactacaagaattactccatggagtcaaggacacactttcgaatccaggcagccacactccaagccaagtcttccctagagaacagcagcagatccatggtctcatcagtgtccttgtagctttgtgcagcagttccgggctggaagacagagacagctggacagagctcctgaaaacatttcaaaataccccctccccctgccctgccctgcctttggggtccaccggcactccagttggatggcacaacatagtgtatccgtgcagaagccgagctggcattttcaccagtgtagccaagggcctttgccaagggcagagcaggtggagccctctgcctgccctatcacacatacgggtacttgcttttcactgtgatgtttaagagaatgtatgaacagtttacattttccttagaaatacattgatgggatcacagttggctttaaaaaccaacaacaatc

SEQ ID NO: 190589 - DNA, 6287 bp, Homo sapiens
  Payload ID: 17650
  Gene Name: tetratricopeptide repeat domain 39A
  Uniprot ID: Q5SRH9
  ENST ID: ENST00000262676
  CDS Start-End: 162-1424
gtgccagaagatcaggtcaggtggagacaccgcctcagggctcggtgcacagtggacatttggggagcgttgtgggtgacccccacacaggcactgggaatgcaggggagagggggccaagggggaaaggggccagagtgttggctttggattcaggagggatggattccagtcctagcttgccacttattaggactcctgagagcagcctccatgaggccctggaccagtgcatgaccgccctggacctcttcctcaccaaccagttctcagaagcactcagctacctcaagcccagaaccaaggaaagcatgtaccactcactgacatatgccaccatcctggagatgcaggccatgatgacctttgaccctcaggacatcctgcttgccggcaacatgatgaaggaggcacagatgctgtgtcagaggcaccggaggaagtcttctgtaacagattccttcagcagcctggtgaaccgccccacgctgggccaattcactgaagaggaaatccacgctgaggtctgctatgcagagtgcctgctgcagcgagcagccctgaccttcctgcagggttcctcacacggaggggcagtcaggcccagagccttgcatgatccctctcacgcctgcagctgcccacctgggccaggccgtcagcatcttttcctcctgcaggacgagaacatggtgagcttcatcaaaggcggcatcaaagttcgaaacagctaccagacctacaaggagctggacagccttgttcagtcctcacaatactgcaagggtgagaaccacccgcactttgaaggaggagtgaagcttggtgtaggggccttcaacctgacactgtccatgcttcctactaggatcctgaggctgttggagtttgtggggttttcaggaaacaaggactatgggctgctgcagctggaggagggagcgtcagggcacagcttccgctctgtgctctgtgtcatgctcctgctgtgctaccacaccttcctcaccttcgtgctcggtactgggaacgtcaacatcgaggaggccgagaagctcttgaagccctacctgaaccggtaccctaagggtgccatcttcctgttctttgcagggaggattgaagtcattaaaggcaacattgatgcagtgagtgatgggggtccgggccggggctggggatccctcggggtctcccagaccagcaggaagtcaggcacatgtgacatactcagggacaggatagactgggggcggggggggggccaagagagaaccaaccagagagcaggggcaggagaggcccttctggcagagcagcctgggaagacaagggaggaggaggcatttgtggtgcctgggattttgactgggagatataggactgcagcattgcagtggagggaggtggagggaggtgcttgagggaggcagaggttaggaaagcccatctgtttagggcatgacgattaggctggagtctggtacctcccctccattatagctctctcctgctctttcattttgttactaaaaaccagagtcctaggcgggggctgtatttgagcccaacgtcatgtaagacttaggaggtaaaaccaggactggaggccagatctcctggctcctggggccccacctgagcctagcacagggctggaccactatgccctggaggagtcccggtctgctgtggtgttgggaggttcggaggatgcagaggggttggggctgggtgggcacccgtcaggctgaccagaaggtgcctgcaggccatccggcgtttcgaggagtgctgtgaggcccagcagcactggaagcagttccaccacatgtgctactgggagctgatgtggtgcttcacctacaagggccagtggaagatgtcctacttctacgccgacctgctcagcaaggagaactgctggtccaaggtgggctgatgccacgtgttaggggcattgggtgaccagggctgactgtgtgcctccagaccacgggccaaatccctaactgaacacagatgtctcagctggaatctaaacataaccttaaattctaataggactcaggcttggaaggaactaaagaccacaagagaaacttctgaaccacaatgtgtcacaaagagatttctagtcacaaaggacagaaacatggctccctctgtccagtagaactgtttctgtggtagaaatgttctacttatgcactgcccaaatatggtagtcaccagccacatgtgcacaatgagcacatgaaatgtgcctagtgcaactgggaaactgattgttttcagttttatttaattttaattaactaaatgttaaatttaaatagccatgtagggcttgtggccactatattggactatgcaggtccaaaacacaaaaggctcatataactgaacattcttggcacatccgacttcaggtagggctggatccaggaattcaaatgatgtcgtctggcttggtctttccatttgtggctgtgctctctcctatgacatctttgtttctgctgcatctttgcaggaaggttctctccatgtgacaggcaaggtggccacgggctgcttctactcatatcctccccttggtttcaaccagagtcccacagtttgagcctcactggtctgacttgtcacctgccaatgcctggaacagaggggtgggaagattcctcatgggctgagagtaggagaggggtggttccacagaagaaaatgatgcacccagaaatagtggagggattaacaagatgccatacaggcaaaacaaagccaaacagatgcccgcctaccaaagatgaaatttatcatggtaagtattgaaataagtgttagcttgtaccatcatagtaatgatagtgcagaaattggaaccaagagtcttacaaccacctagctcagcaaacgtctaatctgttatttgtaaatacacaggacatgtgtcttcatggcttcatcccctgcccatagcagacattgctaatcaatcctctgccatgagcctagctgtgaccttagataccttccctgcaaagctccaggcagccgttagaactgacccacattggcacctgttaggagacctgtcatctgcatctggtccctccccctcctctgcatggaggtctcttccgtagccctgcctggggaccaagctgaaggggaattctctgggtctggggcaggtggggctggggaagggagcaggcttctactgagctctcaacatgtctggcacctgtcatgtcctccacaccacacccagtgaggagaagttattatctccattgggcacatgagggccactgatgctaagcgaggactgtgactttcccacccacatggctgttggtgacagacaccggatttgaggacagtcctgtgtgactcagaggcctctgcttctctcttgctcctagagtcctcctgaggagtcggggcttgccctgagcccaccctgctgttgaaggtgcttcctcaggcccagctcccatggcccccacaccccctcctcatcacctcctactcccaaaaaggacaaagcctcagggaaccttttttctttttttagagacagggtcttgctatgttggtcaggctagtcttgaactcctgggcccaagcaatcttcccacctctgcctcctaaagtgctgggattctgggccttagggaacctttttgaactgaaagtgactctcgaagccttcctgtagagtgaggtgggtggctggggctaaccatatggggaaggagagacctggtgggggcacacagctgctatatagaggaacagaaggtgggccaggcctcccagctgtcaggaaatctggctcagtccccagaccgctgtgtggctttggggtggccagtccctctctctctgcaacactctcctcatgaggacttctgtgaaaaatgggggttgtaaccctctgagttctggggccccacccatttctaatctccagaacttggccaccacagactccaccaacttctagtcctggggcctgggcctctggccattgccataggcaccacctgctctgtgcaggcagcgcccccctctgccaggatcctccgaggtcagctgctgggtctgacccgcagaccctggctgagcgacggatgaacggagtatgcagacacaggcttgcctgtcagcagatgggggacccctgccagagtcagcagcggcccccataagcctgccacgcttgcatttatttagtacagatgtaatgacaaaggcctaaagcaaactccatttgtgggtaattaacattgtcgcccccccagaaagagcagtcctccgcatgatgattaaaggccaggttccgaggcctaagtaaaccaacttatctagatcaattcccttacttcttgttatctactctgagagaattcagctgccttcagccaaatcctttcccgaagcttttgcaaaacctccgagccttccaaggtttgcttctttctgtaatttttctcaccaccctgacctatctcctgcagtcagccctgtggaggcctttgtgtttcccccagtgctggcagcctagaggctgagatggccagaaacaaggtggtgacagtggcgtgctcagggcttgggaaacccaaggagctaaaggcatgcccaggcaaccaaagaggacaggaaggcttctgaggagagacctctgaggtgggtcttggagaggaaggacttagggaggcagagtggaggaagtgagaggacaccccaagccaagagggcggcaggaccaaaggctcagaagccagggcgctgcagaggggctgtgtgccacagggtgaagagtttgtgtggcagaagggcagggggcttgcatcaggggtgacagctgctcttttgtcccagcatagcccctgtacatccctggagagctggggcgtccacaactctaagtcacagcccccatcctaaccctggtggtgcagtgagggtgagctgtctgtgggcaggagggaagactcttggagatgagcctggtgaagggataatggcatcccgggccgaggagcagcacaggcagaggcctggggagagtttaaggagtgtaggggaggaaatggcagaagatgagccagaaaaagaaaggttagggcaggtcctggaggacatgagtggctgtttgggctttatccagcagtgggggagccttggcaggcttgtggcttagataggtgctttagaaagcccaccagcagttgctgggccaccccgctggctgggtcctgttctaaggcaggaaatacaagcatgagcaggaaaagaccccctcaaggctcacgtcctagtggggagacaagaaacacagatgggcaatataacacgatgtctggttccagtaagtgcagtgaagaacaagcgaggctggatgcagggagtgatgggaggggctttgtaaggggaggtcgggggaagcctgtctcagaggacaccagaatggagcgcaggagcagcacgtggcagtcacatggcaggccgttagggcagagggagctgggcagggcacagcagggcaggagtgtgtttgatgtgtcctgggaaccgccctgaggccgtcgtgtggctggagtgctgcaggtgtcaaggaaattgtaggagatgtctcctgagtgtgatggaatataaccagatttccagaaggaactgacatgatctgacttaaaaaggtcagtgtgcgaaatggcttgcaggggacaggagtgggagcagggagataggagacaatgtgtaccaggacagcagaaagacatcccgggtagcctggaacagggagacggtgtggagatggtggcagtccgataatgagagccgtagggcaaggccagcaggatcctagagtgagacgggaggtaaagtcaccgggacttggtgtctccacgtcaggggcaggggaaagggagaggacaagggtgacccgggaggttaaagatgggaccggggccagacgcagtggctcatgcctgtaatcctagcactttgggaggctgaggcgggcggatagcttgaggtcaggagtttgaaaccagcctggccaacatggtgaaaccccgtctctactaaaatatacaaaaattagcctggcgtggtggtgcatgcctgcagtcccagctattcaggaggctgaggcaacaagaatcgcttgaacctgggaggcggaggttgcagtgagccgagatcgcgccatagcactccagccttagcctgggcgacagagcgagaccacatcaaaaaaaaaaaaa

SEQ ID NO: 190590 - DNA, 1876 bp, Homo sapiens
  Payload ID: 17650
  Gene Name: tetratricopeptide repeat domain 39A
  ENST ID: ENST00000371747
  CDS Start-End: 86-1366
acagcgcccggctcggggttgcggcggcagcacctgggccgcgattggcgtccggctggggcagcgccgcccgcgcccctcggcgatgacctcggctggcggcgccccaggagccctgcccgcggggactcctgagagcagcctccatgaggccctggaccagtgcatgaccgccctggacctcttcctcaccaaccagttctcagaagcactcagctacctcaagcccagaaccaaggaaagcatgtaccactcactgacatatgccaccatcctggagatgcaggccatgatgacctttgaccctcaggacatcctgcttgccggcaacatgatgaaggaggcacagatgctgtgtcagaggcaccggaggaagtcttctgtaacagattccttcagcagcctggtgaaccgccccacgctgggccaattcactgaagaggaaatccacgctgaggtctgctatgcagagtgcctgctgcagcgagcagccctgaccttcctgcagggttcctcacacggaggggcagtcaggcccagagccttgcatgatccctctcacgcctgcagctgcccacctgggccaggccgtcagcatcttttcctcctgcaggacgagaacatggtgagcttcatcaaaggcggcatcaaagttcgaaacagctaccagacctacaaggagctggacagccttgttcagtcctcacaatactgcaagggtgagaaccacccgcactttgaaggaggagtgaagcttggtgtaggggccttcaacctgacactgtccatgcttcctactaggatcctgaggctgttggagtttgtggggttttcaggaaacaaggactatgggctgctgcagctggaggagggagcgtcagggcacagcttccgctctgtgctctgtgtcatgctcctgctgtgctaccacaccttcctcaccttcgtgctcggtactgggaacgtcaacatcgaggaggccgagaagctcttgaagccctacctgaaccggtaccctaagggtgccatcttcctgttctttgcagggaggattgaagtcattaaaggcaacattgatgcagccatccggcgtttcgaggagtgctgtgaggcccagcagcactggaagcagttccaccacatgtgctactgggagctgatgtggtgcttcacctacaagggccagtggaagatgtcctacttctacgccgacctgctcagcaaggagaactgctggtccaaggccacctacatttacatgaaggccgcctacctcagcatgtttgggaaggaggaccacaagccgttcggggacgacgaagtggaattatttcggtgggtcccacatcgtgctcccactgtgtaggccactcccaccgtgtaggccgctatggacagaccagccaggccaccctgagctgtgggcactggggagggaggagtagggtggctccctgcccccacccgcggactgccccccctgcgtgtcctcccctcccatcaccaccccatgctgctgctgctggtggttggagccctttgactttcttcagaggctttctttcacagaaatggttttgctaatatcgtcttcctccgagtctctttcatgtggacagtaggacagatgtggctccaaggtccagggagggaaggtctttcactctgctgagttaacctgagacactcagagaagcacagtagagagctgacagtcggaatcgaacaaacaagagtaaacccagcctctgcttgttcttagctgtgtcaccttggacaacttcagcatctgtaaaatgggaacaacaacctccacctcgcagcactgttttgcaaatcaactagataataaatgttaagagcctggcgcatagaa

SEQ ID NO: 190591 - DNA, 2021 bp, Homo sapiens
  Payload ID: 17650
  Gene Name: tetratricopeptide repeat domain 39A
  Uniprot ID: Q5SRH9
  ENST ID: ENST00000371750
  CDS Start-End: 98-1834
cctgggggagggaggaggccttggagaaggaggagggaaaaaggggctgtgggatttagtggctgggctgcaccccctgggggggcagcagagcccaatgggccagaagggccacaaagactccctttacccttgtggagggactcctgagagcagcctccatgaggccctggaccagtgcatgaccgccctggacctcttcctcaccaaccagttctcagaagcactcagctacctcaagcccagaaccaaggaaagcatgtaccactcactgacatatgccaccatcctggagatgcaggccatgatgacctttgaccctcaggacatcctgcttgccggcaacatgatgaaggaggcacagatgctgtgtcagaggcaccggaggaagtcttctgtaacagattccttcagcagcctggtgaaccgccccacgctgggccaattcactgaagaggaaatccacgctgaggtctgctatgcagagtgcctgctgcagcgagcagccctgaccttcctgcaggacgagaacatggtgagcttcatcaaaggcggcatcaaagttcgaaacagctaccagacctacaaggagctggacagccttgttcagtcctcacaatactgcaagggtgagaaccacccgcactttgaaggaggagtgaagcttggtgtaggggccttcaacctgacactgtccatgcttcctactaggatcctgaggctgttggagtttgtggggttttcaggaaacaaggactatgggctgctgcagctggaggagggagcgtcagggcacagcttccgctctgtgctctgtgtcatgctcctgctgtgctaccacaccttcctcaccttcgtgctcggtactgggaacgtcaacatcgaggaggccgagaagctcttgaagccctacctgaaccggtaccctaagggtgccatcttcctgttctttgcagggaggattgaagtcattaaaggcaacattgatgcagccatccggcgtttcgaggagtgctgtgaggcccagcagcactggaagcagttccaccacatgtgctactgggagctgatgtggtgcttcacctacaagggccagtggaagatgtcctacttctacgccgacctgctcagcaaggagaactgctggtccaaggccacctacatttacatgaaggccgcctacctcagcatgtttgggaaggaggaccacaagccgttcggggacgacgaagtggaattatttcgagctgtgccaggcctgaagctcaagattgctgggaaatctctacccacagagaagtttgccatccggaagtcccggcgctacttctcctccaaccctatctcgctgccagtgcctgctctggaaatgatgtacatctggaacggctacgccgtgattgggaagcagccgaaactcacggatgggatacttgagattatcactaaggctgaagagatgctggagaaaggcccagagaacgagtactcagtggatgacgagtgcttggtgaaattgttgaaaggcctgtgtctgaaatacctgggccgtgtccaggaggccgaggagaattttaggagcatctctgccaatgaaaagaagattaaatatgaccactacttgatcccaaacgccctgctggagctggccctgctgcttatggagcaagacagaaacgaagaggccatcaaacttttggaatctgccaagcaaaactacaagaattactccatggagtcaaggacacactttcgaatccaggcagccacactccaagccaagtcttccctagagaacagcagcagatccatggtctcatcagtgtccttgtagctttgtgcagcagttccgggctggaagacagagacagctggacagagctcctgaaaacatttcaaaataccccctccccctgccctgccctgcctttggggtccaccggcactccagttggatggcacaacatagtgtatccgtgcagaagccgagctggcattttcaccagtgtagccaagggcct

SEQ ID NO: 190592 - DNA, 769 bp, Homo sapiens
  Payload ID: 17650
  Gene Name: tetratricopeptide repeat domain 39A
  ENST ID: ENST00000380849
  CDS Start-End: 205-769
caactttctcacggagctgtagtcacagacacgttcagagcagccttccccacctgcctcgtggcgttcactcctgtggggtgggccctgttactctcatccccattacagatgaggaaactgagacacagcacttaagtgacttgtcatcggtcacccaggaggactcctgagagcagcctccatgaggccctggaccagtgcatgaccgccctggacctcttcctcaccaaccagttctcagaagcactcagctacctcaagcccagaaccaaggaaagcatgtaccactcactgacatatgccaccatcctggagatgcaggccatgatgacctttgaccctcaggacatcctgcttgccggcaacatgatgaaggaggcacagatgctgtgtcagaggcaccggaggaagtcttctgtaacagattccttcagcagcctggtgaaccgccccacgctgggccaattcactgaagaggaaatccacgctgaggtctgctatgcagagtgcctgctgcagcgagcagccctgaccttcctgcagggttcctcacacggaggggcagtcaggcccagagccttgcatgatccctctcacgcctgcagctgcccacctgggccaggccgtcagcatcttttcctcctgcaggacgagaacatggtgagcttcatcaaaggcggcatcaaagttcgaaacagctaccagacctacaaggagctggacagccttgttcagtcctcacaatactgcaagggtgagaaccacc

SEQ ID NO: 190593 - DNA, 547 bp, Homo sapiens
  Payload ID: 17650
  Gene Name: tetratricopeptide repeat domain 39A
  ENST ID: ENST00000401051
  CDS Start-End: 74-547
actgtagcctccacggccgccgccgccgccgcgaggggccgcccgcggccccgtccgagcccggcccgcgcccatggcctttctgaccacctggaaggaggcggcctccgggaaaagcgaccgcaggactcctgagagcagcctccatgaggccctggaccagtgcatgaccgccctggacctcttcctcaccaaccagttctcagaagcactcagctacctcaagcccagaaccaaggaaagcatgtaccactcactgacatatgccaccatcctggagatgcaggccatgatgacctttgaccctcaggacatcctgcttgccggcaacatgatgaaggaggcacagatgctgtgtcagaggcaccggaggaagtcttctgtaacagattccttcagcagcctggtgaaccgccccacgctgggccaattcactgaagaggaaatccacgctgaggtctgctatgcagagtgcctgctgcagcgagcagccctgaccttcctgcagggttcctcacacggaggggcagtcaggcccagagccttg

SEQ ID NO: 190594 - DNA, 850 bp, Homo sapiens
  Payload ID: 17650
  Gene Name: tetratricopeptide repeat domain 39A
  ENST ID: ENST00000422925
  CDS Start-End: 169-850
ccccagtctgggggaggttaccgcagacagcctcatcccagttaagcagaagaggtgccggggctgccgagggaaggactgtgcctgtctgcactgactgtccatccggcctggatctttctctccaggactcctgagagcagcctccatgaggccctggaccagtgcatgaccgccctggacctcttcctcaccaaccagttctcagaagcactcagctacctcaagcccagaaccaaggaaagcatgtaccactcactgacatatgccaccatcctggagatgcaggccatgatgacctttgaccctcaggacatcctgcttgccggcaacatgatgaaggaggcacagatgctgtgtcagaggcaccggaggaagtcttctgtaacagattccttcagcagcctggtgaaccgccccacgctgggccaattcactgaagaggaaatccacgctgaggtctgctatgcagagtgcctgctgcagcgagcagccctgaccttcctgcaggacgagaacatggtgagcttcatcaaaggcggcatcaaagttcgaaacagctaccagacctacaaggagctggacagccttgttcagtcctcacaatactgcaagggtgagaaccacccgcactttgaaggaggagtgaagcttggtgtaggggccttcaacctgacactgtccatgcttcctactaggatcctgaggctgttggagtttgtggggttttcaggaaacaaggactatgggctgctgcagctggaggagggagcgtcagggcacagcttccgctctgtgctctgtgtcatgctcctgctgtgctaccacaccttcctcaccttcgtgctcg

SEQ ID NO: 190595 - DNA, 2790 bp, Homo sapiens
  Payload ID: 17650
  Gene Name: tetratricopeptide repeat domain 39A
  Uniprot ID: Q5SRH9
  ENST ID: ENST00000447632
  CDS Start-End: 50-1891
gtgggatttagtggctgggctgcaccccctgggggggcagcagagcccaatgggccagaagggccacaaagactccctttacccttgtggagggactcctgagagcagcctccatgaggccctggaccagtgcatgaccgccctggacctcttcctcaccaaccagttctcagaagcactcagctacctcaagcccagaaccaaggaaagcatgtaccactcactgacatatgccaccatcctggagatgcaggccatgatgacctttgaccctcaggacatcctgcttgccggcaacatgatgaaggaggcacagatgctgtgtcagaggcaccggaggaagtcttctgtaacagattccttcagcagcctggtgaaccgccccacgctgggccaattcactgaagaggaaatccacgctgaggtctgctatgcagagtgcctgctgcagcgagcagccctgaccttcctgcagggttcctcacacggaggggcagtcaggcccagagccttgcatgatccctctcacgcctgcagctgcccacctgggccaggccgtcagcatcttttcctcctgcaggacgagaacatggtgagcttcatcaaaggcggcatcaaagttcgaaacagctaccagacctacaaggagctggacagccttgttcagtcctcacaatactgcaagggtgagaaccacccgcactttgaaggaggagtgaagcttggtgtaggggccttcaacctgacactgtccatgcttcctactaggatcctgaggctgttggagtttgtggggttttcaggaaacaaggactatgggctgctgcagctggaggagggagcgtcagggcacagcttccgctctgtgctctgtgtcatgctcctgctgtgctaccacaccttcctcaccttcgtgctcggtactgggaacgtcaacatcgaggaggccgagaagctcttgaagccctacctgaaccggtaccctaagggtgccatcttcctgttctttgcagggaggattgaagtcattaaaggcaacattgatgcagccatccggcgtttcgaggagtgctgtgaggcccagcagcactggaagcagttccaccacatgtgctactgggagctgatgtggtgcttcacctacaagggccagtggaagatgtcctacttctacgccgacctgctcagcaaggagaactgctggtccaaggccacctacatttacatgaaggccgcctacctcagcatgtttgggaaggaggaccacaagccgttcggggacgacgaagtggaattatttcgagctgtgccaggcctgaagctcaagattgctgggaaatctctacccacagagaagtttgccatccggaagtcccggcgctacttctcctccaaccctatctcgctgccagtgcctgctctggaaatgatgtacatctggaacggctacgccgtgattgggaagcagccgaaactcacggatgggatacttgagattatcactaaggctgaagagatgctggagaaaggcccagagaacgagtactcagtggatgacgagtgcttggtgaaattgttgaaaggcctgtgtctgaaatacctgggccgtgtccaggaggccgaggagaattttaggagcatctctgccaatgaaaagaagattaaatatgaccactacttgatcccaaacgccctgctggagctggccctgctgcttatggagcaagacagaaacgaagaggccatcaaacttttggaatctgccaagcaaaactacaagaattactccatggagtcaaggacacactttcgaatccaggcagccacactccaagccaagtcttccctagagaacagcagcagatccatggtctcatcagtgtccttgtagctttgtgcagcagttccgggctggaagacagagacagctggacagagctcctgaaaacatttcaaaataccccctccccctgccctgccctgcctttggggtccaccggcactccagttggatggcacaacatagtgtatccgtgcagaagccgagctggcattttcaccagtgtagccaagggcctttgccaagggcagagcaggtggagccctctgcctgccctatcacacatacgggtacttgcttttcactgtgatgtttaagagaatgtatgaacagtttacattttccttagaaatacattgatgggatcacagttggctttaaaaaccaacaacaatcaaccacctgtaagtctttgtcttcacctattatcatctggaggtaaatctctttatatgatgatgccaaagggcaaattgcttttcaaattcagcaagttctcagcttgtgtgacggaaggtccttcagaggacctgaggaatgcctgggagaggctaagcctcaggcttcaatgcttctggggttgggcatgaggatgtacacagacacccactaccttactactcacacttcatttcactccttttgtaaatttccaatttaaaaatcaagcacgtctttttagtgagataaaatctgagctcttctgtagaaaaatcaatctctaccagtagaaaatgccagggcttgatggaagagctgtgtagccctttctatgccaaagccaggaaatttggggggcaggaggaggttctcagaatccagtctgtatctttgctgtatgccaaactgaaaccactgggaataatttatgaaacataaaaatcttctgtacttcactccaaggtacatttgcttactgacagcatttttgttaaaactgttattcttga

SEQ ID NO: 190596 - DNA, 978 bp, Homo sapiens
  Payload ID: 17650
  Gene Name: tetratricopeptide repeat domain 39A
  ENST ID: ENST00000439482
  CDS Start-End: 88-978
gcacagcgcccggctcggggttgcggcggcagcacctgggccgcgattggcgtccggctggggcagcgccgcccgcgcccctcggcgatgacctcggctggcggcgccccaggagccctgcccgcggggactcctgagagcagcctccatgaggccctggaccagtgcatgaccgccctggacctcttcctcaccaaccagttctcagaagcactcagctacctcaagcccagaaccaaggaaagcatgtaccactcactgacatatgccaccatcctggagatgcaggccatgatgacctttgaccctcaggacatcctgcttgccggcaacatgatgaaggaggcacagatgctgtgtcagaggcaccggaggaagtcttctgtaacagattccttcagcagcctggtgaaccgccccacgctgggccaattcactgaagaggaaatccacgctgaggtctgctatgcagagtgcctgctgcagcgagcagccctgaccttcctgcaggacgagaacatggtgagcttcatcaaaggcggcatcaaagttcgaaacagctaccagacctacaaggagctggacagccttgttcagtcctcacaatactgcaagggtgagaaccacccgcactttgaaggaggagtgaagcttggtgtaggggccttcaacctgacactgtccatgcttcctactaggatcctgaggctgttggagtttgtggggttttcaggaaacaaggactatgggctgctgcagctggaggagggagcgtcagggcacagcttccgctctgtgctctgtgtcatgctcctgctgtgctaccacaccttcctcaccttcgtgctcggtactgggaacgtcaacatcgaggaggccgagaagctcttgaagccctacctgaaccggtaccctaagggtgccatcttcctgttctttgcagggaggattgaagtcattaaaggcaacattgatgca

SEQ ID NO: 190597 - DNA, 2718 bp, Homo sapiens
  Payload ID: 17650
  Gene Name: tetratricopeptide repeat domain 39A
  Uniprot ID: Q5SRH9
  ENST ID: ENST00000413473
  CDS Start-End: 74-1819
actgtagcctccacggccgccgccgccgccgcgaggggccgcccgcggccccgtccgagcccggcccgcgcccatggcctttctgaccacctggaaggaggcggcctccgggaaaagcgaccgcaggactcctgagagcagcctccatgaggccctggaccagtgcatgaccgccctggacctcttcctcaccaaccagttctcagaagcactcagctacctcaagcccagaaccaaggaaagcatgtaccactcactgacatatgccaccatcctggagatgcaggccatgatgacctttgaccctcaggacatcctgcttgccggcaacatgatgaaggaggcacagatgctgtgtcagaggcaccggaggaagtcttctgtaacagattccttcagcagcctggtgaaccgccccacgctgggccaattcactgaagaggaaatccacgctgaggtctgctatgcagagtgcctgctgcagcgagcagccctgaccttcctgcaggacgagaacatggtgagcttcatcaaaggcggcatcaaagttcgaaacagctaccagacctacaaggagctggacagccttgttcagtcctcacaatactgcaagggtgagaaccacccgcactttgaaggaggagtgaagcttggtgtaggggccttcaacctgacactgtccatgcttcctactaggatcctgaggctgttggagtttgtggggttttcaggaaacaaggactatgggctgctgcagctggaggagggagcgtcagggcacagcttccgctctgtgctctgtgtcatgctcctgctgtgctaccacaccttcctcaccttcgtgctcggtactgggaacgtcaacatcgaggaggccgagaagctcttgaagccctacctgaaccggtaccctaagggtgccatcttcctgttctttgcagggaggattgaagtcattaaaggcaacattgatgcagccatccggcgtttcgaggagtgctgtgaggcccagcagcactggaagcagttccaccacatgtgctactgggagctgatgtggtgcttcacctacaagggccagtggaagatgtcctacttctacgccgacctgctcagcaaggagaactgctggtccaaggccacctacatttacatgaaggccgcctacctcagcatgtttgggaaggaggaccacaagccgttcggggacgacgaagtggaattatttcgagctgtgccaggcctgaagctcaagattgctgggaaatctctacccacagagaagtttgccatccggaagtcccggcgctacttctcctccaaccctatctcgctgccagtgcctgctctggaaatgatgtacatctggaacggctacgccgtgattgggaagcagccgaaactcacggatgggatacttgagattatcactaaggctgaagagatgctggagaaaggcccagagaacgagtactcagtggatgacgagtgcttggtgaaattgttgaaaggcctgtgtctgaaatacctgggccgtgtccaggaggccgaggagaattttaggagcatctctgccaatgaaaagaagattaaatatgaccactacttgatcccaaacgccctgctggagctggccctgctgcttatggagcaagacagaaacgaagaggccatcaaacttttggaatctgccaagcaaaactacaagaattactccatggagtcaaggacacactttcgaatccaggcagccacactccaagccaagtcttccctagagaacagcagcagatccatggtctcatcagtgtccttgtagctttgtgcagcagttccgggctggaagacagagacagctggacagagctcctgaaaacatttcaaaataccccctccccctgccctgccctgcctttggggtccaccggcactccagttggatggcacaacatagtgtatccgtgcagaagccgagctggcattttcaccagtgtagccaagggcctttgccaagggcagagcaggtggagccctctgcctgccctatcacacatacgggtacttgcttttcactgtgatgtttaagagaatgtatgaacagtttacattttccttagaaatacattgatgggatcacagttggctttaaaaaccaacaacaatcaaccacctgtaagtctttgtcttcacctattatcatctggaggtaaatctctttatatgatgatgccaaagggcaaattgcttttcaaattcagcaagttctcagcttgtgtgacggaaggtccttcagaggacctgaggaatgcctgggagaggctaagcctcaggcttcaatgcttctggggttgggcatgaggatgtacacagacacccactaccttactactcacacttcatttcactccttttgtaaatttccaatttaaaaatcaagcacgtctttttagtgagataaaatctgagctcttctgtagaaaaatcaatctctaccagtagaaaatgccagggcttgatggaagagctgtgtagccctttctatgccaaagccaggaaatttggggggcaggaggaggttctcagaatccagtctgtatctttgctgtatgccaaactgaaaccactgggaataatttatgaaacataaaaatcttctgtacttcactccaaggtacatttgcttactgacagcatttttgttaaaactgttattcttga

SEQ ID NO: 190598 - DNA, 931 bp, Homo sapiens
  Payload ID: 17650
  Gene Name: tetratricopeptide repeat domain 39A
  ENST ID: ENST00000411642
  CDS Start-End: 93-931
tctttgtctgcacgaatgcccccattaatgcgggaggatggtgacggctcaggactcctgagagcagcctccatgaggccctggaccagtgcatgaccgccctggacctcttcctcaccaaccagttctcagaagcactcagctacctcaagcccagaaccaaggaaagcatgtaccactcactgacatatgccaccatcctggagatgcaggccatgatgacctttgaccctcaggacatcctgcttgccggcaacatgatgaaggaggcacagatgctgtgtcagaggcaccggaggaagtcttctgtaacagattccttcagcagcctggtgaaccgccccacgctgggccaattcactgaagaggaaatccacgctgaggtctgctatgcagagtgcctgctgcagcgagcagccctgaccttcctgcaggacgagaacatggtgagcttcatcaaaggcggcatcaaagttcgaaacagctaccagacctacaaggagctggacagccttgttcagtcctcacaatactgcaagggtgagaaccacccgcactttgaaggaggagtgaagcttggtgtaggggccttcaacctgacactgtccatgcttcctactaggatcctgaggctgttggagtttgtggggttttcaggaaacaaggactatgggctgctgcagctggaggagggagcgtcagggcacagcttccgctctgtgctctgtgtcatgctcctgctgtgctaccacaccttcctcaccttcgtgctcggtactgggaacgtcaacatcgaggaggccgagaagctcttgaagccctacctgaaccggtaccctaagggtgccatcttcctgttctttgcagggaggattgaagtcattaaaggcaacattgatgcagccatccggcgtttcgaggagtgctgtga

SEQ ID NO: 190599 - DNA, 1780 bp, Homo sapiens
  Payload ID: 17650
  Gene Name: tetratricopeptide repeat domain 39A
  Uniprot ID: Q5SRH9
  ENST ID: ENST00000530004
  CDS Start-End: 216-881
catggcaggccgttagggcagagggagctgggcagggcacagcagggcaggagtgtgtttgatgtgtcctgggaaccgccctgaggccgtcgtgtggctggagtgctgcaggtgtcaaggaaattgtaggagatgtctcctgagtgtgatggaatataaccagatttccagaaggaactgacatgatctgacttaaaaaggccacctacatttacatgaaggccgcctacctcagcatgtttgggaaggaggaccacaagccgttcggggacgacgaagtggaattatttcgagctgtgccaggcctgaagctcaagattgctgggaaatctctacccacagagaagtttgccatccggaagtcccggcgctacttctcctccaaccctatctcgctgccagtgcctgctctggaaatgatgtacatctggaacggctacgccgtgattgggaagcagccgaaactcacggatgggatacttgagattatcactaaggctgaagagatgctggagaaaggcccagagaacgagtactcagtggatgacgagtgcttggtgaaattgttgaaaggcctgtgtctgaaatacctgggccgtgtccaggaggccgaggagaattttaggagcatctctgccaatgaaaagaagattaaatatgaccactacttgatcccaaacgccctgctggagctggccctgctgcttatggagcaagacagaaacgaagaggccatcaaacttttggaatctgccaagcaaaactacaagaattactccatggagtcaaggacacactttcgaatccaggcagccacactccaagccaagtcttccctagagaacagcagcagatccatggtctcatcagtgtccttgtagctttgtgcagcagttccgggctggaagacagagacagctggacagagctcctgaaaacatttcaaaataccccctccccctgccctgccctgcctttggggtccaccggcactccagttggatggcacaacatagtgtatccgtgcagaagccgagctggcattttcaccagtgtagccaagggcctttgccaagggcagagcaggtggagccctctgcctgccctatcacacatacgggtacttgcttttcactgtgatgtttaagagaatgtatgaacagtttacattttccttagaaatacattgatgggatcacagttggctttaaaaaccaacaacaatcaaccacctgtaagtctttgtcttcacctattatcatctggaggtaaatctctttatatgatgatgccaaagggcaaattgcttttcaaattcagcaagttctcagcttgtgtgacggaaggtccttcagaggacctgaggaatgcctgggagaggctaagcctcaggcttcaatgcttctggggttgggcatgaggatgtacacagacacccactaccttactactcacacttcatttcactccttttgtaaatttccaatttaaaaatcaagcacgtctttttagtgagataaaatctgagctcttctgtagaaaaatcaatctctaccagtagaaaatgccagggcttgatggaagagctgtgtagccctttctatgccaaagccaggaaatttggggggcaggaggaggttctcagaatccagtctgtatctttgctgtatgccaaactgaaaccactgggaataatttatgaaacataaaaatcttctgtacttcactccaaggtacatttgcttactgacagcatttttgttaaaactgttattcttga

SEQ ID NO: 190600 - DNA, 577 bp, Homo sapiens
  Payload ID: 17650
  Gene Name: tetratricopeptide repeat domain 39A
  ENST ID: ENST00000527205
  CDS Start-End: 74-577
actgtagcctccacggccgccgccgccgccgcgaggggccgcccgcggccccgtccgagcccggcccgcgcccatggcctttctgaccacctggaaggaggcggcctccgggaaaagcgaccgcaggaccttccctgcctgggagaatccagttgtgcatcgtcctgtgggcaccagggagccttcggggtctcccgtgactcctgagagcagcctccatgaggccctggaccagtgcatgaccgccctggacctcttcctcaccaaccagttctcagaagcactcagctacctcaagcccagaaccaaggaaagcatgtaccactcactgacatatgccaccatcctggagatgcaggccatgatgacctttgaccctcaggacatcctgcttgccggcaacatgatgaaggaggcacagatgctgtgtcagaggcaccggaggaagtcttctgtaacagattccttcagcagcctggtgaaccgccccacgctgggccaattcactgaagaggaaatccacgctgaggtctgctatgcagagtgcctgctgcagcgagcagccctgaccttcctg

SEQ ID NO: 190601 - DNA, 519 bp, Homo sapiens
  Payload ID: 17650
  Gene Name: tetratricopeptide repeat domain 39A
  ENST ID: ENST00000532836
  CDS Start-End: 146-519
cagacagcctcatcccagttaagcagaagaggtgccggggctgccgagggaaggactgtgcctgtctgcactgactgtccatccggcctggatctttctctccaggactcctgagagcagcctccatgaggccctggaccagtgcatgaccgccctggacctcttcctcaccaaccagttctcagaagcactcagctacctcaagcccagaaccaaggaaagcatgtaccactcactgacatatgccaccatcctggagatgcaggccatgatgacctttgaccctcaggacatcctgcttgccggcaacatgatgaaggaggcacagatgctgtgtcagaggcaccggaggaagtcttctgtaacagattccttcagcagcctggtgaaccgccccacgctgggccaattcactgaagaggaaatccacgctgaggtctgctatgcagagtgcctgctgcagcgagcagccctgaccttcctgcagggttcctcacacggaggggcagtcaggcccag

SEQ ID NO: 190602 - DNA, 429 bp, Homo sapiens
  Payload ID: 17650
  Gene Name: tetratricopeptide repeat domain 39A
  ENST ID: ENST00000525906
  CDS Start-End: 92-429
atttagtgggcaaggtgctggggttgactcccggctctgccccagtagctctggggtcccaggaagcagaggtggggccacctacatttacatgaaggccgcctacctcagcatgtttgggaaggaggaccacaagccgttcggggacgacgaagtggaattatttcgagctgtgccaggcctgaagctcaagattgctgggaaatctctacccacagagaagtttgccatccggaagtcccggcgctacttctcctccaaccctatctcgctgccagtgcctgctctggaaatgatgtacatctggaacggctacgccgtgattgggaagcagccgaaactcacggatgggatacttgagattatcactaaggctgaagagatgctggagaaaggcccagagaacgagtactcagtggatgacgagtg

SEQ ID NO: 190603 - DNA, 3053 bp, Homo sapiens
  Payload ID: 17651
  Gene Name: tetratricopeptide repeat domain 39B
  Uniprot ID: Q5VTQ0
  ENST ID: ENST00000297615
  CDS Start-End: 38-1879
aagtggcccggccagcggcgcggcgtccggggaggaaatggatgctgtgctggcctgccggctccgggggcggggaaatcgagtagctgcactcaggccccgcccgagacccggagggagcgccgggccgtccccttttgccctcctttgcgctgggctgagcccagagccgagagcaggagtcggctctgagttccctgcttggtttttgggtggcagcagccagaggaggaatatggcgctcttaggcagccgagcggagctggaagcggacgaggacgttttcgaagatgccttggaaaccatctcaatggctaaggagagtatgtaccatgccttgggctacagtaccattgtggtgttgcaggctgtcctgaccttcgagcaacaggacatccagaacggcatttctgccatgaaggacgctttacaaacctgccaaaaatacaggaaaaaatacacagttgtagaatctttctcaagtcttctttctagaggatccctggagcaactgagtgaagaggaaatgcatgctgaaatctgttatgccgagtgtctcctacagaaagctgcactcacgtttgtgcaggatgaaaatatgatcaacttcatcaaaggtggactcaaaattagaacaagttaccaaatatataaagaatgtctttctatcctgcatgaaattcagaagaacaaacttcagcaggaattcttctatgagtttgaagggggtgtcaagcttggcagtggggcctttaatttgatgctgtcccttttaccagcaaggattatcagactactagaatttattggattttctgggaatagggagttgggcctcctgcagttacgtgaaggtgcttcaggaaggagcatgaggtctgcactgtgctgcttaaccatcttagcttttcatacttacatctccctaatacttggtacaggagaagtgaatgttgcggaagcagagcgtctcctggcacccttcctccagcagtttccaaatggctcactcgtgttgttttatcatgcccgaatagagttgctgaaagggaatcttgaagaggcacaagaagtatttcaaaaatgcatttcagttcaagaagaatggaaacagtttcaccatctctgctactgggagctaatgtggattaatgttttccaacaaaactggatgcaggcatattactattcagatctgctttgcaaagagagtaaatggtccaaggcaacttatgtgttcttgaaagcagcaattttgagtatgcttccagaggaggatgtagtagcaacgaatgagaatgtggtaactttattcagacaggtggacagcttgaagcagagaattgccgggaaatctatccctactgagaagtttgctgtgaggaaggctcggcgttactccgcctccttacctgcacctgtgaagctcatcttacctgccctggaaatgatgtatgtctggaatggtttttcaatagtgagcaaaagaaaagacctttctgaaaatctgttagtaactgttgaaaaagctgaggcagctttacaaagtcaaaattttaacagcttctctgtggatgatgagtgcttagtgaagttacttaaaggatgttgcctcaagaacttacagcggcccttgcaagctgaactatgttacaatcatgttgtggaaagtgaaaagctactgaagtatgaccactacctagtgccgttcactctatttgaattggcatctttgtataaaagccagggggaaattgacaaggccataaagttcctagaaactgcaaggaacaactacaaagattactccctggagtccagactacacttcagaattcaggcagctcttcacctctggagaaaaccttcctcagattgatcagaacttgaaggatggaatttttcctcaattagcatcggcatctgctatagattcaaccttatattaaagtggaaaaatgatcttgtgaataagagacaaaaaaacagtttttttggtcaatattttctatcatctgagagatttactgttggtctacataattttttttcctatggaatggcattctatattatctagaaaattcttatattttgcctcccccaaaagaatttcatattatttgaattagggggcgaagaagtcttttgaaagacttgcagatgcaatagtctaattagattatttatttttttaatgtgaaaattaatattgtttagcaaatagcttacaagttgagccaattttggatttgttgggtagttaaacttcagagatattttgttgcctgtatttaaatttcagaagataaataaatatcattgcatttaaaatagcttaacagtgaccttcagaagacttctgaaaaagacagtctgagaacatgaacacggatcgatataatgtacttcatgggttgaagagacctttctctataaaggatgatgcagtattcagttagtggttttttactcttcatttgattaaaggtggtgacgttttggagagactgattttgaatgtacttaagtctattataataacaaaattcaaaacccctgtgtatctaaagggaaggaagtgtcatattttaggaatttttcttaaccttagcaatgagagcctaaaatacatacatggattatttttcttctaggaagtaaatttcctgctgctttaaatgatatgtaaaatatcaataatttttacacttaagatgttggtaagacctagttttctaatctctctagcactgtgatgtctccttgtagataatctggaccttgcttagtcctttagttgggaaacagaatcagggcatagagcagaagagagcttgacactccatatggtcctggttctgctacccattagcgattagtgaggagacctttagggagtccactgtgccctgtgtgtcaccacattttcttctgtgaaatcaagattaaagaacagatgactttcaaggtctttttcagttttataactgtgagtctatgtattaggtatttattttcaacaaatgactttaaaatgtcgaatgcaaacc

SEQ ID NO: 190604 - DNA, 3221 bp, Homo sapiens
  Payload ID: 17651
  Gene Name: tetratricopeptide repeat domain 39B
  Uniprot ID: Q5VTQ0
  ENST ID: ENST00000380850
  CDS Start-End: 38-2047
aagtggcccggccagcggcgcggcgtccggggaggaaatggatgctgtgctggcctgccggctccgggggcggggaaatcgagtagctgcactcaggccccgcccgagacccggagggagcgccgggccgtccccttttgccctcctttgcgctgggctgagcccagagccgagagcaggagtcggctctgagttccctgcttggtttttgggtggcagcagccagaggaggaatatggcgctcttaggcagccgagcggagctggaagcggacgaggacgttttcgaagatgccttggaaaccatctcaatatcttctcactcagatatggcaacaagcagccttcactttgcatcatgtgatacacaacaggcgcccagacagcgcggagcgtctactgtcagcagttcatcatcaaccaaggtggatctcaagagtggcctcgaagaatgtgctgtggcattgaacttatttctaagcaacaaatttacagacgccttagaattgcttcgcccctgggctaaggagagtatgtaccatgccttgggctacagtaccattgtggtgttgcaggctgtcctgaccttcgagcaacaggacatccagaacggcatttctgccatgaaggacgctttacaaacctgccaaaaatacaggaaaaaatacacagttgtagaatctttctcaagtcttctttctagaggatccctggagcaactgagtgaagaggaaatgcatgctgaaatctgttatgccgagtgtctcctacagaaagctgcactcacgtttgtgcaggatgaaaatatgatcaacttcatcaaaggtggactcaaaattagaacaagttaccaaatatataaagaatgtctttctatcctgcatgaaattcagaagaacaaacttcagcaggaattcttctatgagtttgaagggggtgtcaagcttggcagtggggcctttaatttgatgctgtcccttttaccagcaaggattatcagactactagaatttattggattttctgggaatagggagttgggcctcctgcagttacgtgaaggtgcttcaggaaggagcatgaggtctgcactgtgctgcttaaccatcttagcttttcatacttacatctccctaatacttggtacaggagaagtgaatgttgcggaagcagagcgtctcctggcacccttcctccagcagtttccaaatgtacgctcagtatttcaaagtgcacaagaagtatttcaaaaatgcatttcagttcaagaagaatggaaacagtttcaccatctctgctactgggagctaatgtggattaatgttttccaacaaaactggatgcaggcatattactattcagatctgctttgcaaagagagtaaatggtccaaggcaacttatgtgttcttgaaagcagcaattttgagtatgcttccagaggaggatgtagtagcaacgaatgagaatgtggtaactttattcagacaggtggacagcttgaagcagagaattgccgggaaatctatccctactgagaagtttgctgtgaggaaggctcggcgttactccgcctccttacctgcacctgtgaagctcatcttacctgccctggaaatgatgtatgtctggaatggtttttcaatagtgagcaaaagaaaagacctttctgaaaatctgttagtaactgttgaaaaagctgaggcagctttacaaagtcaaaattttaacagcttctctgtggatgatgagtgcttagtgaagttacttaaaggatgttgcctcaagaacttacagcggcccttgcaagctgaactatgttacaatcatgttgtggaaagtgaaaagctactgaagtatgaccactacctagtgccgttcactctatttgaattggcatctttgtataaaagccagggggaaattgacaaggccataaagttcctagaaactgcaaggaacaactacaaagattactccctggagtccagactacacttcagaattcaggcagctcttcacctctggagaaaaccttcctcagattgatcagaacttgaaggatggaatttttcctcaattagcatcggcatctgctatagattcaaccttatattaaagtggaaaaatgatcttgtgaataagagacaaaaaaacagtttttttggtcaatattttctatcatctgagagatttactgttggtctacataattttttttcctatggaatggcattctatattatctagaaaattcttatattttgcctcccccaaaagaatttcatattatttgaattagggggcgaagaagtcttttgaaagacttgcagatgcaatagtctaattagattatttatttttttaatgtgaaaattaatattgtttagcaaatagcttacaagttgagccaattttggatttgttgggtagttaaacttcagagatattttgttgcctgtatttaaatttcagaagataaataaatatcattgcatttaaaatagcttaacagtgaccttcagaagacttctgaaaaagacagtctgagaacatgaacacggatcgatataatgtacttcatgggttgaagagacctttctctataaaggatgatgcagtattcagttagtggttttttactcttcatttgattaaaggtggtgacgttttggagagactgattttgaatgtacttaagtctattataataacaaaattcaaaacccctgtgtatctaaagggaaggaagtgtcatattttaggaatttttcttaaccttagcaatgagagcctaaaatacatacatggattatttttcttctaggaagtaaatttcctgctgctttaaatgatatgtaaaatatcaataatttttacacttaagatgttggtaagacctagttttctaatctctctagcactgtgatgtctccttgtagataatctggaccttgcttagtcctttagttgggaaacagaatcagggcatagagcagaagagagcttgacactccatatggtcctggttctgctacccattagcgattagtgaggagacctttagggagtccactgtgccctgtgtgtcaccacattttcttctgtgaaatcaagattaaagaacagatgactttcaaggtctttttcagttttataactgtgagtctatgtattaggtatttattttcaacaaatgactttaaaatgtcgaatgcaaacc

SEQ ID NO: 190605 - DNA, 10483 bp, Homo sapiens
  Payload ID: 17651
  Gene Name: tetratricopeptide repeat domain 39B
  Uniprot ID: Q5VTQ0
  ENST ID: ENST00000512701
  CDS Start-End: 38-2086
aagtggcccggccagcggcgcggcgtccggggaggaaatggatgctgtgctggcctgccggctccgggggcggggaaatcgagtagctgcactcaggccccgcccgagacccggagggagcgccgggccgtccccttttgccctcctttgcgctgggctgagcccagagccgagagcaggagtcggctctgagttccctgcttggtttttgggtggcagcagccagaggaggaatatggcgctcttaggcagccgagcggagctggaagcggacgaggacgttttcgaagatgccttggaaaccatctcaatatcttctcactcagatatggcaacaagcagccttcactttgcatcatgtgatacacaacaggcgcccagacagcgcggagcgtctactgtcagcagttcatcatcaaccaaggtggatctcaagagtggcctcgaagaatgtgctgtggcattgaacttatttctaagcaacaaatttacagacgccttagaattgcttcgcccctgggctaaggagagtatgtaccatgccttgggctacagtaccattgtggtgttgcaggctgtcctgaccttcgagcaacaggacatccagaacggcatttctgccatgaaggacgctttacaaacctgccaaaaatacaggaaaaaatacacagttgtagaatctttctcaagtcttctttctagaggatccctggagcaactgagtgaagaggaaatgcatgctgaaatctgttatgccgagtgtctcctacagaaagctgcactcacgtttgtgcaggatgaaaatatgatcaacttcatcaaaggtggactcaaaattagaacaagttaccaaatatataaagaatgtctttctatcctgcatgaaattcagaagaacaaacttcagcaggaattcttctatgagtttgaagggggtgtcaagcttggcagtggggcctttaatttgatgctgtcccttttaccagcaaggattatcagactactagaatttattggattttctgggaatagggagttgggcctcctgcagttacgtgaaggtgcttcaggaaggagcatgaggtctgcactgtgctgcttaaccatcttagcttttcatacttacatctccctaatacttggtacaggagaagtgaatgttgcggaagcagagcgtctcctggcacccttcctccagcagtttccaaatggctcactcgtgttgttttatcatgcccgaatagagttgctgaaagggaatcttgaagaggcacaagaagtatttcaaaaatgcatttcagttcaagaagaatggaaacagtttcaccatctctgctactgggagctaatgtggattaatgttttccaacaaaactggatgcaggcatattactattcagatctgctttgcaaagagagtaaatggtccaaggcaacttatgtgttcttgaaagcagcaattttgagtatgcttccagaggaggatgtagtagcaacgaatgagaatgtggtaactttattcagacaggtggacagcttgaagcagagaattgccgggaaatctatccctactgagaagtttgctgtgaggaaggctcggcgttactccgcctccttacctgcacctgtgaagctcatcttacctgccctggaaatgatgtatgtctggaatggtttttcaatagtgagcaaaagaaaagacctttctgaaaatctgttagtaactgttgaaaaagctgaggcagctttacaaagtcaaaattttaacagcttctctgtggatgatgagtgcttagtgaagttacttaaaggatgttgcctcaagaacttacagcggcccttgcaagctgaactatgttacaatcatgttgtggaaagtgaaaagctactgaagtatgaccactacctagtgccgttcactctatttgaattggcatctttgtataaaagccagggggaaattgacaaggccataaagttcctagaaactgcaaggaacaactacaaagattactccctggagtccagactacacttcagaattcaggcagctcttcacctctggagaaaaccttcctcagattgatcagaacttgaaggatggaatttttcctcaattagcatcggcatctgctatagattcaaccttatattaaagtggaaaaatgatcttgtgaataagagacaaaaaaacagtttttttggtcaatattttctatcatctgagagatttactgttggtctacataattttttttcctatggaatggcattctatattatctagaaaattcttatattttgcctcccccaaaagaatttcatattatttgaattagggggcgaagaagtcttttgaaagacttgcagatgcaatagtctaattagattatttatttttttaatgtgaaaattaatattgtttagcaaatagcttacaagttgagccaattttggatttgttgggtagttaaacttcagagatattttgttgcctgtatttaaatttcagaagataaataaatatcattgcatttaaaatagcttaacagtgaccttcagaagacttctgaaaaagacagtctgagaacatgaacacggatcgatataatgtacttcatgggttgaagagacctttctctataaaggatgatgcagtattcagttagtggttttttactcttcatttgattaaaggtggtgacgttttggagagactgattttgaatgtacttaagtctattataataacaaaattcaaaacccctgtgtatctaaagggaaggaagtgtcatattttaggaatttttcttaaccttagcaatgagagcctaaaatacatacatggattatttttcttctaggaagtaaatttcctgctgctttaaatgatatgtaaaatatcaataatttttacacttaagatgttggtaagacctagttttctaatctctctagcactgtgatgtctccttgtagataatctggaccttgcttagtcctttagttgggaaacagaatcagggcatagagcagaagagagcttgacactccatatggtcctggttctgctacccattagcgattagtgaggagacctttagggagtccactgtgccctgtgtgtcaccacattttcttctgtgaaatcaagattaaagaacagatgactttcaaggtctttttcagttttataactgtgagtctatgtattaggtatttattttcaacaaatgactttaaaatgtcgaatgcaaaccattcccacttggagtgttttatttttcaatcatcatcattgcccccaactccccacatgtatgtgttgtggcatccagagtgagaaaagacaatttatgagttgatgaatctgggccttatttctatttccattttgaagaataacttgtcatagaagcctctgcagtttaacagaaggagccacatattgggagtcacgagttcatctctgtgggttaatagttccatgacacggagtacgtagctcagcttttcaggggttcagttgccccactatggatagcggtgtggtatttggtacttgtgagggctcaattagataaaacatatgatagctttttgtaaactgtaaaaggctatacaaaagtatgaattattataataattatggttttttatgtctggattacagtatcaacacaaaagtattggctgatactgtggtttgtgttgtaaaatgaaagaagtgtagaaattcaaataccttactgtgtattcatgtgtttgatgttgacagtaggctacccaggttatatgaacctgctcctgccgttccctgccacatggacctgtatcaagcagtgtgtggcttgttttcttcaaggtactgattcttgaccaacactgaggatgtatatccaatgaaagatagatatcaatggcggtagatatcaatgtgttattagtaatacaactttaggtacagacaaaatagaaaataaaattaactgtcattataattagtagtggaaaatacattaaaaattatttgtgtatagctttggaaaaaagttttccaaaaaaagctttttggaaaaaagctcttagaagagctttggtaacattatttttgaaagcgcacactcacattgtgactgtgggtatactgagcatatattcttacattgttactgtgagaagctgcaagtcagtgctgcaagtcagtaacaaattctcttttggggataaaatgaaacagttttaagcttagagtggccatttttattttaactctgcattactaaacaaatataaaagaaattcatctccatttaaaaatcttttttgttatttatattttgttttatttttgtttcctattctttatgcagttacctgatactatggacagtatatccagtggatcttttagtactgtaatatcaaaatgctacaaatatttatgtttcctgctatgttcaagatattgtagtggcaccaacttcttgggcatcagctaatattgcattttggagtcattagggtgttctgtgaagaatgaatactgaagtgacagttttatctagttttttgaggggcatttatgatggggttgggttgccattgtgtctgacagtgcaattcatgtagttcctggcataattgccttttttttttccttaatggagaggcagggttctgattggtgctgtataaatttaagtaactttgtgctttgtaggaatggtgacaaggaaggcatgatttccccctgacaaggaatgaaaggtgaactgtatcagctcttatctggacatatatgttaatgttttctatgctccctgatacaagaagtttccaagttatataggaaaattaagtccattgatcctgtctttatcctcagagggcagaaatgagacaagtggataaaggctgtaggaagctgaattccagattaatcagtgccgaggaagatttttcattatcggaaaacccaacagtctaaaatcaataaccagttcttctgcaaaggggtgagtttaagcagggctaatgtgactgtcatttctgcctgtcctgcaagcttagactagttgaactttgaggtcactctatgattcttttattagggcttcaaatcagcagggagtgtgtaaagaaaaaatgctccccccctaccatttcaaataaaagtgaatgttttctctttcaaagctactattagaggtagttgtgatagacactaacaatccccggtgttaatactttccactccttttattttattttaatttaatattattttattgagacagagtctcgctctgtcacccaggctggagtgcagtggcgtaatctctgctcactgcaagctcctcctcccaggttcacgccattctcctgcctcagcctcccgagtagctgggactacaggcgcccgccaccacgcctggctaattttttgtattttgagtagagacggggtttcaccgtgttagccaggatggtctcgatctcctgaactcgtgatccactcctttttaaagtgagtctagtctgttgatcttcataaataggagggttttcctccagcttggacattaaaaataatttttaaaaagatctttgtggctaactggaaaatcttctggaattatctaatgcttcattcatttccctccatttctgttttttttttttgtatttatactctgcatatttagaaatcttaaattcaaatacatttagttaaaatgagttgacgaagactccagtgatgttttaataccctaagattttgtgattccttgggcctggaatggatcttagaaaattaccttgccctcatgagcctgtaaaccgtgttgtttcccctcagtcttgctctgtccagtacagtagcccctcgccacacatggctgcggagcacccggaatggcttacagcacatgtgggaatggtgctgaatgctgaggaagcattcactcatacgtgctgcacttcttaaaggcctcccaatagcctgctttgcggagttctggcttttacttgctgtctactatgatcacctgatttgtgcttcacatacatatctgtgaagtttgctttttctatttaaagtgcccttaaactttcatttgatcgtgtttatctgcagatggtcagtgtcattggcatatttgaacattattctgccctccctccgccaaactccttatgtactagattaagaaattttatttttgagatgatgattttaatttgattttacagacattcttttttacaaagtacagttgttagagttatagaagagtgattcacatctttgagaagatagatttcatgattaatatatatattttttgagacagagtttcgctcttgttgcccaggctggagtgcaattgcacgatctaggctcactgcaacctctgcctcccaggttcaagcaattctcctgcctcagcctcccaagtagctgggattacaggcatgtgccaccatgcccagctaattttgtatttttagtagagatggggtttctccatgttggtcagtctggtctcgaactcccaacttcaggtgatctggccgccttggcctcccaaagtgctgggattacaggcgtgagccaccatgcctggcccaatattttctaagataaaattattctgagaaatctagtggaatcttttccattgctttgttattaatgtttcaacactgactttctcaactaggccagtattactatttaaaggtttttagaggctggcaatggtggctcacgcctgtaatcctaaaactttgggaagccaaagttggggggcgtcacttgggaccaggggtttgaggccagcctgggcaatacagtgagaacctgtctttacaaaaaaaaaaaaaaaaaaaaaaatgagccgtgcatggtggagtgcacttgtagtcctagctactagggagacttaggtgggataattgcttgatcccaggagtttgaggctacagtgagctaagatcatgccactgcactccaccccaggtgacagagtgagaccctgtctcaaaaaaaaaaaaaaaaaaaaaaaaaatatatatatatatatatatatatatatatatatatatatatatataaaataaaggtttgtggacacatgttacccatttagagaataatttatttttgaatgtgtatgatacctaagtgatatgcatatatataattaagacattttaaatctcttcagatatttcttcataagatacatgtatctatagatagctatatacaaaactacttacaaataataaatagacattgttttatacagttctttccaaagaaatgcaggatttcttatcctagtccttcctccccgagtccagttatttacatatttttgtctttaagtgttagattgcttgtttctgctgcctattgttggtagttttgtcttttacacatttgctgttagatttagttattttgaaatgttgaacttgaaatgtaatgaaaaggacacatcagaatttatcatcagggaagatatcttttatgttgagcagctgctatctgatcttgacagactgtcctcttagaggactgttgaagtccattctagtcattttgtaacttcataactgcagaaagaaatgatgcaaggactgtttagtggactgagatggctgagcaggttcttggcctgaattatccagaggagataggtggatctagcttcagaggaagtctacaccccattcccttctgcttacaatgtacccatgatatgtgtttagcacagtaatactgtaacaggacatcacatggaaaaatcaaagcagctggctcactgtatttaactgaaaagaatgcctacagattggatatttaatagggaaaattaaggcactttaataacaaacttcattatgtgaaacttgttgaatattaacatacaatataccttgtatattaatgccatagtttttagaaacactaatttaaacaacaaatttaaggggtgctggcatatcccagtgacaccttcagttttattgctgcttagtattttctagtaaattagttttaattattggtagtctgttgggcaccatttgggaaagaaataaattggtctcagtgtagcagacttgtagccaaaaactttgaataaaaaataagtataataaagaatattatttcatttttaaaggaattgtattattttgaagtgctgtgtggttgatatggtttggttgtgtctctacccaaatctcttattgaattgtagttcccataatccccacatgggagggacccagtgggaggtgactgaatcatgggggcagttttccccatgctattctcatgatagtgattgagttctcacgagatttgatggttttataaggggcttttccccctttgctcagcacttctctttcctgccgccctgtgaagaagaaggtgcctttctttccctttgccttccgccattattctaagtttcctgaggccttctcagccatgcagaattgtgagtcaattatacctcttttttaaataaattatccagtctcagatatttcttcatagcagtgtgagaatggactaatacaatggtcttaatcaatttgaaggtatgacactctttgctttggaaatcatgtagacattttaagtcattcctatttttaatgtagacaaacgtccaggtagcaattttggggataataaatgagttcaccctttttttttctttttttccctgagacagagtttgctcttgttgcccaggctggagtttaatggcacgatcttggcttaccacaacctctgcctcctgggttcaagcaattctcctgcctcaggctcccaagtagctgggattacaggcatgtgccatcacacccggctaatttttgtatttttagtagagacagggtatctccatgttggtcaggctggtctcgaactcctgacctcaggtgatccgcccacttcagcctcccaaagtgctgggattacaggcgtgagccatcatgcctggccgagttcagcttttattcacattttttccccaaagtgatttattcttcaaagtagacagttatgttctatagagtgttttgttttttctttaagaaaataatttacataaacagagattatggtaaacattttaaatcttaggctgttggttaaatttaatggtttaagcactgttgggttctctttaattaatatttgcagaaggagaacatatgtgtttcactgatatgtatggtccagaaaaattacttaattctcaaaaatatgttgcattctcatattgtgttagggaaaattccataagtagtctatttttttttttcttttgctgactgttaacatccaaacacctgaatgaaaactgactcatttctgtattggtgtttaaaaatattgatttgcagatgttcacagaacacttgcattttttgattcacattgctaaatcaaatgtaaaggcaaatatgtatatttaataaatgagaagtatttttttattactgaaatttattctcaaagcaaatgtattttgtagatgtttcatttgggagattttgctttgccttaaaacatacaaaataaacctgtcttgtggtctgcccacctcaaaacctctgttaacttgacatgtagaaggagttcagaattctttgataatgtgtggttttcacttttgtttggattaaacaaaaataaaattagagtccatagcactttgtaaactaatgtgaagtttcttgttgaatcataaaagctacctgtatgtactttataatttaatgttctgttagtaaaaattgtcagcattttatctttttctcttctcattacattttagtctccaatctttcccactctcagcagtcacagttttgcagagcaaaacatttttagaaactgaatatgtgtgagttctatataaaatgaatgtgttagtaacatccatctgctgatcaaggaggcattggatctggtactagaaggtgaaattgattgtagctatcaaagcattttatcaatgtaagtcaagaaaaaagaagaaaactgtgaacctctgatatttttaacataaaaactgttcccaatgagtgttctcttgctgattttgtgttaatgttattgtctatgatttttaagctaatgctaatataaaatctaaaatttcaacatgatgacaacaattcctgtagcctgtttttaccattaggatgtttttgaaaacagatgtcatcttagaaattatatttttaagtgcaaataaatcatcctgacttgaaagtcaacacattttatttttcattccgtagtatcacagaatatgctgcatttagatacaggtttaatttgccagattttctcaaaattctgtatttttatattgctacaactggtttacttaacatgcaattgaattgttatttaaataaattacatttgatggaa

SEQ ID NO: 190606 - DNA, 1950 bp, Homo sapiens
  Payload ID: 17651
  Gene Name: tetratricopeptide repeat domain 39B
  Uniprot ID: Q5VTQ0
  ENST ID: ENST00000507993
  CDS Start-End: 324-1877
actttgcttgtgcctgagaattgagagtctcactggagaccaaggaataaaatagaaattgaggatttttgttggctctaaaattgaggtttgtctcttcttttagttggcttaaaaaaaaatctggtagaagagagggaaagacatcttcatagtgggactatattcattcctccaaagttacagctgctctaaatctttcatcatcaaccaaggtggatctcaagagtggcctcgaagaatgtgctgtggcattgaacttatttctaagcaacaaatttacagacgccttagaattgcttcgcccctgggctaaggagagtatgtaccatgccttgggctacagtaccattgtggtgttgcaggctgtcctgaccttcgagcaacaggacatccagaacggcatttctgccatgaaggacgctttacaaacctgccaaaaatacaggaaaaaatacacagttgtagaatctttctcaagtcttctttctagaggatccctggagcaactgagtgaagaggaaatgcatgctgaaatctgttatgccgagtgtctcctacagaaagctgcactcacgtttgtgcaggatgaaaatatgatcaacttcatcaaaggtggactcaaaattagaacaagttaccaaatatataaagaatgtctttctatcctgcatgaaattcagaagaacaaacttcagcaggaattcttctatgagtttgaagggggtgtcaagcttggcagtggggcctttaatttgatgctgtcccttttaccagcaaggattatcagactactagaatttattggattttctgggaatagggagttgggcctcctgcagttacgtgaaggtgcttcaggaaggagcatgaggtctgcactgtgctgcttaaccatcttagcttttcatacttacatctccctaatacttggtacaggagaagtgaatgttgcggaagcagagcgtctcctggcacccttcctccagcagtttccaaatggctcactcgtgttgttttatcatgcccgaatagagttgctgaaagggaatcttgaagaggcacaagaagtatttcaaaaatgcatttcagttcaagaagaatggaaacagtttcaccatctctgctactgggagctaatgtggattaatgttttccaacaaaactggatgcaggcatattactattcagatctgctttgcaaagagagtaaatggtccaaggcaacttatgtgttcttgaaagcagcaattttgagtatgcttccagaggaggatgtagtagcaacgaatgagaatgtggtaactttattcagacaggtggacagcttgaagcagagaattgccgggaaatctatccctactgagaagtttgctgtgaggaaggctcggcgttactccgcctccttacctgcacctgtgaagctcatcttacctgccctggaaatgatgtatgtctggaatggtttttcaatagtgagcaaaagaaaagacctttctgaaaatctgttagtaactgttgaaaaagctgaggcagctttacaaagtcaaaattttaacagcttctctgtggatgatgagtgcttagtgaagttacttaaaggatgttgcctcaagaacttacagcggcccttgcaagctgaactatgttacaatcatgttgtggaaagtgaaaagctactgaagtatgaccactacctagtgccgttcactctatttgaattggcatctttgtataaaagccagggggaaattgacaaggccataaagttcctagaaactgcaaggaacaactacaaagattactccctggagtccagactacacttcagaattcaggcagctcttcacctctggagaaaaccttcctcagattgatcagaacttgaaggatggaatttttcctcaattagcatcggcatctgctatagattcaaccttatattaaagt

SEQ ID NO: 190607 - DNA, 2243 bp, Homo sapiens
  Payload ID: 17651
  Gene Name: tetratricopeptide repeat domain 39B
  Uniprot ID: Q5VTQ0
  ENST ID: ENST00000507285
  CDS Start-End: 600-2153
atgttggtttcttctcatctagagaggctactgctttttctttttgaatttattttcatttagatgggcgtcccccccacctcccgtttccacctcttctaggggtgtaactatagcgttagtatgttgggtagggtcttttgggttcgcttctaaggccctgcgcgattctgtctgcaggttttatattggtctgtgcagtttgacctggagatcttctcactcagatatggcaacaagcagccttcactttgcatcatgtgatacacaacaggcgcccagacagcgcggagcgtctactgtcagcagagagccataacaaaagagaagagaatggaggaaggaaccttttgggaacacagaacattgaagcatggctgagacagtgaccgttcaaacaagagctacatagatgtgtgagagaggaagactacaagttggtggccacaggacaggcaagggacttgggggaaggttcatcatcaaccaaggtggatctcaagagtggcctcgaagaatgtgctgtggcattgaacttatttctaagcaacaaatttacagacgccttagaattgcttcgcccctgggctaaggagagtatgtaccatgccttgggctacagtaccattgtggtgttgcaggctgtcctgaccttcgagcaacaggacatccagaacggcatttctgccatgaaggacgctttacaaacctgccaaaaatacaggaaaaaatacacagttgtagaatctttctcaagtcttctttctagaggatccctggagcaactgagtgaagaggaaatgcatgctgaaatctgttatgccgagtgtctcctacagaaagctgcactcacgtttgtgcaggatgaaaatatgatcaacttcatcaaaggtggactcaaaattagaacaagttaccaaatatataaagaatgtctttctatcctgcatgaaattcagaagaacaaacttcagcaggaattcttctatgagtttgaagggggtgtcaagcttggcagtggggcctttaatttgatgctgtcccttttaccagcaaggattatcagactactagaatttattggattttctgggaatagggagttgggcctcctgcagttacgtgaaggtgcttcaggaaggagcatgaggtctgcactgtgctgcttaaccatcttagcttttcatacttacatctccctaatacttggtacaggagaagtgaatgttgcggaagcagagcgtctcctggcacccttcctccagcagtttccaaatggctcactcgtgttgttttatcatgcccgaatagagttgctgaaagggaatcttgaagaggcacaagaagtatttcaaaaatgcatttcagttcaagaagaatggaaacagtttcaccatctctgctactgggagctaatgtggattaatgttttccaacaaaactggatgcaggcatattactattcagatctgctttgcaaagagagtaaatggtccaaggcaacttatgtgttcttgaaagcagcaattttgagtatgcttccagaggaggatgtagtagcaacgaatgagaatgtggtaactttattcagacaggtggacagcttgaagcagagaattgccgggaaatctatccctactgagaagtttgctgtgaggaaggctcggcgttactccgcctccttacctgcacctgtgaagctcatcttacctgccctggaaatgatgtatgtctggaatggtttttcaatagtgagcaaaagaaaagacctttctgaaaatctgttagtaactgttgaaaaagctgaggcagctttacaaagtcaaaattttaacagcttctctgtggatgatgagtgcttagtgaagttacttaaaggatgttgcctcaagaacttacagcggcccttgcaagctgaactatgttacaatcatgttgtggaaagtgaaaagctactgaagtatgaccactacctagtgccgttcactctatttgaattggcatctttgtataaaagccagggggaaattgacaaggccataaagttcctagaaactgcaaggaacaactacaaagattactccctggagtccagactacacttcagaattcaggcagctcttcacctctggagaaaaccttcctcagattgatcagaacttgaaggatggaatttttcctcaattagcatcggcatctgctatagattcaaccttatattaaagtggaaaaatgatcttgtg

SEQ ID NO: 190608 - DNA, 900 bp, Homo sapiens
  Payload ID: 17651
  Gene Name: tetratricopeptide repeat domain 39B
  ENST ID: ENST00000506891
  CDS Start-End: 1-210
gctgggctgagcccagagccgagagcaggagtcggctctgagttccctgcttggtttttgggtggcagcagccagaggaggaatatggcgctcttaggcagccgagcggagctggaagcggacgaggacgttttcgaagatgccttggaaaccatctcaatttggcttaaaaaaaaatctggtagaagagagggaaagacatcttcatagtgggactatattcattcctccaaagttacagctgctctaaatctgtgagtgctgaaattgaagaaaatagtgtgacttgctgcggaggaggatctggtcttcccgggatgccatggctggtttattgctgctgcaaggtgtgcgtctgggcggctgagactcctgctgcagaacaatggcaggatgatgctggttcactttgtatttactgtttgtcttatgtcctctgctggtttcattatagcattttgttttgttttgttagggtaattagaaccttagagattagtaaagtggcttgtcctcagaaatagcatgtgttgattgtcctagactctcacctctgaccttgctgtgctggctttagtggtctctttgtagcagattacagtaaatgtgagctaccaaaaagtgacctttgtatggccaccttttaaaattgtgcatcagaatcaatgctgggtattttttttgtgtgtgtgacgcagaccctggagtctaaacatctgtccttagtcatcgtgtcccattttccccctttggaatttcctggacgttagaattgtatccttgctgaattagtgagtgagttttgagcattctctaaagataagttaatttttgattctcaccataacccccatatgttcctgatttgtctttgttgaataaaagtcatattattgaaca

SEQ ID NO: 190609 - DNA, 2304 bp, Homo sapiens
  Payload ID: 17652
  Gene Name: tetratricopeptide repeat domain 39C
  Uniprot ID: Q8N584
  ENST ID: ENST00000304621
  CDS Start-End: 283-1851
aatcatgcttacgcatataggttaaccacagttatgtaagcaggttctgagaaaaggtgagaaagagaatggagagttttgctacaacagaggcaggattctgaatttatttccagctgcccatcttgtccctcctggagacctaacccctccagcacctacacacacagcctctttagaagcaactatcctgccactggctcagaaaggctgagtcctaagaattctaaaatcttgctcctaagaaatctcaagcttcttttgtgaaatcatagcccactaatgagttttggagccagctttgtcagttttttgaatgccatgatgacatttgaggaagaaaaaatgcagttggcatgtgatgacttaaaaaccacagaaaaactgtgtgaaagtgaagaggctggagtaattgaaacaatcaagaataaaattaagaagaacgttgatgtccgaaaatccgccccctctatggttgatcggcttcagaggcagataatcatagctgactgccaggtttacctggctgtgctttcatttgtaaaacaagaattgtcagcttatatcaaaggtgggtggatccttaggaaagcctggaagatttacaataaatgctatctggacatcaatgcccttcaggagctgtatcagaagaagctaactgaagagtccttgacttctgatgctgcaaatgataatcacattgtggctgaaggggtgtctgaggagtctctgaacagactgaaaggtgctgttagctttggatatggcctttttcacctttgcatatccatggtgcccccaaacctgctcaaaatcatcaacctgctgggttttcctggagaccgcctacaggggctttcttcactgatgtatgcaagcgaaagtaaggacatgaaggcccctttagctacattagctctgctctggtatcatactgtagtccgcccgttttttgccttggatggcagtgataacaaggcaggcctggatgaagctaaggaaattctccttaaaaaagaagctgcttatccaaattcttccctctttatgtttttcaagggacggatacaacgactagagtgtcaaatcaacagtgccttgacatctttccacactgctttggaacttgcagtagaccagagagaaattcaacatgtctgtctgtatgaaattggttggtgcagcatgatagagctcaatttcaaggatgcatttgattcctttgagaggctaaaaaatgagtccaggtggtcccagtgctattatgcctacttgactgcagtttgtcagggagccactggtgatgtggatggggcacagattgtctttaaagaagttcagaaactcttcaaaaggaaaaacaatcagattgaacagttctcggtgaaaaaggcagagcgatttcggaagcaaaccccaaccaaagcgctctgtgtgttggcgtctattgaagtgttgtacttgtggaaagctcttccaaactgttccttccccaacctgcagaggatgagtcaagcttgccatgaagtggatgactcatctgttgttggattaaagtatttgcttcttggtgccatacacaaatgtctaggaaactcagaagatgctgttcagtacttccagcgagctgttaaagatgaattgtgtcgtcagaataacttatatgttcagccgtatgcctgttatgaacttggctgtcttctattagacaaaccagagactgtaggaagaggcagagctctacttcttcaagcaaaggaggatttctctggctacgactttgaaaacagattgcatgtccgcatccatgctgctctggcctctctgagggaattggttcctcagtgacagacccggaacacccgctccgtccctccccacccagggtccgcactttaaaataaaagcagaggacaaagctcttgtgaagatgggcttttcttctgaaaaccacctgtgccagggacacattttcccagttaagctgacatattaaagatctcctcttttaaacatgtagctgaaaagtaataatgatgttgaggaggatgatgatggtaataataactaaccacctggggagagggttaagtgaccttgctcaaacgttttagttttgtgatttattatttttaaaataaaatcaaacggaacatccaacccaagatcctgtaggaacacctaccttaagcacatatctgaatgggtaacatgatgaggtacctgtaaaattattaacaatatcatgacatagcatttatatttgtgttttgaaaaaataaaagtgctttctagtgtttt

SEQ ID NO: 190610 - DNA, 2442 bp, Homo sapiens
  Payload ID: 17652
  Gene Name: tetratricopeptide repeat domain 39C
  Uniprot ID: Q8N584
  ENST ID: ENST00000317571
  CDS Start-End: 237-1988
tgagtaatccccgcggcggcggccggacgcccacctcccacgccgcgccgcagccgggccgcggctcctccctccgcggtccttccctcctcttccctcccgtcttctcccctcccctcccctcccctcccggctccgcttggctccgggcaggtagagccgggctccgggcgcgcgcggggccgcagcagctgctcccgatctcgcctcggcccagcgcagggcctcgcacgcccatggccggctcggagcagcagcggccgcggcggcgggacgacggagactcggacgcggcagcggcggcggcggcgcccctgcaggacgcggagctggccctggccggcatcaacatgctgctcaacaacggcttcagggagtcggaccagcttttcaaacaatacagaaatcatagcccactaatgagttttggagccagctttgtcagttttttgaatgccatgatgacatttgaggaagaaaaaatgcagttggcatgtgatgacttaaaaaccacagaaaaactgtgtgaaagtgaagaggctggagtaattgaaacaatcaagaataaaattaagaagaacgttgatgtccgaaaatccgccccctctatggttgatcggcttcagaggcagataatcatagctgactgccaggtttacctggctgtgctttcatttgtaaaacaagaattgtcagcttatatcaaaggtgggtggatccttaggaaagcctggaagatttacaataaatgctatctggacatcaatgcccttcaggagctgtatcagaagaagctaactgaagagtccttgacttctgatgctgcaaatgataatcacattgtggctgaaggggtgtctgaggagtctctgaacagactgaaaggtgctgttagctttggatatggcctttttcacctttgcatatccatggtgcccccaaacctgctcaaaatcatcaacctgctgggttttcctggagaccgcctacaggggctttcttcactgatgtatgcaagcgaaagtaaggacatgaaggcccctttagctacattagctctgctctggtatcatactgtagtccgcccgttttttgccttggatggcagtgataacaaggcaggcctggatgaagctaaggaaattctccttaaaaaagaagctgcttatccaaattcttccctctttatgtttttcaagggacggatacaacgactagagtgtcaaatcaacagtgccttgacatctttccacactgctttggaacttgcagtagaccagagagaaattcaacatgtctgtctgtatgaaattggttggtgcagcatgatagagctcaatttcaaggatgcatttgattcctttgagaggctaaaaaatgagtccaggtggtcccagtgctattatgcctacttgactgcagtttgtcagggagccactggtgatgtggatggggcacagattgtctttaaagaagttcagaaactcttcaaaaggaaaaacaatcagattgaacagttctcggtgaaaaaggcagagcgatttcggaagcaaaccccaaccaaagcgctctgtgtgttggcgtctattgaagtgttgtacttgtggaaagctcttccaaactgttccttccccaacctgcagaggatgagtcaagcttgccatgaagtggatgactcatctgttgttggattaaagtatttgcttcttggtgccatacacaaatgtctaggaaactcagaagatgctgttcagtacttccagcgagctgttaaagatgaattgtgtcgtcagaataacttatatgttcagccgtatgcctgttatgaacttggctgtcttctattagacaaaccagagactgtaggaagaggcagagctctacttcttcaagcaaaggaggatttctctggctacgactttgaaaacagattgcatgtccgcatccatgctgctctggcctctctgagggaattggttcctcagtgacagacccggaacacccgctccgtccctccccacccagggtccgcactttaaaataaaagcagaggacaaagctcttgtgaagatgggcttttcttctgaaaaccacctgtgccagggacacattttcccagttaagctgacatattaaagatctcctcttttaaacatgtagctgaaaagtaataatgatgttgaggaggatgatgatggtaataataactaaccacctggggagagggttaagtgaccttgctcaaacgttttagttttgtgatttattatttttaaaataaaatcaaacggaacatccaacccaagatcctgtaggaacacctaccttaagcacatatctgaatgggtaacatgatgaggtacctgtaaaattattaacaatatcatgacatagcatttatatttgtgttttgaaaaaataaaagtgctttctagtgtttta

SEQ ID NO: 190611 - DNA, 4117 bp, Homo sapiens
  Payload ID: 17652
  Gene Name: tetratricopeptide repeat domain 39C
  ENST ID: ENST00000540918
  CDS Start-End: 251-1081
gtgctgaggagaggagcccaggtctgcgggtgggggacccgtcctctgagaagcctgcagcttctcctccaggacccttccagcccacctggctggctgtggggataatgggcacttgggagcattggagggggaggaagcatagagaaagcagcaggagacgcacctggaagcccaggggagggaagtccacctccctgcaagtgtagggcagtgagaggagccctggcaccagcagagcaagaaagaaatgcatgcaccgttcagaataagctgtcaggtcgtctggctgtttaagatttatttattaatgtgtcaaatcaacagtgccttgacatctttccacactgctttggaacttgcagtagaccagagagaaattcaacatgtctgtctgtatgaaattggttggtgcagcatgatagagctcaatttcaaggatgcatttgattcctttgagaggctaaaaaatgagtccaggtggtcccagtgctattatgcctacttgactgcagtttgtcagggagccactggtgatgtggatggggcacagattgtctttaaagaagttcagaaactcttcaaaaggaaaaacaatcagattgaacagttctcggtgaaaaaggcagagcgatttcggaagcaaaccccaaccaaagcgctctgtgtgttggcgtctattgaagtgttgtacttgtggaaagctcttccaaactgttccttccccaacctgcagaggatgagtcaagcttgccatgaagtggatgactcatctgttgttggattaaagtatttgcttcttggtgccatacacaaatgtctaggaaactcagaagatgctgttcagtacttccagcgagctgttaaagatgaattgtgtcgtcagaataacttatatgttcagccgtatgcctgttatgaacttggctgtcttctattagacaaaccagagactgtaggaagaggcagagctctacttcttcaagcaaaggaggatttctctggctacgactttgaaaacagattgcatgtccgcatccatgctgctctggcctctctgagggaattggttcctcagtgacagacccggaacacccgctccgtccctccccacccagggtccgcactttaaaataaaagcagaggacaaagctcttgtgaagatgggcttttcttctgaaaaccacctgtgccagggacacattttcccagttaagctgacatattaaagatctcctcttttaaacatgtagctgaaaagtaataatgatgttgaggaggatgatgatggtaataataactaaccacctggggagagggttaagtgaccttgctcaaacgttttagttttgtgatttattatttttaaaataaaatcaaacggaacatccaacccaagatcctgtaggaacacctaccttaagcacatatctgaatgggtaacatgatgaggtacctgtaaaattattaacaatatcatgacatagcatttatatttgtgttttgaaaaaataaaagtgctttctagtgttttactttatcctcaaaatactccagtgaataacatagcacagatattcttaaccccactttgcagacagtgaaactcaggcacaaaaaggcaaattgacttatcccaattaattattcctgttatcagcagagcaatgaatagaaagcagatctcctgaccaccaactgacttttattgtaaaaataattcatgttaataggccagaattccatgttttacttattaaaagaacaaaatcttcagctgaagttatgtcaccagaaatagtcatctccagattgtctacagaatgtttcaaagcgatggacactctttttcctttgaaagccaaccaagtaagagcaaatattaatagaagataattttacaactaaaagtgtgactcttttgctaatctattagcctagtctatagattagacaaacagtatctacattttaggagtttacctttctttgtgaaaattgtcaaattaccaacttttggaaatcttttgacacattacttgaaaaggttattcgtgaatgaacatagattttggcctcaaaatatttgctggtggaacatttgctgggctacacagtgccaggatttaatcattttccccttagctcaggttatttagatattatacaaggaattcaaagttatttttttattcttcattgctaatttttgtcatttaatttacctccatgcccggtactgcaaacctgtggttttgaagaatctaaatacctcagtcacttttaagaatctctgccataatttggctcaatgtttaaggttagatttttaaagaaatttttattgagctaaaggatatcattttagggtatcgtttatttacaaattcttttggctgaaacatgatctcatattaatattttaatatttcttttcaaaataaaacagaaaagcaagtagaatgttggcaaattttatctgatttgaccttgttttgagggaatagtcataatttctttgaaagaagttatttctcactgattttggctaaacagtattcatatttcttcatctctgttactgaccacttttcagtagactgtttccaaaatgtgtattcacattgactttctccctgatgtgaattccgtgtgggttttagataatagtaagagagaagagattgctctcctatattcagtgaatgagaagggaacttttttctgaagagcaaaattggtgcccaaaaatattggacatctgttttttgtttttttttttttttttttttttttttgagacggagtctcgctctgtcacccaggctggagtgcagtggcgtgatcttggctcactgcaacctctgcctcctgggttcacaccattctcctgcctcagcctcccaagtagctgggactacaggcacccgcaaccacacccggctaattttttttgtatttttagtagagatggggtttcaccatgttagccaggattgtctccatctcctgacctcgtgatccacccgccttggcctcccaaagagctgggattactggtgtgagccaccgtgcccggcctggacatctggttttaactagatggaagggaagaacattatgaatctttaaaatacggctgttgccatttttctctcttcttaacatgcagcataggtgacaagcttttctgtcatcatcatggagcattctgaatcatgacatttttgtttgagagttcattcttgaattttcagttcaaaatattgtttgaactattattccacattcaaagattatataaggtcctgtgcttttgaatctttttcaaaacatttatttctgcctgcttaaaaaaaatacttttatttccccacagagagttcaggacttcagattagtttgtgttcagctcacttaactggatagacaattttgcgttttgcaacaccatcctgtaggttttctttactagtcaaagtgtaggtctttttaaaatttttaatctttatttttatttttattttgaaacagagtctcactctgttgcccaggctggagtgcagtggtgtgatctgtgctcactgcaacctctgtcacccgggtttaagcgattcttctgcctgagcctcccaagtagctgggattacaagttcctgccaccgtgcctggctaatttttgcagttttagtagaggcagggttccaccaccttggccaggctggtcttgaactcctgacctcatgatccacccaccttgtcctctcaaaatgcttacaggcatgaaccactgtgaccggccaggtctttttttttttaaagagtctatcctaggcttggtacagatggcgcctgtggtaaatctgtgttaacatggtggtagaccatggagaatgggtagatggagcttctagactccaaaacaacaaaaccacagtgtgagtacactgtcccattaggttgactgaagtctgagtacattttctggcctgcgtgccgtgacttatccaacctgtgaactgattgtgatctgcttggtaacttggtttggtgtaaactgctcttaaccctttgctgatgaagaaaataatcatataagtggaactatttgcatcta

SEQ ID NO: 190612 - DNA, 389 bp, Homo sapiens
  Payload ID: 17652
  Gene Name: tetratricopeptide repeat domain 39C
  ENST ID: ENST00000579214
  CDS Start-End: 189-389
gagcccttaacacctgagcaaaggagagaacgctggaggagaaggcggcgcgagctgagcccttaccacctgagcaaggagagtgtcaaatcaacagtgccttgacatctttccacactgctttggaacttgcagtagaccagagagaaattcaacatgtctgtctgtatgaaattggttggtgcagcatgatagagctcaatttcaaggatgcatttgattcctttgagaggctaaaaaatgagtccaggtggtcccagtgctattatgcctacttgactgcagtttgtcagggagccactggtgatgtggatggggcacagattgtctttaaagaagttcagaaactcttcaaaaggaaaaacaatcagattgaacagttctcggtg

SEQ ID NO: 190613 - DNA, 533 bp, Homo sapiens
  Payload ID: 17652
  Gene Name: tetratricopeptide repeat domain 39C
  ENST ID: ENST00000577185
  CDS Start-End: 40-171
atctaagaaattttatgcactgttaatagaaggcagtatatgagtggttggaaaactctctcccagcaacagcagagagatgccccttcaaagatacttctctgtggaaaaagttttttgacttctgagaaaacctcagcgcttcctggagaaactcaaaggcgcttgtaagagatgttgagtcagcaggcctctgagcctcttctctgcctaaaaccatgtcagattcttgggaggactggaaggacttgcaggctgtccatgatttctagacaagtcatctgctcacagacaagaatgtgtctctgccttgctcctggagacgataggagagtccacagatgcagagatgtaagaaaaggagaagaaatgaaaagcagaaatggtttaagggaactggcgggaaagacaggaaactcatctgttgactttttccatcctcttcaactcagtggtgtgttggaaaaaggcatcttttttcccccaactattacactgtctgaaaaggtcctaattaaatattcattaaagat

SEQ ID NO: 190614 - DNA, 1048 bp, Homo sapiens
  Payload ID: 17652
  Gene Name: tetratricopeptide repeat domain 39C
  Uniprot ID: Q8N584
  ENST ID: ENST00000584250
  CDS Start-End: 453-683
gtctcgcgtgcgtgtgtccgagcagtcctgggcggtgggcgaaggcgcggcttggggacccgggaggggccggggcgcgggggctgcaggaagtggaggcggccgccgctcggggaccggcttggcggggtgagagacacccggaaacggattccgcttcggggcccgcgcgagttgggtgcttcggagggcgcgagaggagcgggcgggtgctgctgagtaatccccgcggcggcggccggacgcccacctcccacgccgcgccgcagccgggccgcggctcctccctccgcggtccttccctcctcttccctcccgtcttctcccctcccctcccctcccctcccggctccgcttggctccgggcaggtagagccgggctccgggcgcgcgcggggccgcagcagctgctcccgatctcgcctcggcccagcgcagggcctcgcacgcccatggccggctcggagcagcagcggccgcggcggcgggacgacggagactcggacgcggcagcggcggcggcggcgcccctgcaggacgcggagctggccctggccggcatcaacatgctgctcaacaacggcttcagggagtcggaccagcttttcaaacaatacagaaaaagttttttgacttctgagaaaacctcagcgcttcctggagaaactcaaaggcgcttgtaagagatgttgagtcagcaggcctctgagcctcttctctgcctaaaaccatgtcagattcttgggaggactggaaggacttgcaggctgtccatgatttctagacaagtcatctgctcacagacaagaatgtgtctctgccttgctcctggagacgataggagagtccacagatgcagagatgtaagaaaaggagaagaaatgaaaagcagaaatggtttaagggaactggcgggaaagacaggaaactcatctgttgactttttccatcctcttcaactcagtggtgtgttggaaaaaggcatcttttttcccccaactattacactgtctgaaaaggtcctaattaaatattcattaaagattca

SEQ ID NO: 190615 - DNA, 2395 bp, Homo sapiens
  Payload ID: 17653
  Gene Name: tetratricopeptide repeat domain 4
  Uniprot ID: O95801
  ENST ID: ENST00000371281
  CDS Start-End: 88-1251
aggattgagggaagggaacccgcgccgccggaaggagccgctcgcttcacggcgctgggacccgggctggaaggcagggcatcagctatggaacaacctgggcaggatcccacctcagacgacgtcatggactcgttcctggaaaagttccagagccagccttaccgtggcggctttcatgaggaccagtgggagaaggaatttgaaaaggtccccctatttatgtcgagagcgccatcagaaattgatcccagggagaatcctgacttggcttgtctccagtcaattatttttgatgaggagcgttctccagaagaacaggccaagacctataaagatgagggcaatgattactttaaagaaaaagactacaagaaagctgtaatttcatacactgaaggcttaaagaagaaatgtgcagatcctgatttgaatgctgtcctttataccaaccgggcagcagcacagtactatctgggcaattttcgttctgctctcaatgatgtgacagctgccagaaagctaaaaccctgccacctcaaagcaataataagaggtgccttatgccatctggaactgaaacactttgccgaggccgtgaactggtgtgatgagggactgcaaatagatgccaaagagaagaagcttctggaaatgagggctaaagcagacaagctgaagcgaattgaacagagggatgtgaggaaagccaacttgaaagaaaagaaggagaggaatcagaatgaggctttactccaggccatcaaggctaggaatatcaggctctcagaagctgcctgtgaggatgaagattcagcctcagaaggtctaggtgagcttttcctggatggactcagcactgagaacccccatggagccaggctgagtctagatggccagggcaggctgagctggcctgtgctctttctgtacccagagtatgcccagtcggacttcatctctgcttttcatgaggactccaggtttattgatcatctaatggtgatgtttggtgaaacaccctcttgggacctagagcaaaaatattgccctgataatttggaggtctactttgaggatgaggacagggcagaactataccgggtgcctgccaagagcaccttgctacaggttctacagcaccagaggtactttgtaaaagccctgacaccagcatttttggtctgtgtaggatcctctcctttttgcaagaattttctccgggggagaaaggtgtaccagatacgatgactaagccagggcccctggatctcctcccttaccctcctctgctgggaacctagcacacctgaatcagctggacatactgctggagtccagtgctttctttccgtcaccctggggatagtccttcctggcatcgtggtgggggaggagcctctggcttccctaaactgcagcctctctggctggtcttcactttcctcagttgatataaaactctgggtcttggccatgatgtccttggactccatcgctaaagggaccatctgctgcagttaccacagcaactgacctgagcggcaccctggtctgtggagatggactcaggatccagtgacatgattctgaacttttgtggagtttgacaccttagagaagctacccctcaaactgcacatctacacacaaacaaacaatgcataggattccaaggctttaaagctgagagaccctggcctcaagttatttcatgcgcacagagggaagccatgtggggttgctgaagatgccttgaggtgaaatgggggcaggaaagccacatcttgctctgcatttataaagaccgtacaaactcagatccttggtacccctaaaaagattgccaattttcttcatctttgccatatggaggactgtgacagactttggacagtggcctcttgagttcctctgcagttttgacatttaggattttgtgtcttttaaactggaaaatcttctagcatgttgggttgttacagagtatatttttgtctgcagctgtttgttgccccattcctaagaggagtttatccatcctgacttgtagctgtgtgacttcttgcagtgcccccaccccatccccccgggagagtgtacttccctgctcccaatgcagagggatatgcacaggcatgagctgtcctgcgtctgacagaagcctgaagagtcatgtgtggttggcctgtgctcttccctctgctgtgagaacacatttcccacagaggagccgttccatggagccgagctacagcagctggcctgcagccactgagtgtcacagcaatgagagagcaatgtttgctgtagtaagcagtgagatttaggggttggttgttactatagcagagctaatacatgagtaaactgaagccagctgctgtccttaaaa

SEQ ID NO: 190616 - DNA, 4779 bp, Homo sapiens
  Payload ID: 17654
  Gene Name: tetratricopeptide repeat domain 5
  Uniprot ID: Q8N0Z6
  ENST ID: ENST00000258821
  CDS Start-End: 58-1380
ggtgagagagggcgtgcgtctctgtggttataaagttgggggtggagtggccgggagatgatggctgatgaagaggaagaagtcaagccgatcttgcagaaattgcaggaactcgtggatcagctctactcatttcgagactgctatttcgagacacatagtgttgaggatgctgggaggaagcaacaggatgtgcagaaggagatggagaaaaccctacagcagatggaagaagtagtgggttctgtccagggcaaggcacaagttctaatgctaactgggaaagcactaaatgtgactcctgactatagccctaaggctgaggagcttctgtcaaaggctgtgaagctggagcccgagctggtggaagcctggaaccagctgggtgaggtgtactggaaaaaaggggatgttgcagctgcccacacctgcttctcaggagccctcacccattgcaggaacaaagtctccttgcaaaacctgtcaatggtgcttcgtcagctgcggactgacactgaagatgaacattctcaccatgtcatggacagtgtccgacaggctaagttggctgttcagatggatgtccatgatggccgctcctggtatattcttgggaattcatatctttccctttacttctctactggccagaaccctaagatctcccagcaagccctcagtgcctatgcccaagcagagaaagttgacagaaaagcttctagcaatcctgaccttcatctgaacagggcgacgttgcataaatatgaagagagttatggggaggccctggagggcttctctcgggctgcagccctggaccctgcctggccagagccccggcaacgagagcaacaacttctggaattcctggatagattaaccagcctccttgagagtaagggaaaggtgaagaccaaaaagctgcagagcatgctgggaagcttgcgcccagcccatctaggcccttgcagtgatgggcactatcagtcagcctctgggcagaaagtgaccctggagctcaagccactgagtacgcttcagcctggggtgaacagcggtgccgtcatcctgggaaaggtggtatttagcctcaccacagaggagaaagtcccctttacatttggcctggtagattcagatggaccttgctatgcagtgatggtgtacaatatagtgcagagctggggagtgctcattggagactctgtagccattcctgagcccaacctgcggcttcaccgaattcagcacaaaggaaaggactattccttttccagtgttcgagtggagacgcccctcctgctagtggtgaatgggaagcctcagggatccagcagccaggctgttgccacagtggcatcgcgaccacagtgtgaatgacctttgacttgcatgctcaacagggagtggaggagaggagacaaggctctggacagccggtccagccacatccagtgattcagcagggatgggaggaatgttttaaatgaagactttctctttccctgcctgtattacacttcgtatctcttctctctcctctgtcctcatcatgttccagctctctacagggccacatactcttctggcatatctctcctgtctcttccactgctctctatgttttaagcaaagagcatggaattggtagaagtcttgggatcttgccatgggacagagtccccaaggttcctgttgttgcctccttcctaagcctcatatgtatatatcagttcagtatttattgctaaaggagggggcttaattttgtaatggcttttatttttagcaatttttatttttatttttgaactttaggtccttcctcttctttggggctggaacagaattaaatttgtttggaaaaaaaaaaaaacaccacgtagtttggcctgctttattctccctaggcctgtattctttgttttaggatcacttcaatttattggagtaatacccccatttttttctttatacaaagcagtttatttctctcccagttaaaagaattccgacaatagacagccccaggcaggaatggcaactccacaaagttgctagagaccagctttcttccattttcccattctgtcattccctaggggtggtcttcactatggtccaagatgacagagcaatactgttctaatagtgttactaggctgaaggaccagagagagttagataaatcctcagtttctttagagtctagtgacatgttttataacagtttatcttaatatccttgtggtaaaatggagaaatgtgagtgaggattaataaccaattgaattggcctggcacggtggctcagcctgtaatcccaccactttgggagtccaaggcgggtggatcacgaggtcaggagttcaagatcagcctggccaagatggtgaaactccgtctctactaaaaatacaaaaattagctgggcgtggtggcaggcacctgtaatcacagctactggggaggctgaggcagagaattgcttgaacctgggaagtggaggttgcagtgagccgatatcatgccactgcactccagcatgggcgacagagcgagactccgtctcaaacagcaacaacaactgaatggctgtaatacattaatgtatacagatgaattgagaagtcttctagtgaaatggctcagatctttgttcttggtccagtcctgttcagtttttgatcagtgccttgaatatcattgatgactcattaaatttataaagagtgcagaggcctcctcagagaatggatggtagaaatgcattgatgagagaagttttatctatctatctgtctatctatctatctatctatctgtctctatctaagaagtcataaaggctgagtctaataagataaaattttcagtccattcttttggtccaaaaaggcttacattctcaggtatagcttcaacatcatatatgaatattactaagaatcttagtagataagctaaagtcagtatgagtaaccagtctgatatagtttgcaagaacactcttcatggactgcaccaaaaaaacctatggtagcaagagacagtttttattagaagtactgtctgttataccacatatggagtcttaaattagttttgggtgtcattttgaggcctagagtcatagaagagtgattaggagcttgtggggtataaaaataacttgagaattggctgaaagcaactagggaagatgggggtagtagtatgtgtaaacatttgaggcagtagagatgtgggacccaaatactgttccccttttactcaaattctgagatgagttgacatgttctgtgtagggctagagagtagaaaaatggccagtaggtggtagccacagagaagcagtgcgtacaaacaagtaagtatgcaaaatttgtacatacggtttcaggaataactagaatacccataaaatatccacctgccttaaaaactagaacatcattgataacttggaagcccttgcatacctctccatgatctcatttgtcttcacagctatataaatctcattgtatgattataccataatttattcatcctgttgttaaaggatatttgggtttccagtttttctttttttactaccaaagcactacattattaatattcttgtatatgtcctgatatgtaagtgcaaaagtttcttttacagcaatggctcttgaagagtggttcccagaccagcagcatcagcatcccttggaacttctttgaaatgcaaattctcaagccccctacccagacttactgaattcaaaactatgtgggaggagcccagcaatctgtgtttcgcaaaccctccaggtgactctgatgcacagtaaaatttgagaaccactgtttaagagtattgacatagaatggaattgctggatcatagagtatatacatgttcaacttttttgagaagcactaaacatttccaaagtgcttatattagtttatgtctctactatcaatagatgagtcaccccaatgctccccatcctcttctgtgcttggtattatcttttaggtattgcaaatacaggagatttgagtattatttccttgtggccttaatttgcatttctgattattaatgagcttgagcatcttttcatatatttagaagccactaatattttctctcggtaaaatgcctattcgagtctttgcacactgctgtattggatgtcaaattgatttatatattccctgtactaatcgtttgtctacatacagttttatcctgtttttttttttattctattgggtcttttgctgaacagaagttcttaatttcaatgtcattgaatttatccatcttttatgataatgctttttgtgttttaagaggttcttagctctcctaaagtcataaggacattttccctctactgctttatgaagttattttgtccttttcttacagtatgactttattttatgttatgtacggatataatttttttcataatgagtaaatagcccagcaccttttattaaagaatcaatcctttccctactgatctttaaagcccagtctgtctttttctttttttgaaattgtctagctttttaatttttaccaaccagatgattataaaatatcacatagtaggcataaattacatttctttgtccattcctgtttctttttctatgaaatctctgttttcttttgtccaatttttattgggttgtcttcttattgattccttacatgttctggatactaatccattataaattatgtttttcaaatatatttatccaaatcgc

SEQ ID NO: 190617 - DNA, 1755 bp, Homo sapiens
  Payload ID: 17654
  Gene Name: tetratricopeptide repeat domain 5
  ENST ID: ENST00000383029
  CDS Start-End: 5-391
ggagatgatggctgatgaagaggaagaagtcaagccgatcttgcagaaattgcaggaactcgtggatcagctctactcatttcgagactgctatttcgagacacatagtgttgaggatgctgggaggaagcaacaggatgtgcagaaggagatggagaaaaccctacagcagatggaagaagtagtgggttctgtccagggcaaggcacaagttctaatgctaactgggaaagcactaaatgtgactcctgactatagccctaaggctgaggagcttctgtcaaaggctgtgaagctggagcccgagctggtggaagcctggaaccagctggtgcaggaacaaagtctccttgcaaaacctgtcaatggtgcttcgtcagctgcggactgacactgaagatgaacattctcaccatgtcatggacagtgtccgacaggctaagttggctgttcagatggatgtccatgatggccgctcctggtatattcttgggaattcatatctttccctttacttctctactggccagaaccctaagatctcccagcaagccctcagtgcctatgcccaagcagagaaagttgacagaaaagcttctagcaatcctgaccttcatctgaacagggcgacgttgcataaatatgaagagagttatggggaggccctggagggcttctctcgggctgcagccctggaccctgcctggccagagccccggcaacgagagcaacaacttctggaattcctggatagattaaccagcctccttgagagtaagggaaaggtgaagaccaaaaagctgcagagcatgctgggaagcttgcgcccagcccatctaggcccttgcagtgatgggcactatcagtcagcctctgggcagaaagtgaccctggagctcaagccactgagtacgcttcagcctggggtgaacagcggtgccgtcatcctgggaaaggtggtatttagcctcaccacagaggagaaagtcccctttacatttggcctggtagattcagatggaccttgctatgcagtgatggtgtacaatatagtgcagagctggggagtgctcattggagactctgtagccattcctgagcccaacctgcggcttcaccgaattcagcacaaaggaaaggactattccttttccagtgttcgagtggagacgcccctcctgctagtggtgaatgggaagcctcagggatccagcagccaggctgttgccacagtggcatcgcgaccacagtgtgaatgacctttgacttgcatgctcaacagggagtggaggagaggagacaaggctctggacagccggtccagccacatccagtgattcagcagggatgggaggaatgttttaaatgaagactttctctttccctgcctgtattacacttcgtatctcttctctctcctctgtcctcatcatgttccagctctctacagggccacatactcttctggcatatctctcctgtctcttccactgctctctatgttttaagcaaagagcatggaattggtagaagtcttgggatcttgccatgggacagagtccccaaggttcctgttgttgcctccttcctaagcctcatatgtatatatcagttcagtatttattgctaaaggagggggcttaattttgtaatggcttttatttttagcaatttttatttttatttttgaactttaggtccttcctcttctttggggctggaacagaattaaatttgtttggaaaaaaaaaaaaa

SEQ ID NO: 190618 - DNA, 748 bp, Homo sapiens
  Payload ID: 17654
  Gene Name: tetratricopeptide repeat domain 5
  ENST ID: ENST00000553828
  CDS Start-End: 702-748
gttgggggtggagtggccgggagatgatggctgatgaagaggaagaagtcaagccgatcttgcagaaattgcaggtggggccgtagattaaattctgtatgtgtttttgttactccgaatgaagcagggagtccagtttatgtactgcccgtgaattcctcggcacacacgcgaagctgcgtgcgtctgtgtggttactataacaaccctcgagggtgcagccgcagccagccagggagcctcgttggaacctcctgctgccgacctgactgcggttaatttcagtcctgtatggaagaagatttgttgctcctaactgttcatgtacatttttagagaggacgttgttttctcgattcatccatagcgaatagcatatacatgtgtgtggcagatctgcatgaactactgtcacatgttgttttgatccctacaaaagccatttaacacctttctgctttgaatttggcaacaatcacgctaatgacctgcactgcaagtgtcctggttactccccttaggatttcagttttgatttctttcaacctgtgtaattccactttggggtctgatgcagaggggtccagactccacatagtccacaggaactcgtggatcagctctactcatttcgagactgctatttcgagacacatagtgttgaggatgctgggaggaagcaacaggatgtgcagaaggagatggagaaaaccctacagcagatggaagaagtagtgggttctgtcca

SEQ ID NO: 190619 - DNA, 1681 bp, Homo sapiens
  Payload ID: 17655
  Gene Name: tetratricopeptide repeat domain 6
  Uniprot ID: Q86TZ1
  ENST ID: ENST00000267368
  CDS Start-End: 62-1624
tgctatccaccttcagccagatggaatccaattatacataagaagaggacaatatcttcttatgatgaaatattatgatcttgcaaagtttactatttatcaaatagcagaaatggacaaaggtctcagtgagttgagtcctatgcagcaagcccttatttattcattttgtgaaaaccatgacaaggccattgaggtcttggacggaatcagctggaatagagctgagatgaccatgtgtgctctattagcaaaagttcaaatgaaggccaagagaaccaaggaagctgtggaagtgcttaagaaggctttggatgccatttctcattctgataaaggaccagatgccacagcaatttcagcagactgtctgtataacttgggtctttgttacatggaggaaggcaatttacaaatgacttataagctagcaattacagatttaactacagctatcagcatggacaaaaatagttatacagcattttataacagagcattatgttacaccaagataagggaacttcaaatggcattaacagattatggaattgtgctgcttcttgatgctacagaaactgtaaaactaaataccttccttaatcgtggactcatctacgtagaactaggccagtatggctttgcactagaggattttaaacaagctgcactgataagccggactaacgggagcctttgtcacgccactgccatgtgccatcacagaattaatgagtttgaagaagctgtcaatttctttacttgggctcttaaaattaacccatgttttctggatgcttatgttggacggggaaattcttacatggaatacggtcatgatgaagccaccaagcaagcacagaaagactttctgaaagcactgcatattaatccagcatacataaaagccagaattagttttggctataatttgcaggcccaaggaaaattccagaaagcttggaaccactttaccattgccatagatactgatccaaagaactacctagcctatgaaggaagagctgtggtctgtcttcagatgggtaataattttgctgcaatgcaggatattaatgctgccatgaagatcagtactacagcagaattcttaacaaatcgtggggtgattcatgagtttatgggccacaaacagaatgcaatgaaagactaccaagatgcaattactctaaaccccaagtactcgctggcttactttaatgcaggaaatatctactttcaccacaggcagttttcccaggccagtgactacttctcaaaagctttaaaatttgatccagaaaatgaatatgttctcatgaatcgagctattacaaatacaatattaaagaaatatgaagaagcaaaagaagattttgcaaatgtaattgaaagctgtcccttttgggctgcagtatattttaatagagcacatttctactactgcttaaagcaatatgaactagctgaggaagaccttaataaagccctgtctttgaagcctaatgatgctctagtatataattttagagcaaaagttcgtggtaaaataggtctgattgaggaagctatggctgactataaccaagcacttgatcttgaagactatgcctcagttatatgattacatagactgtggttgctatagtagtttacacagctgttctctctgaaacggaaa

SEQ ID NO: 190620 - DNA, 1972 bp, Homo sapiens
  Payload ID: 17655
  Gene Name: tetratricopeptide repeat domain 6
  ENST ID: ENST00000382320
  CDS Start-End: 113-1915
tgctatccaccttcagccagatggaatccaattatacataagaagaggacaatatcttcttatgatgaaatattatgatcttgcaaagtttactatttatcaaatagcagaaatggacaaaggtctcagtgagttgagtcctatgcagcaagcccttatttattcattttgtgaaaaccatgacaaggccattgaggtcttggacggaatcagctggaatagagctgagatgaccatgtgtgctctattagcaaaagttcaaatgaaggccaagagaaccaaggaagctgtggaagtgcttaagaaggctttggatgccatttctcattctgataaaggaccagatgccacagcaatttcagcagactgtctgtataacttgggtctttgttacatggaggaaggcaatttacaaatggcttttgattcttttacaaaagctgtgaaagcaaatccagattttgcagaaagcttttatcagcgagggctttgtaaagtgaaactccacaaggatagctcgattctggattttaatcgtgcaattaccctcaatccaaaacattaccaggcatatttaagccgagtagcattctatggtttaaaaggcaggtattccaaagcaatcttgaattgtaacaaggctattaaaatttaccctgaaagcgtacgtgcctatctctacagaggagttctgaaatactacaacaagacttataagctagcaattacagatttaactacagctatcagcatggacaaaaatagttatacagcattttataacagagcattatgttacaccaagataagggaacttcaaatggcattaacagattatggaattgtgctgcttcttgatgctacagaaactgtaaaactaaataccttccttaatcgtggactcatctacgtagaactaggccagtatggctttgcactagaggattttaaacaagctgcactgataagccggactaacgggagcctttgtcacgccactgccatgtgccatcacagaattaatgagtttgaagaagctgtcaatttctttacttgggctcttaaaattaacccatgttttctggatgcttatgttggacggggaaattcttacatggaatacggtcatgatgaagccaccaagcaagcacagaaagactttctgaaagcactgcatattaatccagcatacataaaagccagaattagttttggctataatttgcaggcccaaggaaaattccagaaagcttggaaccactttaccattgccatagatactgatccaaagaactacctagcctatgaaggaagagctgtggtctgtcttcagatgggtaataattttgctgcaatgcaggatattaatgctgccatgaagatcagtactacagcagaattcttaacaaatcgtggggtgattcatgagtttatgggccacaaacagaatgcaatgaaagactaccaagatgcaattactctaaaccccaagtactcgctggcttactttaatgcaggaaatatctactttcaccacaggcagttttcccaggccagtgactacttctcaaaagctttaaaatttgatccagaaaatgaatatgttctcatgaatcgagctattacaaatacaatattaaagaaatatgaagaagcaaaagaagattttgcaaatgtaattgaaagctgtcccttttgggctgcagtatattttaatagagcacatttctactactgcttaaagcaatatgaactagctgaggaagaccttaataaagccctgtctttgaagcctaatgatgctctagtatataattttagagcaaaagttcgtggtaaaataggtctgattgaggaagctatggctgactataaccaagcacttgatcttgaagactatgcctcagttatatgattacatagactgtggttgctatagtagtttacacagctgttctctctgaaacggaaa

SEQ ID NO: 190621 - DNA, 2253 bp, Homo sapiens
  Payload ID: 17655
  Gene Name: tetratricopeptide repeat domain 6
  Uniprot ID: Q86TZ1
  ENST ID: ENST00000476979
  CDS Start-End: 288-1850
gtgggcgccccttccccagcctcgctgccgccttgcagtttgatctcagactgccgtgctagcaatcagggagactccgtgggcgtaggaccctccgagccacgtgtgggatataacctcgtagtgtgccgttttttaagcccgtcggaaaagtgcagtatgcaggtgggagcgaacggattttccagttgcataaattgaaaaaggcagtaaatgaattgtctcgtgctatccaccttcagccagatggaatccaattatacataagaagaggacaatatcttcttatgatgaaatattatgatcttgcaaagtttactatttatcaaatagcagaaatggacaaaggtctcagtgagttgagtcctatgcagcaagcccttatttattcattttgtgaaaaccatgacaaggccattgaggtcttggacggaatcagctggaatagagctgagatgaccatgtgtgctctattagcaaaagttcaaatgaaggccaagagaaccaaggaagctgtggaagtgcttaagaaggctttggatgccatttctcattctgataaaggaccagatgccacagcaatttcagcagactgtctgtataacttgggtctttgttacatggaggaaggcaatttacaaatgacttataagctagcaattacagatttaactacagctatcagcatggacaaaaatagttatacagcattttataacagagcattatgttacaccaagataagggaacttcaaatggcattaacagattatggaattgtgctgcttcttgatgctacagaaactgtaaaactaaataccttccttaatcgtggactcatctacgtagaactaggccagtatggctttgcactagaggattttaaacaagctgcactgataagccggactaacgggagcctttgtcacgccactgccatgtgccatcacagaattaatgagtttgaagaagctgtcaatttctttacttgggctcttaaaattaacccatgttttctggatgcttatgttggacggggaaattcttacatggaatacggtcatgatgaagccaccaagcaagcacagaaagactttctgaaagcactgcatattaatccagcatacataaaagccagaattagttttggctataatttgcaggcccaaggaaaattccagaaagcttggaaccactttaccattgccatagatactgatccaaagaactacctagcctatgaaggaagagctgtggtctgtcttcagatgggtaataattttgctgcaatgcaggatattaatgctgccatgaagatcagtactacagcagaattcttaacaaatcgtggggtgattcatgagtttatgggccacaaacagaatgcaatgaaagactaccaagatgcaattactctaaaccccaagtactcgctggcttactttaatgcaggaaatatctactttcaccacaggcagttttcccaggccagtgactacttctcaaaagctttaaaatttgatccagaaaatgaatatgttctcatgaatcgagctattacaaatacaatattaaagaaatatgaagaagcaaaagaagattttgcaaatgtaattgaaagctgtcccttttgggctgcagtatattttaatagagcacatttctactactgcttaaagcaatatgaactagctgaggaagaccttaataaagccctgtctttgaagcctaatgatgctctagtatataattttagagcaaaagttcgtggtaaaataggtctgattgaggaagctatggctgactataaccaagcacttgatcttgaagactatgcctcagttatatgattacatagactgtggttgctatagtagtttacacagctgttctctctgaaacggaaacatatttgttgtctaaaaggttctaccattttcattattgtattcgttatgcttagtcttccatataaccttctatgcattttaataaaatgtttgttatacattaattataaaacatatatcatttgctgcatatttggaataccttgagaactgaatttttccaaggttgcagaatctcaaggaaaatgtttcttaaggaattaaataggaatgtctcttaacatttaaaatattttctttaattctttttgaaataatactatacattgtagaaaaagtgtcactgaccttttcatcaatccttgctgacaatgtattaaacagtatacagattaaaaaataa

SEQ ID NO: 190622 - DNA, 2193 bp, Homo sapiens
  Payload ID: 17655
  Gene Name: tetratricopeptide repeat domain 6
  ENST ID: ENST00000478811
  CDS Start-End: 62-1723
tgctatccaccttcagccagatggaatccaattatacataagaagaggacaatatcttcttatgatgaaatattatgatcttgcaaagtttactatttatcaaatagcagaaatggacaaaggtctcagtgagttgagtcctatgcagcaagcccttatttattcattttgtgaaaaccatgacaaggccattgaggtcttggacggaatcagctggaatagagctgagatgaccatgtgtgctctattagcaaaagttcaaatgaaggccaagagaaccaaggaagctgtggaagtgcttaagaaggctttggatgccatttctcattctgataaaggaccagatgccacagcaatttcagcagactgtctgtataacttgggtctttgttacatggaggaaggcaatttacaaatggcttttgattcttttacaaaagctgtgaaagcaaatccagattttgcagaaagcttttatcagcgagggctttgtaaagtgaaactccacaaggatagctcgattctggattttaatcgtgcaattaccctcaatccaaaacattaccaggcatatttaagccgagtagcattctatggtttaaaaggcaggtattccaaagcaatcttgaattgtaacaaggctattaaaatttaccctgaaagcgtacgtgcctatctctacagaggagttctgaaatactacaacaagacttataagctagcaattacagatttaactacagctatcagcatggacaaaaatagttatacagcattttataacagagcattatgttacaccaagataagggaacttcaaatggcattaacagattatggaattgtgctgcttcttgatgctacagaaactgtaaaactaaataccttccttaatcgtggactcatctacgtagaactaggccagtatggctttgcactagaggattttaaacaagctgcactgataagccggactaacgggagcctttgtcacgccactgccatgtgccatcacagaattaatgagtttgaagaagctgtcaatttctttacttgggctcttaaaattaacccatgttttctggatgcttatgttggacggggaaattcttacatggaatacggtcatgatgaagccaccaagcaagcacagaaagactttctgaaagcactgcatattaatccagcatacataaaagccagaattagttttggctataatttgcaggcccaaggaaaattccagaaagcttggaaccactttaccattgccatagatactgatccaaagaactacctagcctatgaaggaagagctgtggtctgtcttcagatgggtaataattttgctgcaatgcaggatattaatgctgccatgaagatcagtactacagcagaattcttaacaaatcgtggggtgattcatgagtttatgggccacaaacagaatgcaatgaaagactaccaagatgcaattactctaaaccccaagtactcgctggcttactttaatgcaggaaatatctactttcaccacaggcagttttcccaggaagaaagtcttggcctggcttggagtctttcccttgactcatttctgagaactgggggtgcaaccttctcttcaggagtgaatcctcttcaaactcttcacagaaggatgtcaattctgtcccccctccccccaacctgtcccagggatgagatggattttacatcttgaactaattacctaattaagaggaagcaaagttcatggagtattgcctaaaggccagtgactacttctcaaaagctttaaaatttgatccagaaaatgaatatgttctcatgaatcgagctattacaaatacaatattaaagaaatatgaagaagcaaaagaagattttgcaaatgtaattgaaagctgtcccttttgggctgcagtatattttaatagagcacatttctactactgcttaaagcaatatgaactagctgaggaagaccttaataaagccctgtctttgaagcctaatgatgctctagtatataattttagagcaaaagttcgtggtaaaataggtctgattgaggaagctatggctgactataaccaagcacttgatcttgaagactatgcctcagttatatgattacatagactgtggttgctatagtagtttacacagctgttctctctgaaacggaaa

SEQ ID NO: 190623 - DNA, 538 bp, Homo sapiens
  Payload ID: 17655
  Gene Name: tetratricopeptide repeat domain 6
  ENST ID: ENST00000555921
  CDS Start-End: 1-237
cccaagtactcgctggcttactttaatgcaggaaatatctactttcaccacaggcagttttcccaggaagaaagtcttggcctggcttggagtctttcccttgactcatttctgagaactgggggtgcaaccttctcttcaggagtgaatcctcttcaaactcttcacagaaggatgtcaattctgtcccccctccccccaacctgtcccagggatgagatggattttacatcttgaactaattacctaattaagaggaagcaaagttcatggagtattgcctaaaggccagtgactacttctcaaaagctttaaaatttgatccagaaaatgaatatgttctcatgaatcgagctattacaaatacaatattaaagaaatatgaagaagcaaaagaagattttgcaaatgtaattgaaagctgtcccttttgggctgcagtatattttaatagagcacatttctactactgcttaaagcaatatgaactagctgaggaagaccttaataaaggtacacttttggtaattattctggt

SEQ ID NO: 190624 - DNA, 511 bp, Homo sapiens
  Payload ID: 17655
  Gene Name: tetratricopeptide repeat domain 6
  ENST ID: ENST00000556845
  CDS Start-End: 397-511
tgagagcttcagactagaaaagggaaaaagccccacttttgcttcgtcactagaaaccgggtcatctgagtcagccgagccaagtgacgttaggccgacccgggccccgggctagcagagcggaggcgctgccacgaaactcgtacctgcggctaagagcaggaaaaccctttcctgtatgccatctgttttctgtggggccctgagtgatgaggagaggaacaaggattcatggaagtgaggtcaaatttgtcaagatgtccacaatcccgagacactttggcctgaaatacaaagaggaatcgtatatgtttaaagagcttgagaaagttcggcaggaaactaaaaaggattttctccgattcaagcagaagttggcctccaagccggctgtagatgaaagcccagtccacagcctccatgcccccggcccggcccgccccgcgcgcgtttcctgcgccgcagcccggacgtcgagaagatacccttcgcttaaaggccctgcgatgtc

SEQ ID NO: 190625 - DNA, 5833 bp, Homo sapiens
  Payload ID: 17655
  Gene Name: tetratricopeptide repeat domain 6
  ENST ID: ENST00000553443
  CDS Start-End: 1-5661
atgtccacaatcccgagacactttggcctgaaatacaaagaggaatcgtatatgtttaaagagcttgagaaagttcggcaggaaactaaaaaggattttctccgattcaagcagaagttggcctccaagccggctgtagatgaaagcccagtccacagcctccatgcccccggcccggcccgccccgcgcgcgtttcctgcgccgcagcccggacgtcgagaagatacccttcgcttaaaggccctgcgatgtccgcggccgccctcctgcaggaggtgctcggaggcgcgccgcgtccctcgggcctgggtgaggcggcggctccaggcaagacccggtcgtttcgcccccgggacttttacttgcggagctccgcgttcctacggcaccaggccctgaaaaagcccccagtcatcgcctcggggttcggcacggccagacccgtggtcctgctgcctccgcccgagccacccgtgaagcgcagagcgcgcggggtcttggagagctcgcggcacgcggctcccaggcgggtcttccacttgggaagggagcgcgaacagagccaggaggtagctcctctcgcagggccctgcatggccaaagagaggaaggccagctccgtctccgcagaggacggctacatggaggccagcagcgggcggaggaaagtgaggatccgcagcaacttcgtgagcgagagcggggcccgcgaggcgcgggaagcggcggggttaggagcccagggagaacaggagagctggccgcccagcgacgcgcgggaggccgcctggcaggcgctgctgccctcccgcgtgatccccacgtccatcgaagagatcatcgcctctctgcagtccgaggcccagctggcctccgaccagaccatcaaagagctcatacggagcgtccttggccagaactacgacattacaatggaagatatttctttaatgggaaaaatgtacctcaaaacatcacctatgcaagcagaaacacctgagatacaagcagagtataaattccagatgggtgctgaggaatcgcaaatgagcgtgcataaggaactttctgaaaccatgtcaagtattctccagattgaacaagaggatatagaatggggaccctcagaagcagaaagcatagtatttaaacctcaggaaatttcgcaagttcagccagcagaggaattaagtaaacctttggaagatggacagcccacaagtgattcaaaagaagccaagtgggtgtctttaacggcaaaatcaccagaattcttgcaaatcgaaggaaaagaaattaagcgaatgcggaaacgtaaatcactgagaccaagaaagtcttcaaaacctctttgtgataaaaaactacataaaaaaattccacaagactactccatgccgcaccttcatgatctgtgcaccaccatcccagcccaggagctgcctgttgacttgcgcctggcttctcgagtgtatcacactgctaacaggaaaggccacgataccctgcttggaaaatttggaacctctttcttagatgatcgctttacagatgaagaacaaacagatagaatattgtatggaattcctgttatggatgacaaccaagaatatgtccatattcctccgacaccgcaagggataccacctgaattggcacaaggaactagagagcgtgctcacaaaccacacttggaagtcttgggagaggaaatgtatgcttatccagaattcacgaagttgttttggaatacagctgcacctaaattctctgttccagaatctgtcatgaaggaaactctatatccaaaatatgagagtgttcaagcaagcagacttttaactgataaattgtcatataaaagcagtgtcattactttacatcaacatagcagaacaaatttttggtgtttcttaccaagaaaatctgcatcatttgaaagtatccaaaaatggtttagtgcacaacctacacaactaaggcgagtaaaatcttctgtagacttgaggaaggagaagatcatagctcctttggaaatcaagaatgatatgcaaagcagtataaaagaggttatgtttcagaaagcaaaggaattgaaacgtcagctccagctcactaagcaaaataaaactgaggagcccaactatgtgaaagaaagtatagatgacatctttgataacatgtgcgaaaaacacagtttgagaaatctctctttgactctcattgaagcgtctaaaaaagctggcattagttacattgtttatcccaagaaaaagaagatgagatggaagaaaagattgaaacaacaaaaacttatattcgtgcatgaagagttatccaagcctccaaaatctcttgaaagatcagcatctcatggaatacttccgggacagaagaaatatttgttcaaagttccattatatgaacgtcaaatacggtgtcccagtttacctttgtatttaaattttgaaaaattcgtccaagctaagggaggaattccagaaaatattgatcctcggacatgggctcttgataggctcattgagtacaaagatgcgagcatacctgtaaaagagaaagatgataaaatatcagttcctgaagacccacctgaaagagtgaaagaaccaccaaaactaaaattaaatgattatgtggagtctgatcttccacaagaggtcattaaatattatgaatctgaagtgaagattttgactgaagaaataaatgataagacaaaatatcctgcatttgcatattgtaggcgtggagctatttataggaaactgggaaagttgcagagtgccatgaatgatctgcagagagtaatactcttggaaccattgtttctcaatgcctattggcatcgacatttaatttatcttttccaagacaaaattaatgaagctttggatgacttgaattatatacataaatataataaaaataatacagaggcatatttgtcaaaagcagaaatttacaggggaaaaaaagacataactttggcaattctaaactatacccaggcaattaaatccacgcccacagatgctgatatctatttcaggaggggtgagatgtatgaaataacaaacaaagtactggccattgatgacttttcgaaatgtattttttatgatcccaaaagaacagatgcattattgaaacgtgggctgttttattgtgaaaatgaaaactggtttgcagccatagaggattttacagccttgttaaatatagatcaccaaaattctcaagcaaggacataccgagggattgcatatgttaaatggaaattttataaagaagcaactcaagatttttctgctgcaattcacttagatcctaataactggttagcgttgtattatcgaggttgcttattcagaaagagtaacccttttagagcgctacaggattatagtgtttcagcactcataaatgatggctatgagaatcttggttgttttctacatcggggaatagtctatgcacatctaaaactttggctgctggcaatttgtgactttgaaactgtcatttctctagaaagaactattactttggcttatgtaaatattggcctcatacatctgctacacctggataactacacggaagctatttggcaattttctgaggctattagaattgatcctttatgtattcaaagctatctttgtcgggcggaaacctattttaagttgcataaattgaaaaaggcagtaaatgaattgtctcgtgctatccaccttcagccagatggaatccaattatacataagaagaggacaatatcttcttatgatgaaatattatgatcttgcaaagtttactatttatcaaatagcagaaatggacaaaggtctcagtgagttgagtcctatgcagcaagcccttatttattcattttgtgaaaaccatgacaaggccattgaggtcttggacggaatcagctggaatagagctgagatgaccatgtgtgctctattagcaaaagttcaaatgaaggccaagagaaccaaggaagctgtggaagtgcttaagaaggctttggatgccatttctcattctgataaaggaccagatgccacagcaatttcagcagactgtctgtataacttgggtctttgttacatggaggaaggcaatttacaaatggcttttgattcttttacaaaagctgtgaaagcaaatccagattttgcagaaagcttttatcagcgagggctttgtaaagtgaaactccacaaggatagctcgattctggattttaatcgtgcaattaccctcaatccaaaacattaccaggcatatttaagccgagtagcattctatggtttaaaaggcaggtattccaaagcaatcttgaattgtaacaaggctattaaaatttaccctgaaagcgtacgtgcctatctctacagaggagttctgaaatactacaacaagacttataagctagcaattacagatttaactacagctatcagcatggacaaaaatagttatacagcattttataacagagcattatgttacaccaagataagggaacttcaaatggcattaacagattatggaattgtgctgcttcttgatgctacagaaactgtaaaactaaataccttccttaatcgtggactcatctacgtagaactaggccagtatggctttgcactagaggattttaaacaagctgcactgataagccggactaacgggagcctttgtcacgccactgccatgtgccatcacagaattaatgagtttgaagaagctgtcaatttctttacttgggctcttaaaattaacccatgttttctggatgcttatgttggacggggaaattcttacatggaatacggtcatgatgaagccaccaagcaagcacagaaagactttctgaaagcactgcatattaatccagcatacataaaagccagaattagttttggctataatttgcaggcccaaggaaaattccagaaagcttggaaccactttaccattgccatagatactgatccaaagaactacctagcctatgaaggaagagctgtggtctgtcttcagatgggtaataattttgctgcaatgcaggatattaatgctgccatgaagatcagtactacagcagaattcttaacaaatcgtggggtgattcatgagtttatgggccacaaacagaatgcaatgaaagactaccaagatgcaattactctaaaccccaagtactcgctggcttactttaatgcaggaaatatctactttcaccacaggcagttttcccaggccagtgactacttctcaaaagctttaaaatttgatccagaaaatgaatatgttctcatgaatcgagctattacaaatacaatattaaagaaatatgaagaagcaaaagaagattttgcaaatgtaattgaaagctgtcccttttgggctgcagtatattttaatagagcacatttctactactgcttaaagcaatatgaactagctgaggaagaccttaataaagccctgtctttgaagcctaatgatgctctagtatataattttagagcaaaagttcgtggtaaaataggtctgattgaggaagctatggctgactataaccaagcacttgatcttgaagactatgcctcagttatatgattacatagactgtggttgctatagtagtttacacagctgttctctctgaaacggaaacatatttgttgtctaaaaggttctaccattttcattattgtattcgttatgcttagtcttccatataaccttctatgcattttaataaaatgtttgttatacattaattataaaa

SEQ ID NO: 190626 - DNA, 3567 bp, Homo sapiens
  Payload ID: 17655
  Gene Name: tetratricopeptide repeat domain 6
  ENST ID: ENST00000533625
  CDS Start-End: 127-1449
agtcgagcccacccggcccctaggcacaggaaaggcctgttggacactcgccgagcggcggggccaagctcaccgccacctgaattggagcggaggcgccctcgatgccgggtcaaatttgtcaagatgtccacaatcccgagacactttggcctgaaatacaaagaggaatcgtatatgtttaaagagcttgagaaagttcggcaggaaactaaaaaggattttctccgattcaagcagaagttggcctccaagccggctgtagatgaaagcccagtccacagcctccatgcccccggcccggcccgccccgcgcgcgtttcctgcgccgcagcccggacgtcgagaagatacccttcgcttaaaggccctgcgatgtccgcggccgccctcctgcaggaggtgctcggaggcgcgccgcgtccctcgggcctgggtgaggcggcggctccaggcaagacccggtcgtttcgcccccgggacttttacttgcggagctccgcgttcctacggcaccaggccctgaaaaagcccccagtcatcgcctcggggttcggcacggccagacccgtggtcctgctgcctccgcccgagccacccgtgaagcgcagagcgcgcggggtcttggagagctcgcggcacgcggctcccaggcgggtcttccacttgggaagggagcgcgaacagagccaggaggtagctcctctcgcagggccctgcatggccaaagagaggaaggccagctccgtctccgcagaggacggctacatggaggccagcagcgggcggaggaaagtgaggatccgcagcaacttcgtgagcgagagcggggcccgcgaggcgcgggaagcggcggggttaggagcccagggagaacaggagagctggccgcccagcgacgcgcgggaggccgcctggcaggcgctgctgccctcccgcgtgatccccacgtccatcgaagagatcatcgcctctctgcagtccgaggcccagctggcctccgaccagaccatcaaagagctcatacggagcgtccttggccagaactacgacattacaatggaagatatttctttaatgggaaaaatgtacctcaaaacatcacctatgcaagcagaaacacctgagatacaagcagagtataaattccagatgggtgctgaggaatcgcaaatgagcgtgcataaggaactttctgaaaccatgtcaagtattctccagattgaacaagaggatatagaatggggaccctcagaagcagaaagcatagtatttaaacctcaggaaatttcgcaagttcagccagcagaggaattaagtaaacctttggaagatggacagcccacaagtgattcaaaagaagccaagtgggtgtctttaacgcacactttatattttcttaaaggcaaaatcaccagaattcttgcaaatcgaaggaaaagaaattaagcgaatgcggaaacgtaaatcactgagaccaagaaagtcttcaaaacctctttgtgataaaaaactacataaaaaaattccacaagactactccatgccgcaccttcatgatctgtgcaccaccatcccagcccaggagctgcctgttgacttgcgcctggcttctcgagtgtatcacactgctaacaggaaaggccacgataccctgcttggaaaatttggaacctctttcttagatgatcgctttacagatgaagaacaaacagatagaatattgtatggaattcctgttatggatgacaaccaagaatatgtccatattcctccgacaccgcaagggataccacctgaattggcacaaggaactagagagcgtgctcacaaaccacacttggaagtcttgggagaggaaatgtatgcttatccagaattcacgaagttgttttggaatacagctgcacctaaattctctgttccagaatctgtcatgaaggaaactctatatccaaaatatgagagtgttcaagcaagcagacttttaactgataaattgtcatataaaagcagtgtcattactttacatcaacatagcagaacaaatttttggtgtttcttaccaagaaaatctgcatcatttgaaagtatccaaaaatggtttagtgcacaacctacacaactaaggcgagtaaaatcttctgtagacttgaggaaggagaagatcatagctcctttggaaatcaagaatgatatgcaaagcagtataaaagaggttatgtttcagaaagcaaaggaattgaaacgtcagctccagctcactaagcaaaataaaactgaggagcccaactatgtgaaagaaagtatagatgacatctttgataacatgtgcgaaaaacacagtttgagaaatctctctttgactctcattgaagcgtctaaaaaagctggcattagttacattgtttatcccaagaaaaagaagatgagatggaagaaaagattgaaacaacaaaaacttatattcgtgcatgaagagttatccaagcctccaaaatctcttgaaagattcctcgaggtctgaacaagaaccactgacgcagaacgtgaaaactagaagcgttcattagcgaccaccctttgtttgactgatgaggaaatcaaggctgatggatacaattggacaaactgattgtgcaactgactccacacaaatctcatttaatcagctttcctaatcacctatctctctatctacctatctatttcttgatcatccgcaaaattgattggcgatagaagacactacctatctgtagtactgacttgaattgaaatgaaaaatcaggcaagtagtggattcaaatggaattttcactttaagccttctttggaagtaatatatttttgtttttcaagtccggaacaaagaaagaacaaagatgatttgatgtagtgcagcagtttgaagataggtgactttctgagatgctatttctggcaattgtggtggtaaatccttcaacatttggatcactgagttcttcgattttcttccttctcttcagaaattgaagttgtaaaattgtttgagaagttttatcagttcctggatgcatttgaataacactaaccagaggaccaagctagtcacaacacaaagcgatggtcacttggagtcatggatccaatatgcacacagttgtggaagaaatgcagagacaatttaatgtgttttcaatgaagaattggcagttgtggaaggaatactgcaggtcctcttctactctcaaaggcaaggaaacttggagctgatttaattattctgcagtgttctactgcaagttgaccagtaagaacatcttcgtttcactcatcaatgaagctctctactggataggaaggccgccgtccatctccagccataggtttaatgaagatgagaacctcagaattgctgcagccatcttgctaccaaggcagaacaaatgagaaagtcagtatgctaaggaaggcagctgaggaaggaagaaaaatcttgggttcctgttgacattgctctgtccctgaaatcttctacctctgaatttcttgttatgaggcaataaacactccaattcttta

SEQ ID NO: 190627 - DNA, 5157 bp, Homo sapiens
  Payload ID: 17656
  Gene Name: tetratricopeptide repeat domain 7A
  Uniprot ID: Q9ULT0
  ENST ID: ENST00000319190
  CDS Start-End: 369-2945
ggccaggggcgggtccgcagctggcggcgccggggcccggggcggaggctgtggcagcagctgcagcggcggcggcggcggcagcgccaggagctgctacagcagaggcggaggttgctcctgtacgcgtacgggccgctcggccggagccgcagcccggaggcgccgggcggtgcgctgggagctgctggtgctgctgctgctgctgctgcccaccctccgccgcccgggcccccgctgccgcccgggccccggctgccgtctgcgcccccgtcgaccccgcccgcgagtgcgccccagccaggacgccgcccccggccgggtctccacttcttggccgcaccttccatgacagcgcccgcgagaagatggctgcgaagggcgcgcacggctcctacctgaaggtggagagcgagctggagcgctgccgcgccgagggccactgggaccgcatgccggagctggtccggcagctgcagacgctgagcatgcccggcggcggaggtaacaggcgaggcagcccgagcgcagcgttcacctttccggacaccgatgactttgggaaattgctgctggctgaggccctcctggagcagtgtttgaaggagaaccatgccaaaataaaagactccatgcctttgctggagaagaatgagccgaagatgagcgaagccaaaaattatctaagcagtatccttaaccatgggaggctctcgccacagtacatgtgtgaggccatgctgatcctgggcaaactgcattacgtggagggctcataccgagatgccatcagcatgtacgcacgggccgggattgatgacatgtccatggagaacaagcccctgtatcagatgcggctgctgtcggaggcttttgtcatcaaaggcctctctctggaacgcctacccaactccatcgcctcccgcttccgcctgacagagagggaggaggaagtgatcacctgttttgagagggcctcctggatcgctcaggtgttcctgcaggaattggagaagaccacaaataacagcacgtcgaggcatctgaaaggctgtcacccgcttgactatgagctcacctacttcctggaagctgccctccagagcgcctatgtgaaaaacctgaagaaggggaacatcgtgaagggcatgagagagctccgggaggtgctgcggactgtggagaccaaagcaactcagaacttcaaagtgatggcggccaagcacctggcgggggtcctgctgcactccctgagtgaggagtgctactggagccccctgtcccaccctctgcctgagttcatgggcaaggaggagagttctttcgccactcaggccctgcggaaacctcacctctatgaaggagacaacctctactgccccaaggacaacatcgaggaagccctcctgctcctcctcatcagcgaatccatggcaactcgagatgtggtgctgagccgggtgccggagcaggaggaggaccggacagtgagcttgcagaatgccgcagccatctatgacctcctgagcatcacgttgggcagaaggggacagtacgtcatgctctcggagtgcctggagcgagccatgaagtttgcgtttggagaatttcacctttggtaccaggtggccctctccatggtggcttgtgggaagtcagcctacgctgtgtccctgctgcgggagtgtgtgaagttgcggccctcggaccccaccgtgcccctgatggccgcgaaggtctgcatcgggtcccttcgctggctagaggaagcagagcactttgccatgatggtgatcagcctcggagaggaagccggggagttcctccccaagggctacctggctctgggtctcacctatagcctgcaggccaccgacgccaccctgaagtccaagcaagatgaattgcaccggaaggcactgcagacgctggagagggctcagcagctggcgcccagtgacccccaggtcatcctctatgtctcgctgcagctggccctcgtccgacagatctccagtgccatggagcagctgcaggaggccctgaaggtacgcaaggatgatgcccacgccctccacctgctggcactgctcttctctgcccagaagcaccaccagcatgccctggatgttgtcaacatggccatcaccgagcaccctgagaacttcaacctgatgttcaccaaggtgaagctggagcaggtgctgaaaggcccagaggaagccctcgtgacctgcagacaagtgctgaggctgtggcagaccctgtacagcttctcccagctgggaggcctagaaaaggatggcagcttcggtgagggcctcaccatgaagaagcagagtggcatgcacctgactttgcctgatgcccatgatgcagactctggctcccggcgggcttcgtccatcgccgcctcccggctggaggaggccatgtcagagctgactatgccctcttcggtcctgaagcagggccccatgcagctgtggaccacgctggaacagatctggctgcaggctgctgagctgttcatggagcagcagcacctcaaggaagcaggtttctgcatccaggaggcggcgggcctcttccccacttctcactcagtactctatatgcggggccggctggctgaggtgaagggcaacctggaggaggccaagcagctgtacaaggaggcgctcacggtgaacccagatggcgtgcgcatcatgcatagcctgggtctgatgctgagtcggctgggccacaagagcttggcccagaaggtgcttcgtgatgccgtggagaggcagagtacgtgccacgaggcgtggcagggcctgggcgaggtgctgcaggcccagggccagaacgaggctgccgttgactgcttcctcaccgcccttgagctggaggccagcagccctgtactgcccttctccatcatccccagagagctctgacgacgctgcagccgcagggagggaggggctggccagagggagaggcagcagggaacgtgggtcagggtggggcaacagtggcatcaggtgcggggcctcagggaaatacatctttagtgaacgcctctgcagctgcagccctcgttctcttggctgggccaagagggccttcctggatttctttgttggtgccttgggaaacagtctgacttgaaccctaagtgcctttggagagttttgtggtgaccagacttgctccccaagagctgggcagcggggagcctcacagctgtccttcaccctcacccatgcctctggcttggagtctgggtggggggttctcactccccactctcagcacagtacagacttctggatctctctcaggtcttgcccagggcggtcacaatgtgaagaaactgcgggcaagtgggaagactatgagatttctgggttcccttctcagacttggagttagtagatgattcctgcattgcccctgcttgccctctgagaccagctgggccccaccttgctctttccccctgctaccaagtgcctttggggtctgaccaggggtactgagcaccggccctaacacttccatctccacccaccccatctccctggcgatgtgctccagcccaagcagcctccgtaggctttagatcctgtggttgctagatccagtcctttctaataccctgagtcaacacattactcctgcaggtcttaggctacaatgcaggtcccttgagggccaccaacatggaggtaggcagtttctaggactgtccccagtacatctcaccacccacagccctttttttgccttgattcgagcctcaccctggccttttggcttcccctgcctgagagagacctgaggaggggacagagcccagcccctctcctgtggctgagcaggcctctgtgtccatgacacctgtcttccgggcctgggggctgtgggtgtatgtcctccctactggcttccccggcccctgctgcatgatgctcttggaactcttctccaaggagtcagtcccccaggcctatcaggggatccttttgtatctgcactttgggttttagtttcaaagctccatcaggtacagcttgcatttcaggatgtgtggaaagctcgggtgagggctgccctggttcatcatagctccaccttcctcggaaggagtgggctgttggagaccccccatccatggcacactagctcagcactgcatttcccgagatgattcccaagacagctggtgcctcctggctttcctgtgccaggccaaggggcaccacagaggaccctggatcctttgcctcttcttggttgaaggatctctatgtatgtgtgtatataaatatagttttttatctatatatataaaatagagatctattttttttctggaattctgttagaaaagtaaagaaaaagcaaatgctgttggtttatctcagggtgcccaaagtggttatagtcaatttttggtactaggaaaggcacccaatgcatttcctgacttttaagcatttccttgttggaagcagcagagggccaggccaagttgctgacagtgactttgcaggttgaataaagaaacccttggaggggaagcaggcttgtctgaagcagcatgtatattcactgggcatgtagctcccacaccagccttgagccaggccctggacaggaggggctgttgcaggatgagggaggccagagaaggcatcgaagccaagacctgggcccacctggggagggatgtgggaaaggaaggatgggagggaggaccctctgggaaaatgtggatttgagctggtgagagtgttgctaaggctgggctaaagcctggagagggtaggaggaggcaagaggggtccaggcagggctgatcctggcctctgacctgtccagggcgacccctgaagcccctgctgcctctgggcattgctgggagaggccaaggcaggactcacgtctgaacagagatcccctcgggcattgctgatgggccaccttcagctgcagggaagaagcctaggagaggaggcatgggagggacctgggccttgttcagattggccacctctgctgagaagtccataccagtacacccctaataagttatgccacataccaacgtactgtggatattataacctgcattaaaacaactctaaagaacgctgctcattt

SEQ ID NO: 190628 - DNA, 4306 bp, Homo sapiens
  Payload ID: 17656
  Gene Name: tetratricopeptide repeat domain 7A
  Uniprot ID: Q9ULT0
  ENST ID: ENST00000394850
  CDS Start-End: 257-2905
ggttgctcctgtacgcgtacgggccgctcggccggagccgcagcccggaggcgccgggcggtgcgctgggagctgctggtgctgctgctgctgctgctgcccaccctccgccgcccgggcccccgctgccgcccgggccccggctgccgtctgcgcccccgtcgaccccgcccgcgagtgcgccccagccaggacgccgcccccggccgggtctccacttcttggccgcaccttccatgacagcgcccgcgagaagatggctgcgaagggcgcgcacggctcctacctgaaggtggagagcgagctggagcgctgccgcgccgagggccactgggaccgcatgccggagctggtccggcagctgcagacgctgagcatgcccggcggcggaggtaacaggcgaggcagcccgagcgcagcgttcacctttccggacaccgatgactttgggaaattgctgctggctgaggccctcctggagcagtgtttgaaggagaaccatgccaaaataaaagactccatgcctttgctggagaagaatgagccgaagatgagcgaagccaaaaattatctaagcagtatccttaaccatgggaggctctcgccacagtacatgtgtgaggccatgctgatcctgggcaaactgcattacgtggagggctcataccgagatgccatcagcatgtacgcacgggccgggattgatgacatgtccatggagaacaagcccctgtatcagatgcggctgctgtcggaggcttttgtcatcaaaggcctctctctggaacgcctacccaactccatcgcctcccgcttccgcctgacagagagggaggaggaagtgatcacctgttttgagagggcctcctggatcgctcaggtgttcctgcaggaattggagaagaccacaaataacagcacgtcgaggcatctgaaaggctgtcacccgcttgactatgagctcacctacttcctggaagctgccctccagagcgcctatgtgaaaaacctgaagaaggggaacatcgtgaagggcatgagagagctccgggaggtgctgcggactgtggagaccaaagcaactcagaacttcaaagtgatggcggccaagcacctggcgggggtcctgctgcactccctgagtgaggagtgctactggagccccctgtcccaccctctgcctgagttcatgggcaaggaggagagttctttcgccactcaggccctgcggaaacctcacctctatgaaggagacaacctctactgccccaaggacaacatcgaggaagccctcctgctcctcctcatcagcgaatccatggcaactcgagatgtggtgctgagccgggtgccggagcaggaggaggaccggacagtgagcttgcagaatgccgcagccatctatgacctcctgagcatcacgttgggcagaaggggacagtacgtcatgctctcggagtgcctggagcgagccatgaagtttgcgtttggagaatttcacctttggtaccaggtggccctctccatggtggcttgtgggaagtcagcctacgctgtgtccctgctgcgggagtgtgtgaagttgcggccctcggaccccaccgtgcccctgatggccgcgaaggtctgcatcgggtcccttcgctggctagaggaagcagagcactttgccatgatggtgatcagcctcggagaggaagccggggagttcctccccaagggctacctggctctgggtctcacctatagcctgcaggccaccgacgccaccctgaagtccaagcaagatgaattgcaccggaaggcactgcagacgctggagagggctcagcagctggcgcccagtgacccccaggtcatcctctatgtctcgctgcagctggccctcgtccgacagatctccagtgccatggagcagctgcaggaggccctgaaggtacgcaaggatgatgcccacgccctccacctgctggcactgctcttctctgcccagaagcaccaccagcatgccctggatgttgtcaacatggccatcaccgagcaccctgagaacttcaacctgatgttcaccaaggtgaagctggagcaggtgctgaaaggcccagaggaagccctcgtgacctgcagacaagtgctgaggctgtggcagaccctgtacagcttctcccagctgggagactttaggagcccagaaggcttccagactccccagaggaacatctgtaacagtgaaatttacagaggaggaggcctagaaaaggatggcagcttcggtgagggcctcaccatgaagaagcagagtggcatgcacctgactttgcctgatgcccatgatgcagactctggctcccggcgggcttcgtccatcgccgcctcccggctggaggaggccatgtcagagctgactatgccctcttcggtcctgaagcagggccccatgcagctgtggaccacgctggaacagatctggctgcaggctgctgagctgttcatggagcagcagcacctcaaggaagcaggtttctgcatccaggaggcggcgggcctcttccccacttctcactcagtactctatatgcggggccggctggctgaggtgaagggcaacctggaggaggccaagcagctgtacaaggaggcgctcacggtgaacccagatggcgtgcgcatcatgcatagcctgggtctgatgctgagtcggctgggccacaagagcttggcccagaaggtgcttcgtgatgccgtggagaggcagagtacgtgccacgaggcgtggcagggcctgggcgaggtgctgcaggcccagggccagaacgaggctgccgttgactgcttcctcaccgcccttgagctggaggccagcagccctgtactgcccttctccatcatccccagagagctctgacgacgctgcagccgcagggagggaggggctggccagagggagaggcagcagggaacgtgggtcagggtggggcaacagtggcatcaggtgcggggcctcagggaaatacatctttagtgaacgcctctgcagctgcagccctcgttctcttggctgggccaagagggccttcctggatttctttgttggtgccttgggaaacagtctgacttgaaccctaagtgcctttggagagttttgtggtgaccagacttgctccccaagagctgggcagcggggagcctcacagctgtccttcaccctcacccatgcctctggcttggagtctgggtggggggttctcactccccactctcagcacagtacagacttctggatctctctcaggtcttgcccagggcggtcacaatgtgaagaaactgcgggcaagtgggaagactatgagatttctgggttcccttctcagacttggagttagtagatgattcctgcattgcccctgcttgccctctgagaccagctgggccccaccttgctctttccccctgctaccaagtgcctttggggtctgaccaggggtactgagcaccggccctaacacttccatctccacccaccccatctccctggcgatgtgctccagcccaagcagcctccgtaggctttagatcctgtggttgctagatccagtcctttctaataccctgagtcaacacattactcctgcaggtcttaggctacaatgcaggtcccttgagggccaccaacatggaggtaggcagtttctaggactgtccccagtacatctcaccacccacagccctttttttgccttgattcgagcctcaccctggccttttggcttcccctgcctgagagagacctgaggaggggacagagcccagcccctctcctgtggctgagcaggcctctgtgtccatgacacctgtcttccgggcctgggggctgtgggtgtatgtcctccctactggcttccccggcccctgctgcatgatgctcttggaactcttctccaaggagtcagtcccccaggcctatcaggggatccttttgtatctgcactttgggttttagtttcaaagctccatcaggtacagcttgcatttcaggatgtgtggaaagctcgggtgagggctgccctggttcatcatagctccaccttcctcggaaggagtgggctgttggagaccccccatccatggcacactagctcagcactgcatttcccgagatgattcccaagacagctggtgcctcctggctttcctgtgccaggccaaggggcaccacagaggaccctggatcctttgcctcttcttggttgaaggatctctatgtatgtgtgtatataaatatagttttttatctatatatataaaa

SEQ ID NO: 190629 - DNA, 3033 bp, Homo sapiens
  Payload ID: 17656
  Gene Name: tetratricopeptide repeat domain 7A
  ENST ID: ENST00000409245
  CDS Start-End: 434-2908
ctcctatacagggctcttggttcaggtctcttggttcgtcctgctgcaagttgggaagaaagataataggaatgctaattccttcttgatgaaacgaccacaacacgctggagccggccttggaccctacgtttcaagattggcctgcttccagcgtctgccagctccactgcacaagctgcggcagccgctgtccccgttcgcttccacgggagtcccagcaagactatgcgacccagttcaaataccatcttccatgtaccgttcgtgaaatcagcagcttttgacattcaagagaggacagattacttaaaaacagactcatgaacaaatagggaaacgaatacatcatccctgtatcgaattcatccctgtataatcctgcccttacacctgtgctcctatacaagattaacattcaaaaagagtctccatggtgcccagctcgtctcgaactcctgggttcaagcaatcctcccaccacctccgcctcccaaagtgctgggattacagggatgactttgggaaattgctgctggctgaggccctcctggagcagtgtttgaaggagaaccatgccaaaataaaagactccatgcctttgctggagaagaatgagccgaagatgagcgaagccaaaaattatctaagcagtatccttaaccatgggaggctctcgccacagtacatgtgtgaggccatgctgatcctgggcaaactgcattacgtggagggctcataccgagatgccatcagcatgtacgcacgggccgggattgatgacatgtccatggagaacaagcccctgtatcagatgcggctgctgtcggaggcttttgtcatcaaaggcctctctctggaacgcctacccaactccatcgcctcccgcttccgcctgacagagagggaggaggaagtgatcacctgttttgagagggcctcctggatcgctcaggtgttcctgcaggaattggagaagaccacaaataacagcacgtcgaggcatctgaaaggctgtcacccgcttgactatgagctcacctacttcctggaagctgccctccagagcgcctatgtgaaaaacctgaagaaggggaacatcgtgaagggcatgagagagctccgggaggtgctgcggactgtggagaccaaagcaactcagaacttcaaagtgatggcggccaagcacctggcgggggtcctgctgcactccctgagtgaggagtgctactggagccccctgtcccaccctctgcctgagttcatgggcaaggaggagagttctttcgccactcaggccctgcggaaacctcacctctatgaaggagacaacctctactgccccaaggacaacatcgaggaagccctcctgctcctcctcatcagcgaatccatggcaactcgagatgtggtgctgagccgggtgccggagcaggaggaggaccggacagtgagcttgcagaatgccgcagccatctatgacctcctgagcatcacgttgggcagaaggggacagtacgtcatgctctcggagtgcctggagcgagccatgaagtttgcgtttggagaatttcacctttggtaccaggtggccctctccatggtggcttgtgggaagtcagcctacgctgtgtccctgctgcgggagtgtgtgaagttgcggccctcggaccccaccgtgcccctgatggccgcgaaggtctgcatcgggtcccttcgctggctagaggaagcagagcactttgccatgatggtgatcagcctcggagaggaagccggggagttcctccccaagggctacctggctctgggtctcacctatagcctgcaggccaccgacgccaccctgaagtccaagcaagatgaattgcaccggaaggcactgcagacgctggagagggctcagcagctggcgcccagtgacccccaggtcatcctctatgtctcgctgcagctggccctcgtccgacagatctccagtgccatggagcagctgcaggaggccctgaaggtacgcaaggatgatgcccacgccctccacctgctggcactgctcttctctgcccagaagcaccaccagcatgccctggatgttgtcaacatggccatcaccgagcaccctgagaacttcaacctgatgttcaccaaggtgaagctggagcaggtgctgaaaggcccagaggaagccctcgtgacctgcagacaagtgctgaggctgtggcagaccctgtacagcttctcccagctgggaggcctagaaaaggatggcagcttcggtgagggcctcaccatgaagaagcagagtggcatgcacctgactttgcctgatgcccatgatgcagactctggctcccggcgggcttcgtccatcgccgcctcccggctggaggaggccatgtcagagctgactatgccctcttcggtcctgaagcagggccccatgcagctgtggaccacgctggaacagatctggctgcaggctgctgagctgttcatggagcagcagcacctcaaggaagcaggtttctgcatccaggaggcggcgggcctcttccccacttctcactcagtactctatatgcggggccggctggctgaggtgaagggcaacctggaggaggccaagcagctgtacaaggaggcgctcacggtgaacccagatggcgtgcgcatcatgcatagcctgggtctgatgctgagtcggctgggccacaagagcttggcccagaaggtgcttcgtgatgccgtggagaggcagagtacgtgccacgaggcgtggcagggcctgggcgaggtgctgcaggcccagggccagaacgaggctgccgttgactgcttcctcaccgcccttgagctggaggccagcagccctgtactgcccttctccatcatccccagagagctctgacgacgctgcagccgcagggagggaggggctggccagagggagaggcagcagggaacgtgggtcagggtggggcaacagtggcatcaggtgcggggcctcagggaaatacatctttagtgaacgcc

SEQ ID NO: 190630 - DNA, 4739 bp, Homo sapiens
  Payload ID: 17656
  Gene Name: tetratricopeptide repeat domain 7A
  ENST ID: ENST00000409825
  CDS Start-End: 1-199
ccatgccaaaataaaagactccatgcctttgctggagaagaatgagccgaagatgagcgaagccaaaaattatctaagcagtatccttaaccatgggaggctctcgggtctcgctgtgttactcaggctggtctccaactcctgggctcaagcgatcctcctacttcagcctcccgaagcgttgggattacaggagtgaggcactgcgcccagctgatttttaaagagctattccaaaccacagtacatgtgtgaggccatgctgatcctgggcaaactgcattacgtggagggctcataccgagatgccatcagcatgtacgcacgggccgggattgatgacatgtccatggagaacaagcccctgtatcagatgcggctgctgtcggaggcttttgtcatcaaagcatgcctccggcttcttgggggaacacagtcccggtggtcagaggtcctgcaggggaggcctctctctggaacgcctacccaactccatcgcctcccgcttccgcctgacagagagggaggaggaagtgatcacctgttttgagagggcctcctggatcgctcaggtgttcctgcaggaattggagaagaccacaaataacagcacgtcgaggcatctgaaaggctgtcacccgcttgactatgagctcacctacttcctggaagctgccctccagagcgcctatgtgaaaaacctgaagaaggggaacatcgtgaagggcatgagagagctccgggaggtgctgcggactgtggagaccaaagcaactcagaacttcaaagtgatggcggccaagcacctggcgggggtcctgctgcactccctgagtgaggagtgctactggagccccctgtcccaccctctgcctgagttcatgggcaaggaggagagttctttcgccactcaggccctgcggaaacctcacctctatgaaggagacaacctctactgccccaaggacaacatcgaggaagccctcctgctcctcctcatcagcgaatccatggcaactcgagatgtggtgctgagccgggtgccggagcaggaggaggaccggacagtgagcttgcagaatgccgcagccatctatgacctcctgagcatcacgttgggcagaaggggacagtacgtcatgctctcggagtgcctggagcgagccatgaagtttgcgtttggagaatttcacctttggtaccaggtggccctctccatggtggcttgtgggaagtcagcctacgctgtgtccctgctgcgggagtgtgtgaagttgcggccctcggaccccaccgtgcccctgatggccgcgaaggtctgcatcgggtcccttcgctggctagaggaagcagagcactttgccatgatggtgatcagcctcggagaggaagccggggagttcctccccaagggctacctggctctgggtctcacctatagcctgcaggccaccgacgccaccctgaagtccaagcaagatgaattgcaccggaaggcactgcagacgctggagagggctcagcagctggcgcccagtgacccccaggtcatcctctatgtctcgctgcagctggccctcgtccgacagatctccagtgccatggagcagctgcaggaggccctgaaggtacgcaaggatgatgcccacgccctccacctgctggcactgctcttctctgcccagaagcaccaccagcatgccctggatgttgtcaacatggccatcaccgagcaccctgagaacttcaacctgatgttcaccaaggtgaagctggagcaggtgctgaaaggcccagaggaagccctcgtgacctgcagacaagtgctgaggctgtggcagaccctgtacagcttctcccagctgggaggcctagaaaaggatggcagcttcggtgagggcctcaccatgaagaagcagagtggcatgcacctgactttgcctgatgcccatgatgcagactctggctcccggcgggcttcgtccatcgccgcctcccggctggaggaggccatgtcagagctgactatgccctcttcggtcctgaagcagggccccatgcagctgtggaccacgctggaacagatctggctgcaggctgctgagctgttcatggagcagcagcacctcaaggaagcaggtttctgcatccaggaggcggcgggcctcttccccacttctcactcagtactctatatgcggggccggctggctgaggtgaagggcaacctggaggaggccaagcagctgtacaaggaggcgctcacggtgaacccagatggcgtgcgcatcatgcatagcctgggtctgatgctgagtcggctgggccacaagagcttggcccagaaggtgcttcgtgatgccgtggagaggcagagtacgtgccacgaggcgtggcagggcctgggcgaggtgctgcaggcccagggccagaacgaggctgccgttgactgcttcctcaccgcccttgagctggaggccagcagccctgtactgcccttctccatcatccccagagagctctgacgacgctgcagccgcagggagggaggggctggccagagggagaggcagcagggaacgtgggtcagggtggggcaacagtggcatcaggtgcggggcctcagggaaatacatctttagtgaacgcctctgcagctgcagccctcgttctcttggctgggccaagagggccttcctggatttctttgttggtgccttgggaaacagtctgacttgaaccctaagtgcctttggagagttttgtggtgaccagacttgctccccaagagctgggcagcggggagcctcacagctgtccttcaccctcacccatgcctctggcttggagtctgggtggggggttctcactccccactctcagcacagtacagacttctggatctctctcaggtcttgcccagggcggtcacaatgtgaagaaactgcgggcaagtgggaagactatgagatttctgggttcccttctcagacttggagttagtagatgattcctgcattgcccctgcttgccctctgagaccagctgggccccaccttgctctttccccctgctaccaagtgcctttggggtctgaccaggggtactgagcaccggccctaacacttccatctccacccaccccatctccctggcgatgtgctccagcccaagcagcctccgtaggctttagatcctgtggttgctagatccagtcctttctaataccctgagtcaacacattactcctgcaggtcttaggctacaatgcaggtcccttgagggccaccaacatggaggtaggcagtttctaggactgtccccagtacatctcaccacccacagccctttttttgccttgattcgagcctcaccctggccttttggcttcccctgcctgagagagacctgaggaggggacagagcccagcccctctcctgtggctgagcaggcctctgtgtccatgacacctgtcttccgggcctgggggctgtgggtgtatgtcctccctactggcttccccggcccctgctgcatgatgctcttggaactcttctccaaggagtcagtcccccaggcctatcaggggatccttttgtatctgcactttgggttttagtttcaaagctccatcaggtacagcttgcatttcaggatgtgtggaaagctcgggtgagggctgccctggttcatcatagctccaccttcctcggaaggagtgggctgttggagaccccccatccatggcacactagctcagcactgcatttcccgagatgattcccaagacagctggtgcctcctggctttcctgtgccaggccaaggggcaccacagaggaccctggatcctttgcctcttcttggttgaaggatctctatgtatgtgtgtatataaatatagttttttatctatatatataaaatagagatctattttttttctggaattctgttagaaaagtaaagaaaaagcaaatgctgttggtttatctcagggtgcccaaagtggttatagtcaatttttggtactaggaaaggcacccaatgcatttcctgacttttaagcatttccttgttggaagcagcagagggccaggccaagttgctgacagtgactttgcaggttgaataaagaaacccttggaggggaagcaggcttgtctgaagcagcatgtatattcactgggcatgtagctcccacaccagccttgagccaggccctggacaggaggggctgttgcaggatgagggaggccagagaaggcatcgaagccaagacctgggcccacctggggagggatgtgggaaaggaaggatgggagggaggaccctctgggaaaatgtggatttgagctggtgagagtgttgctaaggctgggctaaagcctggagagggtaggaggaggcaagaggggtccaggcagggctgatcctggcctctgacctgtccagggcgacccctgaagcccctgctgcctctgggcattgctgggagaggccaaggcaggactcacgtctgaacagagatcccctcgggcattgctgatgggccaccttcagctgcagggaagaagcctaggagaggaggcatgggagggacctgggccttgttcagattggccacctctgctgagaagtccataccagtacacccctaataagttatgccacataccaacgtactgtggatattataacctgcattaaaacaactctaaagaacgctgctcatttac

SEQ ID NO: 190631 - DNA, 2418 bp, Homo sapiens
  Payload ID: 17656
  Gene Name: tetratricopeptide repeat domain 7A
  ENST ID: ENST00000441914
  CDS Start-End: 1-992
tggctgcgaagggcgcgcacggctcctacctgaaggtggagagcgagctggagcgctgccgcgccgagggccactgggaccgcatgccggagctggtccggcagctgcagacgctgagcatgcccggcggcggaggtaacaggcgaggcagcccgagcgcagcgttcacctttccggacaccgatgactttgggaaattgctgctggctgaggccctcctggagcagtgtttgaaggagaaccatgccaaaataaaagactccatgcctttgctggagaagaatgagccgaagatgagcgaagccaaaaattatctaagcagtatccttaaccatgggaggctctcgccacagtacatgtgtgaggccatgctgatcctgggcaaactgcattacgtggagggctcataccgagatgccatcagcatgtacgcacgggccgggattgatgacatgtccatggagaacaagcccctgtatcagatgcggctgctgtcggaggcttttgtcatcaaaggcctctctctggaacgcctacccaactccatcgcctcccgcttccgcctgacagagagggaggaggaagtgatcacctgttttgagagggcctcctggatcgctcaggtgttcctgcaggaattggagaagaccacaaataacagcacgtcgaggcatctgaaaggctgtcacccgcttgactatgagctcacctacttcctggaagctgccctccagagcgcctatgtgaaaaacctgaagaaggggaacatcgtgaagggcatgagagagctccgggaggtgctgcggactgtggagaccaaagcaactcagaacttcaaagtgcctctactgccccaaggacaacatcgaggaagccctcctgctcctcctcatcagcgaatccatggcaactcgagatgtggtgctgagccgggtgccggagcaggaggaggaccggacagtgagcttgcagaatgccgcagccatctatgacctcctgagcatcacgttgggcagaaggggacagtacgtcatgctctcggagtgcctggagcgagccatgaagtttgcgtttggagaatttcacctttggtaccaggtggccctctccatggtggcttgtgggaagtcagcctacgctgtgtccctgctgcgggagtgtgtgaagttgcggccctcggaccccaccgtgcccctgatggccgcgaaggtctgcatcgggtcccttcgctggctagaggaagcagagcactttgccatgatggtgatcagcctcggagaggaagccggggagttcctccccaagggctacctggctctgggtctcacctatagcctgcaggccaccgacgccaccctgaagtccaagcaagatgaattgcaccggaaggcactgcagacgctggagagggctcagcagctggcgcccagtgacccccaggtcatcctctatgtctcgctgcagctggccctcgtccgacagatctccagtgccatggagcagctgcaggaggccctgaaggtacgcaaggatgatgcccacgccctccacctgctggcactgctcttctctgcccagaagcaccaccagcatgccctggatgttgtcaacatggccatcaccgagcaccctgagaacttcaacctgatgttcaccaaggtgaagctggagcaggtgctgaaaggcccagaggaagccctcgtgacctgcagacaagtgctgaggctgtggcagaccctgtacagcttctcccagctgggaggcctagaaaaggatggcagcttcggtgagggcctcaccatgaagaagcagagtggcatgcacctgactttgcctgatgcccatgatgcagactctggctcccggcgggcttcgtccatcgccgcctcccggctggaggaggccatgtcagagctgactatgccctcttcggtcctgaagcagggccccatgcagctgtggaccacgctggaacagatctggctgcaggctgctgagctgttcatggagcagcagcacctcaaggaagcaggtttctgcatccaggaggcggcgggcctcttccccacttctcactcagtactctatatgcggggccggctggctgaggtgaagggcaacctggaggaggccaagcagctgtacaaggaggcgctcacggtgaacccagatggcgtgcgcatcatgcatagcctgggtctgatgctgagtcggctgggccacaagagcttggcccagaaggtgcttcgtgatgccgtggagaggcagagtacgtgccacgaggcgtggcagggcctgggcgaggtgctgcaggcccagggccagaacgaggctgccgttgactgcttcctcaccgcccttgagctggaggccagcagccctgtactgcccttctccatcatccccagagagctctga

SEQ ID NO: 190632 - DNA, 641 bp, Homo sapiens
  Payload ID: 17656
  Gene Name: tetratricopeptide repeat domain 7A
  ENST ID: ENST00000440051
  CDS Start-End: 1-326
atgtggtgctgagccgggtgccggagcaggaggaggaccggacagtgagcttgcagaatgccgcagccatctatgacctcctgagcatcacgttgggcagaaggggacagtacgtcatgctctcggagtgcctggagcgagccatgaagtttgcgtttggagaatttcacctttggtaccaggtggccctctccatggtggcttgtgggaagtcagcctacgctgtgtccctgctgcgggagtgtgtgaagttgcggccctcggaccccaccgtgcccctgatggccgcgaaggtctgcatcgggtcccttcgctggccaccctgaagtccaagcaagatgaattgcaccggaaggcactgcagacgctggagagggctcagcagctggcgcccagtgacccccaggtcatcctctatgtctcgctgcagctggccctcgtccgacagatctccagtgccatggagcagctgcaggaggccctgaaggtacgcaaggatgatgcccacgccctccacctgctggcactgctcttctctgcccagaagcaccaccagcatgccctggatgttgtcaacatggccatcaccgagcaccctgagaacttcaaaggcctagaaaaggatggcagcttcggtgagg

SEQ ID NO: 190633 - DNA, 19458 bp, Homo sapiens
  Payload ID: 17657
  Gene Name: tetratricopeptide repeat domain 7B
  Uniprot ID: Q86TV6
  ENST ID: ENST00000328459
  CDS Start-End: 123-2654
gttacgccgcggagccgggagccggagcccgagcccgcggcggcggcgggaggcggcgagggggcgccgcggcggcggcggtggggcctgcggggcgggcggccgggcccggccaggccgcgatggcgaccaagaaggcaggctcgcggctggagacggagatcgagcgctgccgctccgagtgccagtgggagcggatccctgagctcgtcaagcagctgtcggccaagctcatcgccaacgatgacatggcagagcttctcctcggggagtcgaagctggagcagtacctgaaggaacaccccctgaggcagggggccagtccccgaggccccaagccccagctgactgaggtccgcaagcatctgaccgccgccctggaccgagggaaccttaagtcagaattcctacaagaatccaatctgatcatggccaagttgaattatgtggaaggtgattataaagaagctctgaacatttacgcccgggtgggcctggacgatctgccactgacagctgtcccgccctacaggctgcgggtgatcgcagaagcctacgctaccaaaggactttgtttggagaagctgcctatttcttcttctaccagtaatctccatgtggaccgggaacaggatgtcatcacctgttatgagaaagcaggggacatcgcactcctgtatctccaagagatagaaagggtaatactttctaatattcaaaacagaagccctaagcctggccctgctccccacgatcaagaactaggttttttcctagaaacaggacttcagagagcccatgtcctctatttcaaaaatgggaacttgacaagaggagtcggaagatttagagagcttctcagagcagttgaaacaagaacgactcaaaacctgcgaatgacaatagccaggcagctggcagagatcttgttgcggggtatgtgtgagcagagctactggaaccctctggaggatccaccgtgccagtcacctctggacgatcctctccgcaaaggagcaaacacaaaaacctacactctcactcggagagcccgtgtctactcaggagagaacattttttgtcctcaagaaaatacggaagaagccctgttgttattgctgattagtgaatcaatggccaaccgggacgctgtgctgagcaggatacctgaacacaagagtgaccgcctcatcagtctgcagagtgcatctgtggtctatgacttactcaccattgctcttggaagaagaggccagtatgagatgctgtcagagtgcctagaaagagccatgaagtttgcctttgaggaattccacctgtggtaccagtttgctctgtccctgatggctgctggaaaatctgcccgtgccgtgaaggtgctgaaagagtgtatccgcctgaagccagacgatgccaccatccctctcctcgctgccaagctctgcatgggctccctgcactggttggaagaggctgaaaagtttgccaaaactgtcgttgatgtgggagagaaaacgtcagagttcaaggccaaaggctacttagctctggggctcacgtacagtctgcaggccactgacgcttctttgcgagggatgcaggaggtcctacagagaaaggcgcttcttgcatttcagagggcccacagcctgtcacccacagatcaccaagcagctttctacctggctctgcagcttgccatctccagacagatcccagaggctctggggtatgtccgccaagctcttcagcttcaaggtgacgatgccaactccctgcacctccttgccctcctgctgtcagcacagaagcattaccatgacgctctgaacatcatcgacatggccctgagtgaatacccagaaaatttcatactactgttttccaaagtgaagttgcagtcactctgccgaggcccggacgaggcactgctgacttgtaagcacatgctgcagatatggaaatcctgctacaacctcaccaaccccagtgattctggacgtgggagcagcctcttagatagaaccattgctgacagacgacagcttaatacaattactttgccagacttcagcgatcccgagacaggctccgtccatgccacatcggtagcagcctcaagagtggagcaggcactgtcggaagtggcttcgtctctgcagagcagtgcccctaagcagggcccgctgcacccctggatgacgctggcacagatctggctccatgcagctgaagtctatatcggcatcgggaagcctgcagaagccacagcctgtacccaagaagctgccaacctcttcccaatgtcccacaatgtcctctacatgcgcggccagattgctgagctccggggaagcatggacgaggcgcggcggtggtatgaagaggccttagccatcagccccacccacgtgaagagcatgcagcgactggccctgatccttcaccagctaggccgctacagtctggcggagaagatcctccgggacgcggtgcaggtgaactcgacagcccacgaggtctggaacgggctgggcgaggtcctccaagctcagggcaacgatgcggcggctacggagtgcttcctgacagccttggagctggaggccagcagccccgccgtgcccttcaccatcatcccccgcgtgctctgagcaggcgcctgccagcctcacctgccgctcaggcctcagaggccctgccgggcaccagggcttgtgccatcgccccaaggggatgaatctgccacactgaggccagggacgagtgttcagtgggccacagtgaaccaaccaaaccaaccccgaatcatcgctctcgccatgtgcgtttctcttgttttttttgccagcccaatggtagtttctgaacctattgacattgttcaaaatggatcatgtgccatattttgttagttgacatctgagttttcagtaaaatgattatggaattaatcagcaaatgtagaagaatatattcaaagttaaaattcagtggcagcacagattatttttatcagagctgtaaagaaaacaactgtccttttctccccaccacccctcctgccccactttggcccagaaaccaaatgtgaacttcctgtctcccacctcagcactagtccatgccaggacaccagctgacaatttcttggttttactgtcaataattgtaccatgtgatcaattactgtcctcacttagaacaaagcctgagtccgagaatatttatattttaccaatatatgcctgttacaagagaaggaaatatgagttatttaagtttaacttttttatgtgaattcagagtttatttatcgagggaaatatgtacaaagaagcttcaaatggaatatttaccgacattccttatacatgacagacacttggctacatgggaagatgatgttaataataaaatgatttttaaatggactcatagcctgtgtcattcgtaaaagctcaaagacctgagaaaggcttagttcctggggtggggagctgtctgtacctgggggcccactctggacatgtcagcccttgacactagaaagcccagcctctctttccccacttattttatttttattttttggagacagggtctcactctgtttcccaggctggagttcagtggtgcgatcacagatcactgcagcctcgacttcccaggttcaggtgatcctcccacctcagcctcctgagtagctgggatcacaggcgcacactagcatgcccggctaattttgtttgtttgtttttgtagagacgggatctcactgtgttacccaggctggtcctgaactcctggactcaagcagccctcccgcctcagcctccgaaagtgctggtgtgagccaccatgcccggccatctcctcacttataatttgaagatgatccctaggtagggacgtgtttcctgcgtcctcagcacccaggcctcctttttgcagcaacagccctggttttggtttgggaattcgccttagctctcccccgatggggctttggaattggagcatgcaattcagtcctgcccaagcagcctcctgcactcatgggccacagagggtcaggagtgagcatgtgacctaaagcggtccagtcagagcgggagccacagagaaggctgtcgctctttcctgctgcctttcaagctgagaagtgaggctggaactgcagcagccctcttgccaccatgagaagaaggtgtagaggtgtttgagccaaagtccgaatcccacagagtagacagcaagatccggaaccagagagaaactgagcaggtatctgcagtctctcagggacagctgtagggtggccccacctttccaggacacagggaaatatggagggctgagctctgaacttaggtgccctgaagcctagaggactgcattcaaactgggcacgacctctctggctcactgaggcaggcgggctagggggcagccaaggagggagagacagtaggtaggagccccagcctcagcactgaccctgccaggcagcacttgtggctttgagtggtcataagtcatggaatttgcaatgtaggacctggggcaggtactcagtgtggtggcagcttgccctgattggaggcacagggctgggctctgccatcccatgcgggagcgtggggcaaggcccactggatcaggaccaggaagggaggaggctgggccaccaaggcagatggtgcaggcgctgtaccagaccttctctgccaggccctcacctcagagactcctgtgcgtatcagccctgcagggcgcgggggctggctcctgtgtgtctgcccggcacctctccattgtcttcatctccctcagggaaccacccccactctccacccacatggctcaaggatggacacatgggcccagccttaacaaccagagccctccagctccccagtatcagtgactggtttgggtttgggcatgtgacccatgcttggccaatgagaagcacccctgggacttttgttatgaaaacattagaaaaaaagcctctttctgctgggtttgatgtcctaataggatgccagtggggggctgtgggtgccatttgacattatatggggtggcctgcctgagaatgatgccaacacagaaaaagagaatgaggaggtggaaagagagccgggccccgggtcaccgctggagcactgcggcccgagatttttccatcataggaatccatacagtttcccatcttgcttagtgcaagcacaggggtttccatcacttctacctaaaaggtacctaagaaatgcaggaaagtcctgccgtccttggtactccccccttgggcactcttccagactcctcagtcccccaccttaatcccactcacccacctcatattctgttttccagtaaatcttgtcttttctacccaaatcgcatctcaaatctctcccattcaacttcatccccagtaccttggccccagccccacacagtccaatgtctgcacagtcctcttagaagggaggattgagtcggttctctctataaacccctgatggcttctcaagcccttgcctggaaccagactctgtgtcccagccccctgtgtgcctggctgcctctccttccccaagccctctcatggctctggccttcttcctagtcttctgacctgctgagcctttcccaactaaggacattcatccatccgtccatccatccatccatccattcatccgtccacccgtccgtccgtccgtccatccatccatccatccatccatccatccatccatccatccgtccatccattaatagatgaggacgcagacgctagacactaagacggcaggacacctgcctggggtcattgtggaattacctggcagaactaagattgagacaggcctgagggataaacatttcaaaagtgcccaggtctgcccagtggaggcattttttggacagtgagatgcaggagatgccgcgtttgattccaggactagtgctgaccctaacttaggcaaggcgttcctgttccctggtcttagtctccccatctgtgaaatttcattcattcattcactcattcattcatccaacaaatatctatggaatgctcacaacatgccagatgcttattccaggcactgagggcacagcaatgtgtgacacagatgctgcatccacttaggacctaccttctggtagaaggaaacagacagatgaggagtatggcaggtggggtgacgcatggagaaagatgaagccagggaaggggtgtagggagtggcagggctgctgtttagaaggtgactagggaagcctcgctaagaaggtgacatctggctgaagaaagacaggtaacctgggaggaggacatctcaggaagcaggaacagcaggtgcaaaggcccagaggggagggggatggtcaggtggtgaaggatgagaagaggtcagaagtttaacaggggccacacaggtgcggcctcgtggaccatgctaacagtgtatattaattgcctgtggttgcagcaaattaccataaactggctgggcatggtggctcctgcctgtaatcccagcacttagggaggctgaggcaggagaatcagctgaggccaggagttcaagaccagcctgggcaacatggtgagaccccccccccatctctacaaaaaaaaaaaaatagccaggtttggtggcgtgcacctgtagtcccagctgcttgggaggctgagatgggctgattgcttgagcccaggtggttgaggctgcagtgagtgatcacgccaccgcagtccagcctgcatgagagagcaagaccctatctctacaaataaaataaattaaaaattttaaatgaccgcaaacttagcgtcttaacacaaatttattctctttgttttggaggtcagaagtcaaatcaagctttcagtggggctgtgctccttccccaggctctggaggaggacgggtgtccccgtcttctccagcggctagaggcttcctgcggccttggctcgtggccacctcacgtcacctttccttcctctgctccgtcactgcgtcacctttctgcctttgacctcctgcctccctctaaggactctgctggttgctctgggccccctggatagtccagggccattgccccacctcgagagccttcgttcaatcacatctgcatcgctccatctgtcatggaaggcaacatagtcacaggttccagggctcgggatgtggacgtctttgaggggcagggggagcacgttattctgcaggccgcagcgtgggagctgggaggctgtcaggctcctgctgtcacacagcgaccatggtgcttagaccaaggggcgtggaggaagtggcgagaggcactggactgtgaagattctgaagacagagccaagagggttgctcacacatggagctgggtgtgagggaggggagacgccagggatgagggtgagggtcttgtcctgagctactggaaggatggcgatgatggccaggaaacaggaagaataggttggggaggagaggagaaggcaggagtctgctttcaggcaggttgaatacaaaatgcctgtggagcctctgagggggaggcagctggctgggcaggagcccaggcgagagcccaagatgaggcgagagtgtgggaggtgtcagggatgcggggctgggagccatgggcctgacggggccacttcgggacaagcatagacaaagaggaagaggtcagggctgagctccggggctggcggggtttacaggctgggaaatgaagagatcaggaaagaaggcgcaggagcagctgcaagggaggcggagagcaggcagggtgagcttcctggaggaggtgggtgggctctctcaatgcctggagaccccgtcagggtggcctgagagctgaccgtgggcctggtggtgtgcaggttggcagtgaccttgaccagagccatgctggggatgcagttttgctcccccagattcatagggtggagcccccgcccctgtgtgactatatttggagataggccccttaaggaagtaattcaggtgaagtgaggtcatcaggaggggccctggcccagtaggattggcgtcctcaccagaagaaactctaaagtgcaagtgagctcacgctcagccacgccaggacacacggagaaggcggccacccgcaagccaggagggagcctcacaggaacccagatgggctggaacctttgctttgttctttgaacctccaggactgtgagaaattaagttcattgttgaagccacctgtctgtggcggttttcttacggcagcccaagctgactaaggtggggtcaagccaggttggagtgggctcaagggggaggaaaaggtgaagtctctttcaagagcgtagctgcagaggggagctgagaacacaggttaggagtccggtggggaaggggccgtgttgagtgttgaaggcggcctcgctgagcaccttgtgtttccagcagggcaggcgtgaggaaggagagagggaagctgaggggggctgccttggctgggggcctggtggttccccagagcagcagcagcagggaggcagaggcctgggtacccccaagccagggagccctggggacggggcacccactcctcagtgagcagggagccaacttcgggcagggtggggtggcgaatggaccaggaagggaaggaggaggcagaggagggaggaggcccttctttgaaggagccgccccactcagccaagaggatctcaggacagagccaggctgggggcctgggcaggtgtggccggggcaggccacttcccatccccagccccatttgggatccatgggctcgtctgtctgtctctctgcctccttccaggtcctgggccctgggctgtggccagggctctgctcaccctcagggctgcgtggggacctccctcggtggggaaaggagggaaccaaggcctcccgttatcctccatgccccctacctgtggtcatggcctgggggaggtgcatgctcgtgcacaggtgggcgtgtctgtgatcacatggagcaacccagactcctccagatggccccacgcatctccccggcggccacacagtcatcattgcgggcccagactctctgcctgcaggaagtcccccctttgcaggcaccctccccatcatccttggagttctccacgtctgccctgtccgtgctgggcctgtcaccagcctgtcacctgctgccccagccccagcccaggtccctgcagcacagccggctccaggctggaatgggtgacccggccctactgaaggaatttcagggcagggtcagccactctggccactgtctccctccaatgcccccataccctcccagcgctcggcccctgccactcggccccctctctccatatcgccaccttctcattcctgctcctcccccaccacctctcaaggccgacagggtgggcattgcccagtgaggggacaccactcatattgaagttctgtaaactgtgtcttgggcactgtaccaggtggctgctcccatccctcccctagcgtctgcttgccctgtccatcctgcctactccagaagcagccacacacttgaccataagcctttgaggcctggccggagtcctccgggggaggcgggcagtagcagccgcactgggcctgaggaccccacacaggaaaatgggccgagccccagggctgagccttagggctgcggccgttcccgccactaacattcctcccacacttgtggtcatgcatttcctgctgcccctgcccacgctgcagccagataggaacagaaaaaggacatcctgcaccatttcagacaggaatgtgctcctcctgaaggtcttttgggggccaggctgaggccccccctcaaggtcacaccgtgggggacccactccagctctgcacctgctgggggtgatcctcactgtgccactgtccctccctggactcagaatcagatgaggacagtcacctctgcccagcctgccttctgggctgagatgtgagtctgcaggcagctgtcagaggtggtgtgtgccaggtaggggacacgagggctaccgcccctcaggaccaccacacagggcctcagggccaggccagcaggcaggactcctcctggacactcaagccctgagtggggctgactatggagaggtggcaggaaggtggtgggggatcttctgcaggtctgcctggagccagcagctcccgctgaccatccgggccacccacagcccccaccaccctcctcgtctccctcatcttctgctgtttggcccttgaccccctgaggacaatagggtttcctggtgaccactgggctgtgggtcacacagatctggctggaatcccagttctgcctggccgtgtcacctctgatggggaagcactctgtctcctcatctctatggtcggggagtaacttcccttacgggcttttggggatattaacagaggtcaacctggacagggcatggggcccccggggtgcaccataaagtctttccttctttcttctatcctcaggcgaggggtgagtggctgctgggacgtgctgaggggtccctgaagcagggcaggaagggcagagctagctgcagctgaggcagagtccgagtcccgctctgcatggaggaggaggtgaggggcctggtcagcatgggcatggctgggggcctctgtgaccgccaccactcttgtctttgcctccttgaccccacagggtcatcctcgggccctgggtccagccaaggcctgaggagggtcatgcatccctgtcccacttggtcacagcacaggaggctcccatccgccactgcctgaggcggtgcctgtggcccaagggctcgggttgtgggcctgctgggctggagcctgcatcgggacctggccacctactctcctaggagccttaggtgagtcactagtcctctctgagcctcggtttcctcatctgtgaaatggggagaacaaggtggttgtaaagattcagagggtgtgtaaaacacaagcacatggccgagcacagcccagccctacccctgcatggctcctcccccgggcatggcaggaggtcagggtttccagcctgagcttagcctgccattcagcagtacccaggaaggcacagctaccaggaaaatgacctccccaagcccatggaggcttcctgagcacccagcccagcctgaacctccacccacccaggtggcagtgaggccttcctgcctgtgttcagccacggtgtatcaaggacccctggccagacacaggtacctgggctggggagctggtggtcttattggggactgggaagacagaccccaaacagaggggtaaacaaataagataattaccagcttggcagatgattagagcaaatttgaagtgacagggggagggttactttagattggctggtcggggacacctctgtaagacagtgacattgagtgacaagaaggtgcccaccctggaggacactgggcttcttcacctttaagagggatggtgagcagaagcccaaaagcgtcaggttctgccactttgtaccagatgactaggcccagccagtttgcaaaagggctggcccatcctcacattggcccatcctcacattgccagcaaggaccagaccatgtgaagagggaagagcatcctgtaatgtacaaataggggatcaactttaaattatctccagagtttctttctttaatatgttgtccaaaggtaactatgttaatttttacaaatatttttatgtagttttatatagttttacaaatagttttatgtagttttggtttttatttgtttgtttttgttctacttgagatggggtcttgctctgtcaccgaggctggagtacagtggcacgatctcagttcactgcagcctccacctcccaggctcaagtgatcctcccacctcagcctcctgagtagctgggactacagatgccaagccccactaatttttttcagagacagagttttgccatgttgcctaggctgatctccaactcctggtctcaagtgatctggtcccctcagcctcttaaaggtctgggataacaggtgtgagtcagtgtgcctggcctatgtagcagtttttaaaactacaaaattaaataagaaaggggcagagctcagacacaatgagacttttcagtccagtgttttcagattctctggctttcaactttacaatttcacttcaaaaatttcaacttcaaatttcacttcattgctttcaaaatcttgagccagcttgtcctttggatctggactgtgcctgtctgcactggcagatggacagagctcctgtatagaaatgaagccagttcacccacggcttttttttttttttttttttttttgagaaggagtttcgctcttgttgtccaggctggagcgcaatggcacaatctcgactcactgcaacctccgcctcctgggttcaagctgttctcctgactcagcctcccgagtggctgggattacaggcatgcgccatcacgtccagctgatttttgttttttgttttttttttgtttgtttttttgttttgtatttttgattttttgtgcttagtagagacagagtttcaccatgtaggtcaggctggtctcgaactcctgcttcaggtgatctgcccgcctcagcctcccaaagtgctgggattacaggcgtgagccactgtgcccagctgtttttttgtttgtttgtttgtttgtttaagcaagcagctttttcttttcttttgtgatcgtaaaacctacacccactgtatcagctgcctgttgctgctacaacaaattgccacaaatatagtggcttaaaacagcatacaattttttctttcttttttaagttataacaatatattttaatctcataacaacttcaactgaatacaaaactctttacattttcagctattaatattaaaattatatcattttatatcctgtatctattaacagagatttatgcagatttacattttgttcttcaaattctatagaattttaattttttattttcataggttattggggaacacagtggttacatgagtaagttctttagtggtgatttgtgagattttggtgcacccatcacccgagcagtatacactgcacccaataaaacaacgcacatttcctgtcttacatgtagttctgggggtcagaagtctaaaacgggcctcatggggcaaaaggcaaggtgacggcagggctgttctttctggaagtactaggaaagacatcaaactttgccctttccagtttctcaggggtgtgcttggctcatggccatgttcactgccggcagtggcatcactccgacctctgctgtagagcgatctctgtgactcctccttctctgcctctgaccctcctgtctccctctttcccttgtaagagcctcctgattacattggtcttacctggataatccaagacactctccccatctgaagatccctcatcaaatggcatctgcacagccccttttgccaggtaagtgaccatcttcacaggttccagaaagtaggatgcaggcatcttttgggaccatcatttcacttaccatagtcaccttggggacaatttcagacatacgaagactaagatcattaaattccactatttagcgctcaccttctcagcattttggcctgttgtcttgcagcattctcccatgagtatagatttttttgttttttgggatggagtctcgctcaattgcccaggctggagtgcagtggtgcgatctcggctcactgcaacctccacctcccgggttcaagtgattctcctgccccagcctcccgagtagctaggattacaggcacgtgccaccacgcctggctaattttttgcatttttagtagagacggggtttcgccgtgttggccaggatggtcttgatctcctgacctcgtgatccgcccacctcggcctcccaaagtgctgggattacttacaggcgtgagccacagcgcccagccaagtatagatatttaatgaagtgaaatcatactatctataacaccgtatggatcttttcacttaatattctcttgtcagtaaaaatctttctagataacttagagacagcataacctcccctcacatggatgcactgcagactgtttaaccctttctttattgtcaatgatttaagtggtttcacattgtcatgccacatacaatggaatgggtaatgccagctcacaattattgagcatttattatgcaccaatcattcgacatgtattaactcatctaatcctcatgacagtgctatgatatgcatacagttattacggatacaggtccaggtgagaaatgaagctctcttcagaagatgaacaaacttgcccaagtttgggtaatactacagcaggccttgaacccaggttgcctgactccagaatccatactcttagccactcacatgctcatgttttctcctagcatctctgattatctatcttagggtagaattcggataggcagaatggcagttcatcaggctatatttattgagggcttagtttgtgcattttccatgggctcactgagttaatcctcatgactccaagaagtggtctgttaactggccgaagccacgctggttggctccagtagctagactctgcctggaacctctgtgtggtagccagtcattagcggtggtgagggctacggcctctccctgacaagctcaccttgccagacggtgcccccatgaatgcaaaatgcagtcagatcccgctatcggaaagaggtaacaaagcgcagtcaggtcacgccatcagaaacaggtaacaaagcgcagtcaggtcacgccattggaaacaggtaacaaagcagtcaggtcacaccatcggaaacaggtaacaaagcgcagtcaggtcacaccattggaaacaggtaacaaagcagtcaggtcacaccatcagaaacaggtaacaaagctcagtcaggtcacgccattggaaacaggtaacaaagcagtcaggtcacaccatcagaaacaaacatcagaaacaggtaacaaatcacagttgggtcacaccaccagaaacaggtaacaaagcgtagtcaggtcacaccatcggaaatgggtaacgaagcgcagtcatgtcacaccatcagaaacaggtaacaaagtgcagttgggtcacaccaccagaaacaaccatcagaaacaggtaacaaaacacagtcgggtcacaccatcagaaacaaccatcagaaacaggtaacaaagcgcagtcaggtcacaccatcggaaacaggtaacaaaacacagtcgggtcacaccatcagaaacaaccatcagaaacaggtaacaaagcacagtcaggtcacaccatcggaaacgggtaacgaggcacagttgggtcacgccatcagaaacaaccatcaaaacaggtaacaaagtgcagtcgggtcatgccatcagaaacgggtaacgaagcgcactcgggtcacaccgtcggaaacaggtaacaaagtgggaggtcaaggctgcagtgattatgccactgcaccccagcctgggagacacagcaagaccctgcctcaaaagaatgacaaaaataaaataagttgctctaccactttgcgtggtcacctgcagagtgtgaaagtgtccactcacaatgtggccctggttcttaactgaccatttggagggttgtctgtagccactgaaacccagactccagcttcctccaggctctctgtccggctggacagaaggaggagctggtgctgctgtttagccagccaggggattggaggctcacagcaggggagcgtggggctgtcacccattcctgtttccatggtttgtatgggtaaccgggaggcagcaggcgaccccatggctatgtcatccacagagagaaaccttatcacatacggaagctcttattcatacaacatatgccaaccttgtcaaccaataaatgcctatggagcctttactctggatcaagacatccttccaagtgatccacccgcctcagcctcccaaagtgctgggattacaggcgtgagccgccacacctggctcgccattttcctttagcttgtgatgtgatcataaagtgagtcacatctgccaggcgcagtggctcacgcctgaaatcccagcactttgggaggctgaggtgggtggatcatgaggtcaggagatcaagaccatcctggctaacacggtgaaagcccatctctaccaaaactacaaaaaattagctgggcatggtggcagacacctgtagtcccagctactcgggaggctgaggcaggagaatggcatgaacccgggaagcagagcttgcagtgagccgagatggcgccattgcactcccacctgggcgacagagtgagactccatctcaaaaaaaaaaaaaaaaagtgagtcacatctccctctggatctcagtttccttgtctgtaaaaatggtaaagaaggttttgactaagtgatccctgagcctttgtaactgcgaatttgctaagtttagagattattaggacttctaccagagggacagtaacaggggtggggttaagtgaaacatcaatgtgaagtgcctggcgtagaagatcctcagagtcaagtgaagcttggggagcttcatcactggagtgtgggctggacttggtgacttgcattcagagagaaggatgtggaaataggaaaaatagtaacattaccacagagaaacctggcaggacatcaccttcaccagtcaatgaaggtcagcattcccagtgatgagtcgtgtgaataccaggtacccccagatatgatggggtgagcagggcacctcatctctgtggtcttcttcccccaaacccataactccagtgtaatcatgagaaaacatcagacaaacccaaaccgatgaactttctacaaaatacctgaccaatacccctcaaaactaccaagagcatgaaaaagaaaagtctaagaaactgacgaaaaccagagaagcccatgaagacatagctaaatattaggtggtacggggtcctggatgaaaggcaccgtattagtacgtcctcatgcagctaataaagacatacccgagactaggtaatttataaagaaaacgagtttaattgactcacagttcagcatggctggagaggcctcaggaaacttacaatcatggaggaaggggaggcaaacatgtccttcttcacatggcagcaggaaggagaagtgccgtgcaaaaggagggggaaaaacccttataaaaccatcagagctcatgagaactcactatcatgagaacagcatgagggtagccacccccatgattcaattaccttgcaccgggtccctcccatgacatgtggggattatgggaactacaattcaagacgagatttgggtggggacacagccaaaccatatcaggcacattcgtattataagctgctgacatctaaataaagtctggagtttggttactagtaatttatcaatgtcagttccattgttggcacaaatgtgccaggtaacataaaggttatattaggggaaattgagtgaagggtaaatgggaattccctgtgttatctctgaaacttttcagtgaatctaaaattatcccaaacttaatagtttatttttttttaaagtaaggtctaggccaacaagcacatgaagaaatgttcaacatcattactcactagggaaatgcaagtcaaaactccaagagataccaccttacacccactaggatgtctataatcaaaaagacagacaataacaaatgtttgtgaggacgtggggaaattggaaccctcatacgttgttggagggaatgtaaaatggtacagccactttggaaaacagtttggcagtttcttaaaaagttagacatagaattatccaggaattcctctcttagtatgtaccccagagaaaaggaaatatatgtacaaatataaaatacaaagacttcttttttttttttattttttttatttttttttattttttaaccaatcgcaactctgtacgttggtattattctaagggagcaaagctttgccccaacccccacccccatgtcctggtactcttccactctgagagctttagaaccggggttccaaagtctctgcttagcctaacagtgacgtgcttgtcacaaagccagaggccggtgtactcgggttagagagggcctttgtcgttgggttttattcttattgtattattcgggctccaccgacccaaatattagtcaactgggttgggcgaggtaggacggatgaagcccaccgtctaacaatctggacatctataggagcagatccgccgctcgaaacagctgacccagcgacgactgcggaaccactagcagcgtctgcacagatcgaccccgccatcccgccgtcccgttcggtgaccggagacgcagccgggaacgcgactgatcaggctaccgagccgggccgcagggcgaaagcggtgcggtccgaggcctcagaaagggacacgcagcagcggcagtggcgctgactcagcccggcctccctgcagtcccctcaaatacaaagacttctccgcaaatgtttatagcagctttatttgtaatagccaaaaactgatcacaatccaaatgtccaccaacagatcaaaggagaagcgaattgtgatctgtccatatgaggggcttggtgcctgcagcaacatgggtgaatctccaggtagtggtgacgagttgaaggagccagtcaaaaaagaacgtgctgtgtgattccatttatagaaaactctagaaaatgtggactaatctagagtgagggaaagcagacccgtgattgcgcctggggcaaggagacttgggggtggagggggggccagagggaggggtttcaaagatgataaagacattttgagggtgatggatatgatccctctcttaatagtggcgatggcttcatggatagatacaaatgtcaagacatattgaactgtatactttaaatgcttgcgctttactacgtgccaatcacatcttcataaggctgttttttgtttttttgtttgttttttttttttaaaaaaaaaggcctcgtaatggagatgagtacagcctggcctcagtctccccacctgcaatgtgggggatccccgtgtgccttgcaccacctgagagctccaggcttaggaggagaccgaggtgagccctgtttctagccagaaaccccaaggccctaacccccagggctgggcagctgcagggcccaggctactgcccctccggggatggacggtgcgaggccactccaggggcatgacctgttttgggcaggcggtggctgtggggagaagagtggggaggtccctttcttttttcttcctgaataaaaaaatgcatgatgcta

SEQ ID NO: 190634 - DNA, 591 bp, Homo sapiens
  Payload ID: 17657
  Gene Name: tetratricopeptide repeat domain 7B
  ENST ID: ENST00000555239
  CDS Start-End: 1-317
gtcctcaagaaaatacggaagaagccctgttgttattgctgattagtgaatcaatggccaaccgggacgctgtgctgagcaggatacctgaacacaagagtgaccgcctcatcagtctgcagagtgcatctgtggtctatgacttactcaccattgctcttggaagaagaggccagtatgagatgctgtcagagggcccacagcctgtcacccacagatcaccaagcagctttctacctggctctgcagcttgccatctccagacagatcccagaggctctggggtatgtccgccaagctcttcagcttcaaggtgacgatgccaactccctgcacctccttgccctcctgctgtcagcacagaagcattaccatgacgctctgaacatcatcgacatggccctgagtgaatacccagaaaatttcatactactgttttccaaagtgaagttgcagtcactctgccgaggcccggacgaggcactgctgacttgtaagcacatgctgcagatatggaaatcctgctacaacctcaccaaccccagtgattctggacgtgggagcagcctcttagatagaaccattgctgac

SEQ ID NO: 190635 - DNA, 630 bp, Homo sapiens
  Payload ID: 17657
  Gene Name: tetratricopeptide repeat domain 7B
  ENST ID: ENST00000553948
  CDS Start-End: 487-630
ggggccccgccgcgcccgccgccgccgcccgcctccccgccccttccccagccggcgctcccgttacgccgcggagccgggagccggagcccgagcccgcggcggcggcgggaggcggcgagggggcgccgcggcggcggcggtggggcctgcggggcgggcggccgggcccggccaggccgcgatggcgaccaagaaggcaggctcgcggctggagacggagatcgagcgctgccgctccgagtgccagtgggagcggatccctgagctcgtcaagcagctgtcggccaagctcatcgccaacgatgacatggcagagcttctcctcggggagtcgaagctggagcagtacctgaaggaacaccccctgaggcagggggccagtccccgaggccccaagccccagctgactgaggtccgcaagcatctgaccgccgccctggaccgagggaaccttaagaattcctacaagaatccaatctgatcatggccaagttgaattatgtggaaggtgattataaagaagctctgaacatttacgcccgggtgggcctggacgatctgccactgacagctgtcccgccctacaggctgcgggtgatcgcagaagcctacgctaccaaaggactt

SEQ ID NO: 190636 - DNA, 708 bp, Homo sapiens
  Payload ID: 17657
  Gene Name: tetratricopeptide repeat domain 7B
  ENST ID: ENST00000557766
  CDS Start-End: 95-708
caagccccagctgactgaggtccgcaagcatctgaccgccgccctggaccgagggaaccttaagtcagaattcctacaagaatccaatctgatcatggccaagttgaattatgtggaaggtgattataaagaagctctgaacatttacgcccgggtgggcctggacgatctgccactgacagctgtcccgccctacaggctgcgggtgatcgcagaagcctacgctaccaaaggactttgtttggagaagctgcctatttcttcttctaccagtaatctccatgtggaccgggaacaggatgtcatcacctgttatgagaaagcaggggacatcgcactcctgtatctccaagagatagaaagggtaatactttctaatattcaaaacagaagccctaagcctggccctgctccccacgatcaagaactaggttttttcctagaaacaggacttcagagagcccatgtcctctatttcaaaaatggagggacagatggcaatattaaagagccgagaatgtggttcagagtcatagaacaggacgaaaccaggaacttgacaagaggagtcggaagatttagagagcttctcagagcagttgaaacaagaacgactcaaaacctgcgaatgacaatagccaggcagctggcagagatcttgttgcggggtatgtgtgagcagagctactggaaccctctggaggatcc

SEQ ID NO: 190637 - DNA, 1719 bp, Homo sapiens
  Payload ID: 17657
  Gene Name: tetratricopeptide repeat domain 7B
  ENST ID: ENST00000553972
  CDS Start-End: 1-993
atcccagaggctctggggtatgtccgccaagctcttcagcttcaaggtgacgatgccaactccctgcacctccttgccctcctgctgtcagcacagaagcattaccatgacgctctgaacatcatcgacatggccctgagtgaatacccagaaaatttcatactactgttttccaaagtgaagttgcagtcactctgccgaggcccggacgaggcactgctgacttgtaagcacatgctgcagatatggaaatcctgctacaacctcaccaaccccagtgattctggacgtgggagcagcctcttagatagaaccattgctgacagacgacagcttaatacaattactttgccagacttcagcgatcccgagacaggcaactctccagaagcatactttcatggttttccttcccttttttcagttagctccgtccatgccacatcggtagcagcctcaagagtggagcaggcactgtcggaagtggcttcgtctctgcagagcagtgcccctaagcagggcccgctgcacccctggatgacgctggcacagatctggctccatgcagctgaagtctatatcggcatcgggaagcctgcagaagccacagcctgtacccaagaagctgccaacctcttcccaatgtcccacaatgtcctctacatgcgcggccagattgctgagctccggggaagcatggacgaggcgcggcggtggtatgaagaggccttagccatcagccccacccacgtgaagagcatgcagcgactggccctgatccttcaccagctaggccgctacagtctggcggagaagatcctccgggacgcggtgcaggtgaactcgacagcccacgaggtctggaacgggctgggcgaggtcctccaagctcagggcaacgatgcggcggctacggagtgcttcctgacagccttggagctggaggccagcagccccgccgtgcccttcaccatcatcccccgcgtgctctgagcaggcgcctgccagcctcacctgccgctcaggcctcagaggccctgccgggcaccagggcttgtgccatcgccccaaggggatgaatctgccacactgaggccagggacgagtgttcagtgggccacagtgaaccaaccaaaccaaccccgaatcatcgctctcgccatgtgcgtttctcttgttttttttgccagcccaatggtagtttctgaacctattgacattgttcaaaatggatcatgtgccatattttgttagttgacatctgagttttcagtaaaatgattatggaattaatcagcaaatgtagaagaatatattcaaagttaaaattcagtggcagcacagattatttttatcagagctgtaaagaaaacaactgtccttttctccccaccacccctcctgccccactttggcccagaaaccaaatgtgaacttcctgtctcccacctcagcactagtccatgccaggacaccagctgacaatttcttggttttactgtcaataattgtaccatgtgatcaattactgtcctcacttagaacaaagcctgagtccgagaatatttatattttaccaatatatgcctgttacaagagaaggaaatatgagttatttaagtttaacttttttatgtgaattcagagtttatttatcgagggaaatatgtacaaagaagcttcaaatggaatatttaccgacattccttatacatgaca

SEQ ID NO: 190638 - DNA, 2730 bp, Homo sapiens
  Payload ID: 17657
  Gene Name: tetratricopeptide repeat domain 7B
  ENST ID: ENST00000555005
  CDS Start-End: 1-1254
acaatagccaggcagctggcagagatcttgttgcggggtatgtgtgagcagagctactggaaccctctggaggatccaccgtgccagtcacctctggacgatcctctccgcaaaggagcaaacacaaaaacctacactctcactcggagagcccgtgtctactcaggagagaacattttttgtcctcaagaaaatacggaagaagccctgttgttattgctgattagtgaatcaatggccaaccgggacgctgtgctgagcaggatacctgaacacaagagtgaccgcctcatcagtctgcagagtgcatctgtggtctatgacttactcaccattgctcttggaagaagaggccagtatgagatgctgtcagagtgcctagaaagagccatgaagtttgcctttgaggaattccacctgtggtaccagtttgctctgtccctgatggctgctggaaaatctgcccgtgccgtgaaggtgctgaaagagtgtatccgcctgaagccagacgatgccaccatccctctcctcgctgccaagctctgcatgggctccctgcactggttggaagaggctgaaaagtttgccaaaactgtcgttgatgtgggagagaaaacgtcagagttcaaggccaaaggctacttagctctggggctcacgtacagtctgcaggccactgacgcttctttgcgagggatgcaggaggtcctacagagaaaggcgcttcttgcatttcagagggcccacagcctgtcacccacagatcaccaagcagctttctacctggctctgcagcttgccatctccagacagatcccagaggctctggggtatgtccgccaagctcttcagcttcaaggtgacgatgccaactccctgcacctccttgccctcctgctgtcagcacagaagcattaccatgacgctctgaacatcatcgacatggccctgagtgaatacccagaaaatttcatactactgttttccaaagtgaagttgcagtcactctgccgaggcccggacgaggcactgctgacttgtaagcacatgctgcagatatggaaatcctgctacaacctcaccaaccccagtgattctggacgtgggagcagcctcttagatagaaccattgctgacagacgacagcttaatacaattactttgccagacttcagcgatcccgagacaggaaatcagtgttcatggattgcatttggggaaatgctggtggatatggggatccagtgcatttgaatgacctgagcctttagcttatggcaaatactgcccctcacccttaagagttgattccaccctctgaaatccagctcaacctagatgtgcctttatttctggcctaaaagcagtccataatagaaaagaggctccgtccatgccacatcggtagcagcctcaagagtggagcaggcactgtcggaagtggcttcgtctctgcagagcagtgcccctaagcagggcccgctgcacccctggatgacgctggcacagatctggctccatgcagctgaagtctatatcggcatcgggaagcctgcagaagccacagcctgtacccaagaagctgccaacctcttcccaatgtcccacaatgtcctctacatgcgcggccagattgctgagctccggggaagcatggacgaggcgcggcggtggtatgaagaggccttagccatcagccccacccacgtgaagagcatgcagcgactggccctgatccttcaccagctaggccgctacagtctggcggagaagatcctccgggacgcggtgcaggtgaactcgacagcccacgaggtctggaacgggctgggcgaggtcctccaagctcagggcaacgatgcggcggctacggagtgcttcctgacagccttggagctggaggccagcagccccgccgtgcccttcaccatcatcccccgcgtgctctgagcaggcgcctgccagcctcacctgccgctcaggcctcagaggccctgccgggcaccagggcttgtgccatcgccccaaggggatgaatctgccacactgaggccagggacgagtgttcagtgggccacagtgaaccaaccaaaccaaccccgaatcatcgctctcgccatgtgcgtttctcttgttttttttgccagcccaatggtagtttctgaacctattgacattgttcaaaatggatcatgtgccatattttgttagttgacatctgagttttcagtaaaatgattatggaattaatcagcaaatgtagaagaatatattcaaagttaaaattcagtggcagcacagattatttttatcagagctgtaaagaaaacaactgtccttttctccccaccacccctcctgccccactttggcccagaaaccaaatgtgaacttcctgtctcccacctcagcactagtccatgccaggacaccagctgacaatttcttggttttactgtcaataattgtaccatgtgatcaattactgtcctcacttagaacaaagcctgagtccgagaatatttatattttaccaatatatgcctgttacaagagaaggaaatatgagttatttaagtttaacttttttatgtgaattcagagtttatttatcgagggaaatatgtacaaagaagcttcaaatggaatatttaccgacattccttatacatgacagacacttggctacatgggaagatgatgttaataataaaatgatttttaaatgga

SEQ ID NO: 190639 - DNA, 525 bp, Homo sapiens
  Payload ID: 17657
  Gene Name: tetratricopeptide repeat domain 7B
  ENST ID: ENST00000554462
  CDS Start-End: 1-525
tttaacagcaaggagttttaaagccaaccgggacgctgtgctgagcaggatacctgaacacaagagtgaccgcctcatcagtctgcagagtgcatctgtggtctatgacttactcaccattgctcttggaagaagaggccagtatgagatgctgtcagagtgcctagaaagagccatgaagtttgcctttgaggaattccacctgtggtaccagtttgctctgtccctgatggctgctggaaaatctgcccgtgccgtgaaggtgctgaaagagtgtatccgcctgaagccagacgatgccaccatccctctcctcgctgccaagctctgcatgggctccctgcactggttggaagaggctgaaaagtttgccaaaactgtcgttgatgtgggagagaaaacgtcagagttcaaggccaaaggctacttagctctggggctcacgtacagtctgcaggccactgacgcttctttgcgagggatgcaggaggtcctacagagaaaggcgcttcttgcatttcagag

SEQ ID NO: 190640 - DNA, 864 bp, Homo sapiens
  Payload ID: 17657
  Gene Name: tetratricopeptide repeat domain 7B
  ENST ID: ENST00000557292
  CDS Start-End: 1-814
aattactttgccagacttcagcgatcccgagacagtgtcagattcctcctcctcctcctctcctctttcaagaaccgaatctcctctccacctgtttgtgtcttctcatcttcattctcccaaacccgatacctttgtgtggccccctgcagctcattcattcagtgacgcaggtccccgccgggaaccctctctctgcaactctccagaagcatactttcatggttttccttcccttttttcagttagctccgtccatgccacatcggtagcagcctcaagagtggagcaggcactgtcggaagtggcttcgtctctgcagagcagtgcccctaagcagggcccgctgcacccctggatgacgctggcacagatctggctccatgcagctgaagtctatatcggcatcgggaagcctgcagaagccacagcctgtacccaagaagctgccaacctcttcccaatgtcccacaatgtcctctacatgcgcggccagattgctgagctccggggaagcatggacgaggcgcggcggtggtatgaagaggccttagccatcagccccacccacgtgaagagcatgcagcgactggccctgatccttcaccagctaggccgctacagtctggcggagaagatcctccgggacgcggtgcaggtgaactcgacagcccacgaggtctggaacgggctgggcgaggtcctccaagctcagggcaacgatgcggcggctacggagtgcttcctgacagccttggagctggaggccagcagccccgccgtgcccttcaccatcatcccccgcgtgctctgagcaggcgcctgccagcctcacctgccgctcaggcctcagaggccctgccg

SEQ ID NO: 190641 - DNA, 738 bp, Homo sapiens
  Payload ID: 17657
  Gene Name: tetratricopeptide repeat domain 7B
  ENST ID: ENST00000555894
  CDS Start-End: 1-642
ttgcagtcactctgccgaggcccggacgaggcactgctgacttgtaagcacatgctgcagatatggaaatcctgctacaacctcaccaaccccagtgattctggacgtgggagcagcctcttagatagaaccattgctgacagacgacagcttaatacaattactttgccagacttcagcgatcccgagacaggctccgtccatgccacatcggtagcagcctcaagagtggagcaggcactgtcggaagtggcttcgtctctgcagagcagtgcccctaagcagggcccgctgcacccctggatgacgctggcacagatctggctccatgcaggccctgatccttcaccagctaggccgctacagtctggcggagaagatcctccgggacgcggtgcaggtgaactcgacagcccacgaggtctggaacgggctgggcgaggtcctccaagctcagggcaacgatgcggcggctacggagtgcttcctgacagccttggagctggaggccagcagccccgccgtgcccttcaccatcatcccccgcgtgctctgagcaggcgcctgccagcctcacctgccgctcaggcctcagaggccctgccgggcaccagggcttgtgccatcgccccaaggggatgaatctgccacactgaggccagggacgagtgttcagtgggccacagtgaaccaaccaaaccaaccccgaatcatcgctctcgccatgtgcgtttctct

SEQ ID NO: 190642 - DNA, 2058 bp, Homo sapiens
  Payload ID: 17658
  Gene Name: tetratricopeptide repeat domain 8
  ENST ID: ENST00000346301
  CDS Start-End: 53-1480
acgcccacctctctcctggagcgctgggccttcgctggccgcaccggcagccatgagctcggagatggagccgctgctcctggcctggagctattttaggcgcaggaagttccagctctgcgccgatctatgcacgcagatgctggagaagtccccttatgaccaggcagcttggatcttaaaagcaagagcgctaacagaaatggtatacatagatgaaattgatgtagatcaggaaggaattgcagaaatgatgctggatgaaaatgctatagctcaagttccacgccctggaacgtctttgaaactccctggaactaatcagacaggagggcctagccaggccgttaggccaatcacacaagctggaagacccattacaggtttcctcaggcccagcacgcagagtggaaggccaggcactatggaacaggctatcagaacacccagaaccgcctacacagcccgccctatcaccagctcctccggaagatttgtcaggctgggaacggctttgtttgagtatatctttcatcatgaaaatgatgttaagactgctttggatctggctgccctctccacagaacattctcagtacaaggactggtggtggaaagtacagattggaaaatgttactacaggttgggaatgtatcgtgaagcagaaaaacagtttaaatcagccctgaagcagcaggaaatggtagatacatttctgtacttggcaaaagtttatgtctcattggatcaacctgtgactgctttaaatcttttcaaacaaggcttagataagtttccaggagaagtaaccctgctctgtggaattgcaagaatctatgaggaaatgaacaatatgtcatcagcagcagaatattacaaagaagttttgaaacaagacaatactcatgtggaagccatcgcatgcattggaagcaaccacttctattctgatcagccagaaatagctctccggttttacaggcggctgctgcagatgggcatttataacggccagctttttaacaatctggggctgtgttgcttctatgcccagcagtatgatatgactctgacctcatttgaacgtgccctttctttggctgaaaatgaagaagaggcagctgatgtctggtacaacttgggacatgtagctgtgggaataggagatacaaatttggcccatcagtgcttcaggctggctctggtcaacaacaacaaccacgccgaggcctacaacaacctggctgtgctggagatgcggaagggccacgttgaacaggcaagggcactattacaaactgcatcatcattagcaccccatatgtatgaaccgcattttaattttgcaacaatctctgataagattggagatctgcagagaagctatgttgctgcgcagaagtctgaagcagcatttccagaccatgtggacacacaacatttaattaaacaattaaggcagcattttgctatgctctgattgttccttagaccacatatgttcttatgaagcagcattatgcaaggggaaaaaagcactatgtctgtgtatgtatgtatatagtgtaatacgtatattttaacaaacctgtccttgatattagttaaggtgacacataagggtgacacagaatgtgtaatgcaaatttcatagtaatagtaactttataaaataatattataaaatacaggatttaaacctttctaaatagatcctgaaactgtctctcacattatatagtagatgtttgtttataatgtttacaaaacattttggtgaatttcctcaatgttttataaatgtacattttttaagtccttaagctgactcttagccatcatgtagcttaaggagtctgaaatctgccattaaaactgcacctttaagccaggtgtggtagcatgtgcctatagtcccagctacttgggaggtggaggtgggaggattataaatagagactttccttaagactttaaaaatgtatttaaaactattttttattaaatactttgtgatttcctattaagctttaaaataaatcattgtgtaaaacacca

SEQ ID NO: 190643 - DNA, 2226 bp, Homo sapiens
  Payload ID: 17658
  Gene Name: tetratricopeptide repeat domain 8
  ENST ID: ENST00000338104
  CDS Start-End: 53-1648
acgcccacctctctcctggagcgctgggccttcgctggccgcaccggcagccatgagctcggagatggagccgctgctcctggcctggagctattttaggcgcaggaagttccagctctgcgccgatctatgcacgcagatgctggagaagtccccttatgaccaggcagcttggatcttaaaagcaagagcgctaacagaaatggtatacatagatgaaattgatgtagatcaggaaggaattgcagaaatgatgctggatgaaaatgctatagctcaagttccacgccctggaacgtctttgaaactccctggaactaatcagacaggagggcctagccaggccgttaggccaatcacacaagctggaagacccattacaggtttcctcaggcccagcacgcagagtggaaggccaggcactatggaacaggctatcagaacacccagaaccgcctacacagcccgccctatcaccagctcctccggaagatttgtcaggctgggaacggcttccatgcttacaagtcctgatggaccatttataaatttatctaggctgaatttaacaaagtattcccagaaacctaagttggcaaaggctttgtttgagtatatctttcatcatgaaaatgatgttaagactattcatcttgaagatgtagttctacatcttggaatttacccattcttattgaggaataaaaatcacattgaaaaaaatgctttggatctggctgccctctccacagaacattctcagtacaaggactggtggtggaaagtacagattggaaaatgttactacaggttgggaatgtatcgtgaagcagaaaaacagtttaaatcagccctgaagcagcaggaaatggtagatacatttctgtacttggcaaaagtttatgtctcattggatcaacctgtgactgctttaaatcttttcaaacaaggcttagataagtttccaggagaagtaaccctgctctgtggaattgcaagaatctatgaggaaatgaacaatatgtcatcagcagcagaatattacaaagaagttttgaaacaagacaatactcatgtggaagccatcgcatgcattggaagcaaccacttctattctgatcagccagaaatagctctccggttttacaggcggctgctgcagatgggcatttataacggccagctttttaacaatctggggctgtgttgcttctatgcccagcagtatgatatgactctgacctcatttgaacgtgccctttctttggctgaaaatgaagaagaggcagctgatgtctggtacaacttgggacatgtagctgtgggaataggagatacaaatttggcccatcagtgcttcaggctggctctggtcaacaacaacaaccacgccgaggcctacaacaacctggctgtgctggagatgcggaagggccacgttgaacaggcaagggcactattacaaactgcatcatcattagcaccccatatgtatgaaccgcattttaattttgcaacaatctctgataagattggagatctgcagagaagctatgttgctgcgcagaagtctgaagcagcatttccagaccatgtggacacacaacatttaattaaacaattaaggcagcattttgctatgctctgattgttccttagaccacatatgttcttatgaagcagcattatgcaaggggaaaaaagcactatgtctgtgtatgtatgtatatagtgtaatacgtatattttaacaaacctgtccttgatattagttaaggtgacacataagggtgacacagaatgtgtaatgcaaatttcatagtaatagtaactttataaaataatattataaaatacaggatttaaacctttctaaatagatcctgaaactgtctctcacattatatagtagatgtttgtttataatgtttacaaaacattttggtgaatttcctcaatgttttataaatgtacattttttaagtccttaagctgactcttagccatcatgtagcttaaggagtctgaaatctgccattaaaactgcacctttaagccaggtgtggtagcatgtgcctatagtcccagctacttgggaggtggaggtgggaggattataaatagagactttccttaagactttaaaaatgtatttaaaactattttttattaaatactttgtgatttcctattaagctttaaaataaatcattgtgtaaaacacca

SEQ ID NO: 190644 - DNA, 2329 bp, Homo sapiens
  Payload ID: 17658
  Gene Name: tetratricopeptide repeat domain 8
  Uniprot ID: Q8TAM2
  ENST ID: ENST00000345383
  CDS Start-End: 197-1744
aggacctcgagaaacagcggacaatttcaggatttaggactttaggtcttgatgggtggatggcgcgctgcgggcacctctcggacaaggccccagccgtcgcgggttgccgggcagagtcggacgccgccagctcttcactccacgcccacctctctcctggagcgctgggccttcgctggccgcaccggcagccatgagctcggagatggagccgctgctcctggcctggagctattttaggcgcaggaagttccagctctgcgccgatctatgcacgcagatgctggagaagtccccttatgaccaggaaccagatcctgaattgccagtgcatcaggcagcttggatcttaaaagcaagagcgctaacagaaatggtatacatagatgaaattgatgtagatcaggaaggaattgcagaaatgatgctggatgaaaatgctatagctcaagttccacgccctggaacgtctttgaaactccctggaactaatcagacaggagggcctagccaggccgttaggccaatcacacaagctggaagacccattacaggtttcctcaggcccagcacgcagagtggaaggccaggcactatggaacaggctatcagaacacccagaaccgcctacacagcccgccctatcaccagctcctccggaagatttgtcaggctgggaacggcttccatgcttacaagtcctgatggaccatttataaatttatctaggctgaatttaacaaagtattcccagaaacctaagttggcaaaggctttgtttgagtatatctttcatcatgaaaatgatgttaagactgctttggatctggctgccctctccacagaacattctcagtacaaggactggtggtggaaagtacagattggaaaatgttactacaggttgggaatgtatcgtgaagcagaaaaacagtttaaatcagccctgaagcagcaggaaatggtagatacatttctgtacttggcaaaagtttatgtctcattggatcaacctgtgactgctttaaatcttttcaaacaaggcttagataagtttccaggagaagtaaccctgctctgtggaattgcaagaatctatgaggaaatgaacaatatgtcatcagcagcagaatattacaaagaagttttgaaacaagacaatactcatgtggaagccatcgcatgcattggaagcaaccacttctattctgatcagccagaaatagctctccggttttacaggcggctgctgcagatgggcatttataacggccagctttttaacaatctggggctgtgttgcttctatgcccagcagtatgatatgactctgacctcatttgaacgtgccctttctttggctgaaaatgaagaagaggcagctgatgtctggtacaacttgggacatgtagctgtgggaataggagatacaaatttggcccatcagtgcttcaggctggctctggtcaacaacaacaaccacgccgaggcctacaacaacctggctgtgctggagatgcggaagggccacgttgaacaggcaagggcactattacaaactgcatcatcattagcaccccatatgtatgaaccgcattttaattttgcaacaatctctgataagattggagatctgcagagaagctatgttgctgcgcagaagtctgaagcagcatttccagaccatgtggacacacaacatttaattaaacaattaaggcagcattttgctatgctctgattgttccttagaccacatatgttcttatgaagcagcattatgcaaggggaaaaaagcactatgtctgtgtatgtatgtatatagtgtaatacgtatattttaacaaacctgtccttgatattagttaaggtgacacataagggtgacacagaatgtgtaatgcaaatttcatagtaatagtaactttataaaataatattataaaatacaggatttaaacctttctaaatagatcctgaaactgtctctcacattatatagtagatgtttgtttataatgtttacaaaacattttggtgaatttcctcaatgttttataaatgtacattttttaagtccttaagctgactcttagccatcatgtagcttaaggagtctgaaatctgccattaaaactgcacctttaagccaggtgtggtagcatgtgcctatagtcccagctacttgggaggtggaggtgggaggattataaatagagactttccttaagactttaaaaatgtatttaaaactattttttattaaatactttgtgatttcctattaagctttaaaataaatcattgtgtaaaacaccatcatttc

SEQ ID NO: 190645 - DNA, 1342 bp, Homo sapiens
  Payload ID: 17658
  Gene Name: tetratricopeptide repeat domain 8
  Uniprot ID: Q8TAM2
  ENST ID: ENST00000354441
  CDS Start-End: 49-801
ccacctctctcctggagcgctgggccttcgctggccgcaccggcagccatgagctcggagatggagccgctgctcctggcctggagctattttaggcgcaggaagttccagctctgcgccgatctatgcacgcagatgctggagaagtccccttatgaccaggaaatgaacaatatgtcatcagcagcagaatattacaaagaagttttgaaacaagacaatactcatgtggaagccatcgcatgcattggaagcaaccacttctattctgatcagccagaaatagctctccggttttacaggcggctgctgcagatgggcatttataacggccagctttttaacaatctggggctgtgttgcttctatgcccagcagtatgatatgactctgacctcatttgaacgtgccctttctttggctgaaaatgaagaagaggcagctgatgtctggtacaacttgggacatgtagctgtgggaataggagatacaaatttggcccatcagtgcttcaggctggctctggtcaacaacaacaaccacgccgaggcctacaacaacctggctgtgctggagatgcggaagggccacgttgaacaggcaagggcactattacaaactgcatcatcattagcaccccatatgtatgaaccgcattttaattttgcaacaatctctgataagattggagatctgcagagaagctatgttgctgcgcagaagtctgaagcagcatttccagaccatgtggacacacaacatttaattaaacaattaaggcagcattttgctatgctctgattgttccttagaccacatatgttcttatgaagcagcattatgcaaggggaaaaaagcactatgtctgtgtatgtatgtatatagtgtaatacgtatattttaacaaacctgtccttgatattagttaaggtgacacataagggtgacacagaatgtgtaatgcaaatttcatagtaatagtaactttataaaataatattataaaatacaggatttaaacctttctaaatagatcctgaaactgtctctcacattatatagtagatgtttgtttataatgtttacaaaacattttggtgaatttcctcaatgttttataaatgtacattttttaagtccttaagctgactcttagccatcatgtagcttaaggagtctgaaatctgccattaaaactgcacctttaagccaggtgtggtagcatgtgcctatagtcccagctacttgggaggtggaggtgggaggattataaatagagactttccttaagactttaaaaatgtatttaaaactattttttattaaatactttgtgatttcc

SEQ ID NO: 190646 - DNA, 2297 bp, Homo sapiens
  Payload ID: 17658
  Gene Name: tetratricopeptide repeat domain 8
  ENST ID: ENST00000358622
  CDS Start-End: 759-1712
aggacctcgagaaacagcggacaatttcaggatttaggactttaggtcttgatgggtggatggcgcgctgcgggcacctctcggacaaggccccagccgtcgcgggttgccgggcagagtcggacgccgccagctcttcactccacgcccacctctctcctggagcgctgggccttcgctggccgcaccggcagccatgagctcggagatggagccgctgctcctggcctggagctattttaggcgcaggaagttccagctctgcgccgatctatgcacgcagatgctggagaagtccccttatgaccaggcagcttggatcttaaaagcaagagcgctaacagaaatggtatacatagatgaaattgatgtagatcaggaaggaattgcagaaatgatgctggatgaaaatgctatagctcaagttccacgccctggaacgtctttgaaactccctggaactaatcagacaggagggcctagccaggccgttaggccaatcacacaagctggaagacccattacaggtttcctcaggcccagcacgcagagtggaaggccaggcactatggaacaggctatcagaacacccagaaccgcctacacagcccgccctatcaccagctcctccggaagatttgtcaggctgggaacggcttccatgcttacaagtcctgatggaccatttataaatttatctaggctgaatttaacaaagtattcccagaaacctaagttggcaaaggtatgtacttaaaatgattttgagttatgaagtaatattacacgctttggatctggctgccctctccacagaacattctcagtacaaggactggtggtggaaagtacagattggaaaatgttactacaggttgggaatgtatcgtgaagcagaaaaacagtttaaatcagccctgaagcagcaggaaatggtagatacatttctgtacttggcaaaagtttatgtctcattggatcaacctgtgactgctttaaatcttttcaaacaaggcttagataagtttccaggagaagtaaccctgctctgtggaattgcaagaatctatgaggaaatgaacaatatgtcatcagcagcagaatattacaaagaagttttgaaacaagacaatactcatgtggaagccatcgcatgcattggaagcaaccacttctattctgatcagccagaaatagctctccggttttacaggcggctgctgcagatgggcatttataacggccagctttttaacaatctggggctgtgttgcttctatgcccagcagtatgatatgactctgacctcatttgaacgtgccctttctttggctgaaaatgaagaagaggcagctgatgtctggtacaacttgggacatgtagctgtgggaataggagatacaaatttggcccatcagtgcttcaggctggctctggtcaacaacaacaaccacgccgaggcctacaacaacctggctgtgctggagatgcggaagggccacgttgaacaggcaagggcactattacaaactgcatcatcattagcaccccatatgtatgaaccgcattttaattttgcaacaatctctgataagattggagatctgcagagaagctatgttgctgcgcagaagtctgaagcagcatttccagaccatgtggacacacaacatttaattaaacaattaaggcagcattttgctatgctctgattgttccttagaccacatatgttcttatgaagcagcattatgcaaggggaaaaaagcactatgtctgtgtatgtatgtatatagtgtaatacgtatattttaacaaacctgtccttgatattagttaaggtgacacataagggtgacacagaatgtgtaatgcaaatttcatagtaatagtaactttataaaataatattataaaatacaggatttaaacctttctaaatagatcctgaaactgtctctcacattatatagtagatgtttgtttataatgtttacaaaacattttggtgaatttcctcaatgttttataaatgtacattttttaagtccttaagctgactcttagccatcatgtagcttaaggagtctgaaatctgccattaaaactgcacctttaagccaggtgtggtagcatgtgcctatagtcccagctacttgggaggtggaggtgggaggattataaatagagactttccttaagactttaaaaatgtatttaaaactattttttattaaatactttgtgatttcctattaagctttaaaataaatcattgtgtaaaacaccatcatttc

SEQ ID NO: 190647 - DNA, 2171 bp, Homo sapiens
  Payload ID: 17658
  Gene Name: tetratricopeptide repeat domain 8
  Uniprot ID: Q8TAM2
  ENST ID: ENST00000380656
  CDS Start-End: 47-1594
acctctctcctggagcgctgggccttcgctggccgcaccggcagccatgagctcggagatggagccgctgctcctggcctggagctattttaggcgcaggaagttccagctctgcgccgatctatgcacgcagatgctggagaagtccccttatgaccaggaaccagatcctgaattgccagtgcatcaggcagcttggatcttaaaagcaagagcgctaacagaaatggtatacatagatgaaattgatgtagatcaggaaggaattgcagaaatgatgctggatgaaaatgctatagctcaagttccacgccctggaacgtctttgaaactccctggaactaatcagacaggagggcctagccaggccgttaggccaatcacacaagctggaagacccattacaggtttcctcaggcccagcacgcagagtggaaggccaggcactatggaacaggctatcagaacacccagaaccgcctacacagcccgccctatcaccagctcctccggaagatttgtcaggctgggaacggcttccatgcttacaagtcctgatggaccatttataaatttatctaggctgaatttaacaaagtattcccagaaacctaagttggcaaaggctttgtttgagtatatctttcatcatgaaaatgatgttaagactgctttggatctggctgccctctccacagaacattctcagtacaaggactggtggtggaaagtacagattggaaaatgttactacaggttgggaatgtatcgtgaagcagaaaaacagtttaaatcagccctgaagcagcaggaaatggtagatacatttctgtacttggcaaaagtttatgtctcattggatcaacctgtgactgctttaaatcttttcaaacaaggcttagataagtttccaggagaagtaaccctgctctgtggaattgcaagaatctatgaggaaatgaacaatatgtcatcagcagcagaatattacaaagaagttttgaaacaagacaatactcatgtggaagccatcgcatgcattggaagcaaccacttctattctgatcagccagaaatagctctccggttttacaggcggctgctgcagatgggcatttataacggccagctttttaacaatctggggctgtgttgcttctatgcccagcagtatgatatgactctgacctcatttgaacgtgccctttctttggctgaaaatgaagaagaggcagctgatgtctggtacaacttgggacatgtagctgtgggaataggagatacaaatttggcccatcagtgcttcaggctggctctggtcaacaacaacaaccacgccgaggcctacaacaacctggctgtgctggagatgcggaagggccacgttgaacaggcaagggcactattacaaactgcatcatcattagcaccccatatgtatgaaccgcattttaattttgcaacaatctctgataagattggagatctgcagagaagctatgttgctgcgcagaagtctgaagcagcatttccagaccatgtggacacacaacatttaattaaacaattaaggcagcattttgctatgctctgattgttccttagaccacatatgttcttatgaagcagcattatgcaaggggaaaaaagcactatgtctgtgtatgtatgtatatagtgtaatacgtatattttaacaaacctgtccttgatattagttaaggtgacacataagggtgacacagaatgtgtaatgcaaatttcatagtaatagtaactttataaaataatattataaaatacaggatttaaacctttctaaatagatcctgaaactgtctctcacattatatagtagatgtttgtttataatgtttacaaaacattttggtgaatttcctcaatgttttataaatgtacattttttaagtccttaagctgactcttagccatcatgtagcttaaggagtctgaaatctgccattaaaactgcacctttaagccaggtgtggtagcatgtgcctatagtcccagctacttgggaggtggaggtgggaggattataaatagagactttccttaagactttaaaaatgtatttaaaactattttttattaaatactttgtgatttcctattaagctttaaaataaatcattgtgtaaaacacc

SEQ ID NO: 190648 - DNA, 2209 bp, Homo sapiens
  Payload ID: 17658
  Gene Name: tetratricopeptide repeat domain 8
  ENST ID: ENST00000536576
  CDS Start-End: 197-1624
aggacctcgagaaacagcggacaatttcaggatttaggactttaggtcttgatgggtggatggcgcgctgcgggcacctctcggacaaggccccagccgtcgcgggttgccgggcagagtcggacgccgccagctcttcactccacgcccacctctctcctggagcgctgggccttcgctggccgcaccggcagccatgagctcggagatggagccgctgctcctggcctggagctattttaggcgcaggaagttccagctctgcgccgatctatgcacgcagatgctggagaagtccccttatgaccaggcagcttggatcttaaaagcaagagcgctaacagaaatggtatacatagatgaaattgatgtagatcaggaaggaattgcagaaatgatgctggatgaaaatgctatagctcaagttccacgccctggaacgtctttgaaactccctggaactaatcagacaggagggcctagccaggccgttaggccaatcacacaagctggaagacccattacaggtttcctcaggcccagcacgcagagtggaaggccaggcactatggaacaggctatcagaacacccagaaccgcctacacagcccgccctatcaccagctcctccggaagatttgtcaggctgggaacggctttgtttgagtatatctttcatcatgaaaatgatgttaagactgctttggatctggctgccctctccacagaacattctcagtacaaggactggtggtggaaagtacagattggaaaatgttactacaggttgggaatgtatcgtgaagcagaaaaacagtttaaatcagccctgaagcagcaggaaatggtagatacatttctgtacttggcaaaagtttatgtctcattggatcaacctgtgactgctttaaatcttttcaaacaaggcttagataagtttccaggagaagtaaccctgctctgtggaattgcaagaatctatgaggaaatgaacaatatgtcatcagcagcagaatattacaaagaagttttgaaacaagacaatactcatgtggaagccatcgcatgcattggaagcaaccacttctattctgatcagccagaaatagctctccggttttacaggcggctgctgcagatgggcatttataacggccagctttttaacaatctggggctgtgttgcttctatgcccagcagtatgatatgactctgacctcatttgaacgtgccctttctttggctgaaaatgaagaagaggcagctgatgtctggtacaacttgggacatgtagctgtgggaataggagatacaaatttggcccatcagtgcttcaggctggctctggtcaacaacaacaaccacgccgaggcctacaacaacctggctgtgctggagatgcggaagggccacgttgaacaggcaagggcactattacaaactgcatcatcattagcaccccatatgtatgaaccgcattttaattttgcaacaatctctgataagattggagatctgcagagaagctatgttgctgcgcagaagtctgaagcagcatttccagaccatgtggacacacaacatttaattaaacaattaaggcagcattttgctatgctctgattgttccttagaccacatatgttcttatgaagcagcattatgcaaggggaaaaaagcactatgtctgtgtatgtatgtatatagtgtaatacgtatattttaacaaacctgtccttgatattagttaaggtgacacataagggtgacacagaatgtgtaatgcaaatttcatagtaatagtaactttataaaataatattataaaatacaggatttaaacctttctaaatagatcctgaaactgtctctcacattatatagtagatgtttgtttataatgtttacaaaacattttggtgaatttcctcaatgttttataaatgtacattttttaagtccttaagctgactcttagccatcatgtagcttaaggagtctgaaatctgccattaaaactgcacctttaagccaggtgtggtagcatgtgcctatagtcccagctacttgggaggtggaggtgggaggattataaatagagactttccttaagactttaaaaatgtatttaaaactattttttattaaatactttgtgatttcctattaagctttaaaataaatcattgtgtaaaacaccatcatttc

SEQ ID NO: 190649 - DNA, 479 bp, Homo sapiens
  Payload ID: 17658
  Gene Name: tetratricopeptide repeat domain 8
  ENST ID: ENST00000553718
  CDS Start-End: 115-240
ggacaaggccccagccgtcgcgggttgccgggcagagtcggacgccgccagctcttcactccacgcccacctctctcctggagcgctgggccttcgctggccgcaccggcagccatgagctcggagatggagccgctgctcctggcctggagctattttaggcgcaggaagttccagctctgcgccgatctatgcacgcagatgctggagaagtccccttatgaccagtcctgctcctgatggatctccacagagccatgcctgtccttggtctctccacatcctacggtagtctgtgttccatccttgctgtcatcccacatactcagcagagtcctgctctgggcccagagtgtctaggttcaaatactgcctctatacctttgagccttgtagaactaataatgcagtctactcattgggacttggagcttaaatggaaatgaccaagatggattagaaggatatgaaaaataaag

SEQ ID NO: 190650 - DNA, 2113 bp, Homo sapiens
  Payload ID: 17658
  Gene Name: tetratricopeptide repeat domain 8
  ENST ID: ENST00000555057
  CDS Start-End: 37-597
tggagcgctgggccttcgctggccgcaccggcagccatgagctcggagatggagccgctgctcctggcctggagctattttaggcgcaggaagttccagctctgcgccgatctatgcacgcagatgctggagaagtccccttatgaccaggcagcttggatcttaaaagcaagagcgctaacagaaatggtatacatagatgaaattgatgtagatcaggaaggaattgcagaaatgatgctggatgaaaatgctatagctcaagttccacgccctggaacgtctttgaaactccctggaactaatcagacaggagggcctagccaggccgttaggccaatcacacaagctggaagacccattacaggtttcctcaggcccagcacgcagagtggaaggccaggcactatggaacaggctatcagaacacccagaaccgcctacacagcccgccctatcaccagctcctccggaagatttgtcaggctgggaacggcttccatgcttacaagtcctgatggaccatttataaatttatctaggctgaatttaacaaagtattcccagaaacctaagttggcaaaggtatgtacttaaaatgattttgagttatgaagtaatattacacgctttggatctggctgccctctccacagaacattctcagtacaaggactggtggtggaaagtacagattggaaaatgttactacaggttgggaatgtatcgtgaagcagaaaaacagtttaaatcagccctgaagcagcaggaaatggtagatacatttctgtacttggcaaaagtttatgtctcattggatcaacctgtgactgctttaaatcttttcaaacaaggcttagataagtttccaggagaagtaaccctgctctgtggaattgcaagaatctatgaggaaatgaacaatatgtcatcagcagcagaatattacaaagaagttttgaaacaagacaatactcatgtggaagccatcgcatgcattggaagcaaccacttctattctgatcagccagaaatagctctccggttttacaggcggctgctgcagatgggcatttataacggccagctttttaacaatctggggctgtgttgcttctatgcccagcagtatgatatgactctgacctcatttgaacgtgccctttctttggctgaaaatgaagaagaggcagctgatgtctggtacaacttgggacatgtagctgtgggaataggagatacaaatttggcccatcagtgcttcaggctggctctggtcaacaacaacaaccacgccgaggcctacaacaacctggctgtgctggagatgcggaagggccacgttgaacaggcaagggcactattacaaactgcatcatcattagcaccccatatgtatgaaccgcattttaattttgcaacaatctctgataagattggagatctgcagagaagctatgttgctgcgcagaagtctgaagcagcatttccagaccatgtggacacacaacatttaattaaacaattaaggcagcattttgctatgctctgattgttccttagaccacatatgttcttatgaagcagcattatgcaaggggaaaaaagcactatgtctgtgtatgtatgtatatagtgtaatacgtatattttaacaaacctgtccttgatattagttaaggtgacacataagggtgacacagaatgtgtaatgcaaatttcatagtaatagtaactttataaaataatattataaaatacaggatttaaacctttctaaatagatcctgaaactgtctctcacattatatagtagatgtttgtttataatgtttacaaaacattttggtgaatttcctcaatgttttataaatgtacattttttaagtccttaagctgactcttagccatcatgtagcttaaggagtctgaaatctgccattaaaactgcacctttaagccaggtgtggtagcatgtgcctatagtcccagctacttgggaggtggaggtgggaggattataaatagagactttccttaagactttaaaaatgtatttaaaactattttttattaaatactttgtgatttcctattaagctttaaaataaat

SEQ ID NO: 190651 - DNA, 599 bp, Homo sapiens
  Payload ID: 17658
  Gene Name: tetratricopeptide repeat domain 8
  ENST ID: ENST00000556651
  CDS Start-End: 24-599
cttcgctggccgcaccggcagccatgagctcggagatggagccgctgctcctggcctggagctattttaggcgcaggaagttccagctctgcgccgatctatgcacgcagatgctggagaagtccccttatgaccaggcagcttggatcttaaaagcaagagcgctaacagaaatggtatacatagatgaaattgatgtagatcaggaaggaattgcagaaatgatgctggatgaaaatgctatagctcaagttccacgccctggaacgtctttgaaactccctggaactaatcagacaggagggcctagccaggccgttaggccaatcacacaagctggaagacccattacaggtttcctcaggcccagcacgcagagtggaaggccaggcactatggaacaggctatcagaacacccagaaccgcctacacagcccgccctatcaccagctcctccggaagatttgtcaggctgggaacggcttccatgcttacaagtcctgatggaccatttataaatttatctaggctgaatttaacaaagtattcccagaaacctaagttggcaaaggctttggatctggctgccctctccaca

SEQ ID NO: 190652 - DNA, 1020 bp, Homo sapiens
  Payload ID: 17658
  Gene Name: tetratricopeptide repeat domain 8
  ENST ID: ENST00000556077
  CDS Start-End: 197-832
aggacctcgagaaacagcggacaatttcaggatttaggactttaggtcttgatgggtggatggcgcgctgcgggcacctctcggacaaggccccagccgtcgcgggttgccgggcagagtcggacgccgccagctcttcactccacgcccacctctctcctggagcgctgggccttcgctggccgcaccggcagccatgagctcggagatggagccgctgctcctggcctggagctattttaggcgcaggaagttccagctctgcgccgatctatgcacgcagatgctggagaagtccccttatgaccagaaaattagctgggcgtggtggcacgtgcctgtaatcccagctacttgggaggctgaggcaggagaattgcttgaacccaggaagcggaggttgcagcaagccgagatcacgccattgtactccagcttgggcaacaagagcaaaactccatctcaaaaagcagcttggatcttaaaagcaagagcgctaacagaaatggtatacatagatgaaattgatgtagatcaggaaggaattgcagaaatgatgctggatgaaaatgctatagctcaagttccacgccctggaacgtctttgaaactccctggaactaatcagacaggagggcctagccaggccgccaatcacacaagctggaagacccattacaggtttcctcaggcccagcacgcagagtggaaggccaggcactatggaacaggctatcagaacacccagaaccgcctacacagcccgccctatcaccagctcctccggaagatttgtcaggctgggaacggcttccatgcttacaagtcctgatggaccatttataaatttatctaggctgaatttaacaaagtattcccagaaacctaagttggcaaaggctttgtttgagtatatctttcatcatgaaaatgatgttaagactgctttggatctggctgccctctccacagaacattctcagtacaaggactggtggtggaaagtacagattggaaaat

SEQ ID NO: 190653 - DNA, 794 bp, Homo sapiens
  Payload ID: 17658
  Gene Name: tetratricopeptide repeat domain 8
  ENST ID: ENST00000557580
  CDS Start-End: 1-794
aagtattcccagaaacctaagttggcaaaggctttgtttgagtatatctttcatcatgaaaatgatgttaagactgttgggaatgtatcgtgaagcagaaaaacagtttaaatcagccctgaagcagcaggaaatggtagatacatttctgtacttggcaaaagtttatgtctcattggatcaacctgtgactgctttaaatcttttcaaacaaggcttagataagtttccaggagaagtaaccctgctctgtggaattgcaagaatctatgaggaaatgaacaatatgtcatcagcagcagaatattacaaagaagttttgaaacaagacaatactcatgtggaagccatcgcatgcattggaagcaaccacttctattctgatcagccagaaatagctctccggttttacaggcggctgctgcagatgggcatttataacggccagctttttaacaatctggggctgtgttgcttctatgcccagcagtatgatatgactctgacctcatttgaacgtgccctttctttggctgaaaatgaagaagaggcagctgatgtctggtacaacttgggacatgtagctgtgggaataggagatacaaatttggcccatcagtgcttcaggctggctctggtcaacaacaacaaccacgccgaggcctacaacaacctggctgtgctggagatgcggaagggccacgttgaacaggcaagggcactattacaaactgcatcatcattagcaccccatatgtatgaaccgcattttaattttgcaacaatctctgata

SEQ ID NO: 190654 - DNA, 1859 bp, Homo sapiens
  Payload ID: 17658
  Gene Name: tetratricopeptide repeat domain 8
  ENST ID: ENST00000554686
  CDS Start-End: 1-1313
cctggagctattttaggcgcaggaagttccagctctgcgccgatctatgcacgcagatgctggagaagtccccttatgaccaggcagcttggatcttaaaagcaagagcgctaacagaaatggtatacatagatgaaattgatgtagatcaggaaggaattgcagaaatgatgctggatgaaaatgctatagctcaagttccacgccctggaacgtctttgaaactccctggaactaatcagacaggagggcctagccaggccgttaggccaatcacacaagctggaagacccattacaggtttcctcaggcccagcacgcagagtggaaggccaggcactatggaacaggctatcagaacacccagaaccgcctacacagcccgccctatcaccagctcctccggaagatttgtcaggctgggaacggctttgtttgagtatatctttcatcatgaaaatgatgttaagactgctttggatctggctgccctctccacagaacattctcagtacaaggactggtggtggaaagtacagattggaaaatgttactacaggttgggaatgtatcgtgaagcagaaaaacagtttaaatcagccctgaagcagcaggaaatggtagatacatttctgtacttggcaaaagtttatgtctcattggatcaacctgtgactgctttaaatcttttcaaacaaggcttagataagtttccaggagaagtaaccctgctctgtggaattgcaagaatctatgaggaaatgaacaatatgtcatcagcagcagaatattacaaagaagttttgaaacaagacaatactcatgtggaagccatcgcatgcattggaagcaaccacttctattctgatcagccagaaatagctctccggttttacaggcggctgctgcagatgggcatttataacggccagctttttaacaatctggggctgtgttgcttctatgcccagcagtatgatatgactctgacctcatttgaacgtgccctttctttggctgaaaatgaagaagaggcagctgatgtctggtacaacttgggacatgtagctgtgggaataggagatacaaatttggcccatcagtgcttcaggctggctctggtcaacaacaacaaccacgccgaggcctacaacaacctggctgtgctggagatgcggaagggccacgttgaacagattggagatctgcagagaagctatgttgctgcgcagaagtctgaagcagcatttccagaccatgtggacacacaacatttaattaaacaattaaggcagcattttgctatgctctgattgttccttagaccacatatgttcttatgaagcagcattatgcaaggggaaaaaagcactatgtctgtgtatgtatgtatatagtgtaatacgtatattttaacaaacctgtccttgatattagttaaggtgacacataagggtgacacagaatgtgtaatgcaaatttcatagtaatagtaactttataaaataatattataaaatacaggatttaaacctttctaaatagatcctgaaactgtctctcacattatatagtagatgtttgtttataatgtttacaaaacattttggtgaatttcctcaatgttttataaatgtacattttttaagtccttaagctgactcttagccatcatgtagcttaaggagtctgaaatctgccattaaaactgcacctttaagccaggtgtggtagcatgtgcctatagtcccagctacttgggaggtggaggtgggaggattataaatagagactttccttaagactttaaaaatgtatttaaaactattttttattaaatactttgtgatttcctatta

SEQ ID NO: 190655 - DNA, 2377 bp, Homo sapiens
  Payload ID: 17658
  Gene Name: tetratricopeptide repeat domain 8
  ENST ID: ENST00000614125
  CDS Start-End: 197-1792
aggacctcgagaaacagcggacaatttcaggatttaggactttaggtcttgatgggtggatggcgcgctgcgggcacctctcggacaaggccccagccgtcgcgggttgccgggcagagtcggacgccgccagctcttcactccacgcccacctctctcctggagcgctgggccttcgctggccgcaccggcagccatgagctcggagatggagccgctgctcctggcctggagctattttaggcgcaggaagttccagctctgcgccgatctatgcacgcagatgctggagaagtccccttatgaccaggcagcttggatcttaaaagcaagagcgctaacagaaatggtatacatagatgaaattgatgtagatcaggaaggaattgcagaaatgatgctggatgaaaatgctatagctcaagttccacgccctggaacgtctttgaaactccctggaactaatcagacaggagggcctagccaggccgttaggccaatcacacaagctggaagacccattacaggtttcctcaggcccagcacgcagagtggaaggccaggcactatggaacaggctatcagaacacccagaaccgcctacacagcccgccctatcaccagctcctccggaagatttgtcaggctgggaacggcttccatgcttacaagtcctgatggaccatttataaatttatctaggctgaatttaacaaagtattcccagaaacctaagttggcaaaggctttgtttgagtatatctttcatcatgaaaatgatgttaagactattcatcttgaagatgtagttctacatcttggaatttacccattcttattgaggaataaaaatcacattgaaaaaaatgctttggatctggctgccctctccacagaacattctcagtacaaggactggtggtggaaagtacagattggaaaatgttactacaggttgggaatgtatcgtgaagcagaaaaacagtttaaatcagccctgaagcagcaggaaatggtagatacatttctgtacttggcaaaagtttatgtctcattggatcaacctgtgactgctttaaatcttttcaaacaaggcttagataagtttccaggagaagtaaccctgctctgtggaattgcaagaatctatgaggaaatgaacaatatgtcatcagcagcagaatattacaaagaagttttgaaacaagacaatactcatgtggaagccatcgcatgcattggaagcaaccacttctattctgatcagccagaaatagctctccggttttacaggcggctgctgcagatgggcatttataacggccagctttttaacaatctggggctgtgttgcttctatgcccagcagtatgatatgactctgacctcatttgaacgtgccctttctttggctgaaaatgaagaagaggcagctgatgtctggtacaacttgggacatgtagctgtgggaataggagatacaaatttggcccatcagtgcttcaggctggctctggtcaacaacaacaaccacgccgaggcctacaacaacctggctgtgctggagatgcggaagggccacgttgaacaggcaagggcactattacaaactgcatcatcattagcaccccatatgtatgaaccgcattttaattttgcaacaatctctgataagattggagatctgcagagaagctatgttgctgcgcagaagtctgaagcagcatttccagaccatgtggacacacaacatttaattaaacaattaaggcagcattttgctatgctctgattgttccttagaccacatatgttcttatgaagcagcattatgcaaggggaaaaaagcactatgtctgtgtatgtatgtatatagtgtaatacgtatattttaacaaacctgtccttgatattagttaaggtgacacataagggtgacacagaatgtgtaatgcaaatttcatagtaatagtaactttataaaataatattataaaatacaggatttaaacctttctaaatagatcctgaaactgtctctcacattatatagtagatgtttgtttataatgtttacaaaacattttggtgaatttcctcaatgttttataaatgtacattttttaagtccttaagctgactcttagccatcatgtagcttaaggagtctgaaatctgccattaaaactgcacctttaagccaggtgtggtagcatgtgcctatagtcccagctacttgggaggtggaggtgggaggattataaatagagactttccttaagactttaaaaatgtatttaaaactattttttattaaatactttgtgatttcctattaagctttaaaataaatcattgtgtaaaacaccatcatttc

SEQ ID NO: 190656 - DNA, 5270 bp, Homo sapiens
  Payload ID: 17658
  Gene Name: tetratricopeptide repeat domain 8
  ENST ID: ENST00000622513
  CDS Start-End: 85-1602
ggcagagtcggacgccgccagctcttcactccacgcccacctctctcctggagcgctgggccttcgctggccgcaccggcagccatgagctcggagatggagccgctgctcctggcctggagctattttaggcgcaggaagttccagctctgcgccgatctatgcacgcagatgctggagaagtccccttatgaccaggcagcttggatcttaaaagcaagagcgctaacagaaatggtatacatagatgaaattgatgtagatcaggaaggaattgcagaaatgatgctggatgaaaatgctatagctcaagttccacgccctggaacgtctttgaaactccctggaactaatcagacaggagggcctagccaggccgttaggccaatcacacaagctggaagacccattacaggtttcctcaggcccagcacgcagagtggaaggccaggcactatggaacaggctatcagaacacccagaaccgcctacacagcccgccctatcaccagctcctccggaagatttgtcaggctgggaacggcttccatgcttacaagtcctgatggaccatttataaatttatctaggctgaatttaacaaagtattcccagaaacctaagttggcaaaggctttgtttgagtatatctttcatcatgaaaatgatgttaagactgctttggatctggctgccctctccacagaacattctcagtacaaggactggtggtggaaagtacagattggaaaatgttactacaggttgggaatgtatcgtgaagcagaaaaacagtttaaatcagccctgaagcagcaggaaatggtagatacatttctgtacttggcaaaagtttatgtctcattggatcaacctgtgactgctttaaatcttttcaaacaaggcttagataagtttccaggagaagtaaccctgctctgtggaattgcaagaatctatgaggaaatgaacaatatgtcatcagcagcagaatattacaaagaagttttgaaacaagacaatactcatgtggaagccatcgcatgcattggaagcaaccacttctattctgatcagccagaaatagctctccggttttacaggcggctgctgcagatgggcatttataacggccagctttttaacaatctggggctgtgttgcttctatgcccagcagtatgatatgactctgacctcatttgaacgtgccctttctttggctgaaaatgaagaagaggcagctgatgtctggtacaacttgggacatgtagctgtgggaataggagatacaaatttggcccatcagtgcttcaggctggctctggtcaacaacaacaaccacgccgaggcctacaacaacctggctgtgctggagatgcggaagggccacgttgaacaggcaagggcactattacaaactgcatcatcattagcaccccatatgtatgaaccgcattttaattttgcaacaatctctgataagattggagatctgcagagaagctatgttgctgcgcagaagtctgaagcagcatttccagaccatgtggacacacaacatttaattaaacaattaaggcagcattttgctatgctctgattgttccttagaccacatatgttcttatgaagcagcattatgcaaggggaaaaaagcactatgtctgtgtatgtatgtatatagtgtaatacgtatattttaacaaacctgtccttgatattagttaaggtgacacataagggtgacacagaatgtgtaatgcaaatttcatagtaatagtaactttataaaataatattataaaatacaggatttaaacctttctaaatagatcctgaaactgtctctcacattatatagtagatgtttgtttataatgtttacaaaacattttggtgaatttcctcaatgttttataaatgtacattttttaagtccttaagctgactcttagccatcatgtagcttaaggagtctgaaatctgccattaaaactgcacctttaagccaggtgtggtagcatgtgcctatagtcccagctacttgggaggtggaggtgggaggattataaatagagactttccttaagactttaaaaatgtatttaaaactattttttattaaatactttgtgatttcctattaagctttaaaataaatcattgtgtaaaacaccatcatttcattattttttaatgagtttttattttagtcatctcaggtgaaacaggttttacagaagtccagtaatcttagaaatcatcattattttaattttatttcaaatgatataccaccaattctgttttttcctaaaaagtgatttatgggatgtcacattattaataataagaatattcagattagaaatagagtcacaggccaggagtcccacttctggtcagccacagcacggaagtcagcaatattccagtaccatgcatggcatagcagccttagaaaggctcttgaacttttctctgccttatttagtggaactcttattaaagtgttcacacaaggaaatgtgttaatgggacaggaccactcaaactcatactttggactttgggacctccatgttatttttcatttttttaacttcatgaaaactatttgatagatacttctattcttttcagatttgtataaattgtatactcagctgagagaacaaaaaaattgaattcaaggaatgatagcttgctcaaggctagcattcactacagacaagaaagcaaggccccgcgtcacatccatagctgcagcccaaggtcttgttcctgcaccttagacttgaacctttcttggttctctgtgatgtgttagtgtttatttagcccttgagaatttcctcaggtactatcacatttcctaatatcgtagtcaatatttagattcaaatggtataatgtgaatcattttcttaatttaaaataagagctaataagaatggctgaacatttactgaggatgttaaatatgcccactgttctgagctctttatgggaatgaattcatttcattctcaccgtagtcctatgcaggctgttattccattttacttatgagaatactgaggcatagtaaaaagcttattgaactagtagtaagtgccaaagattcaggtttaggcagcgtggcctcttgagtgtgtgctcttaatcactaggtcaaatcacctctctctgtttctgctgtaaataaatctactaccatttaaaatgaacattgtgtgcattaggaaagttgaataataagggaatattaacacagcaaaaaataaatgattccattttcctaaggtgatatggagggattttgtcttgaatttatgtgaattcagtgtgagcatgaaggcaaagaatgagtcacagtggctcagggcagaatgatgacatagcaccgtggatgactgtatcagaagcgacattcaggatgtctttgtaacaacatttcctatggactgcgtaacttctggcttctgtgccaacatttctgtagaaagaacacaaaaaatactaataattgttttccagttttccactgtggctaaagaggtgctcaatccataaatacaaattgctcaaccaaaattcatatcatcgagcatatttccaactgatgaaaatgagatctggcaagaaggcttcctgcgctaaaacattactgaggttagaagttcttccttttttacaaatgtgtcatggctgagccagtccccatagtgataactcttccattgcatttctgagtgctttttcccaggctcagattatctatcaggatacaatttatggcctacagataagaaaattaataaaggtaacgtgtcactacattattattattattattattattattattattattattattattatgacagtcttgctcggtcgcccaggctgaagtgcagtggcatgatcttggcttactgcaacctctgcctcccgggttcaagcaattttcgtgcctcagcctcccaagcagctgggattacaggcatgcaccaccacacccagctaatttttgtatttttagtagagacagggtttcaccatgttgctcaggctggtctcaaactcctggcctcaagtggtccacccgccatggcctcccaaagtgctaagattacaggtgtgagccactgcacccagcgtctctacacttttagtttccaccaccaaccctttactacaatgagggatttctgtcagggtctttcagctgggattgaatttaagcattcagaaaacaaatattttagaaaggctggcaggactaaaccttagaaaataacccagaaatcaagtgtaggaaaaaaagccatcaccaaataattttgtattctaggaaatagagaaattggaatgttccatgtttatgttccttgcagagttccaaaatggtcatctaggctcagatttgagggggaaacatttatttagcaatttgaaaataactgcactttcatatctatccatatagatggcattcgtcctatttttagctaaataaaaacaacatttttgagagagactattatttcacttctttgatgtcaaagccagtccttgaaatgaaagaatagacatgttgttataatccttgggaactatgtttcttgcaatgtgatccttttctttacctgaatctaattctgactaataagggaaagtggattgttaagtgaaaacaacgggaactcttggtgaaagcaaccgtgttatcttggagaagaggctagacctaaacagattttaggaagaattttgttttctttttaaatcagaaagagagaccctcttccaatatttgaaactcaagtttttatggactccagcaccttgcaactgtcaccgcccccaaaccccacccctcttctggtctaatagcttcaatttatttctctctactggattatgtcttttttaaaaatcacatttcctttaagcctgcctccctttttaaaaatagacaatataactgtttattaaaataaaggaagagaaagaaaataacctgaaaaggaaactcataaaagaaattaaaatggttgataaacatatgtaacaaaaaaaatttgataacagaatgaaattaattcaagagaaagatacatttttaacctcttcagagaacaaagatttgaaatgtttattatatatgaggtgaaggtactgtcaaaattcactgttgggcatatatatcattacaatcttgagagtagtgtggcaaattttattaaattccttccattt

SEQ ID NO: 190657 - DNA, 5217 bp, Homo sapiens
  Payload ID: 17659
  Gene Name: tetratricopeptide repeat domain 9
  Uniprot ID: Q92623
  ENST ID: ENST00000256367
  CDS Start-End: 344-1012
ctcggggccacggtccccccgcagcgctagtcccgggcccgcgagcaccggcccccgccacccgcaggttgcggagggaggagggcgggagcgggcggcgcggagccgggaggcgggggaggggccggcgtccgaggcggcggcggcggcggctggagcagcctctggcagcagcggggagaatgggagtgcggggcgccagaccgccgcggggtgtcacggccgccacgaagcctgcgaggcgcggggccggcgcccgcggcttttaaacccgggaaggcgcggcggcggcggcggcggcgggcagatcgcggcgcgcaccaggcgccggggcggcggccgaatggagagaaagggctcggcggccggggccaaggggaacccgagcccgcccgcggccggagaggggcagcggccaccgccgccgctgtgcgtcccgggcggcggcggaggagccccagcgaggggccaggtcggggcggcggccgagccggccgagctcatccgacgagcgcacgagttcaaaagccaaggggcgcagtgctacaaggacaagaaattccgtgaagccataggcaaataccaccgggcgttgctggagctgaaggggctgctgccgccccccggggaacgggagcgggactcgcgcccggcctccccggctggggccctgaagcccggccgcctctcggaggagcagagcaagacggtggaagccatcgagatcgactgttacaacagcctggcagcctgcctgctccaggctgagctggtaaactatgaacgagtcaaggaatattgcctcaaagtcttgaagaaggaaggggagaacttcaaggccctttaccggtctggtgtggccttctaccaccttggggactatgacaaagcactctactacctgaaagaagcaaggacccaacaaccaacagacaccaacgtgattcggtatatccagctgacggagatgaaactcagccgatgctcccagagagaaaaagaagccatgtaaccaggaagcagctccagagctgcgcccacgcctgaccggggacttccaggcatcccctggcagagagccccgtcctggattctgtccctttctccccacttcttctggctcctcatttttcctcctgttgcaccccagctctttgtctcctcccagtacgaaaaggagagatgcaaatttggaatctggtaggtcgcccagacaatggagacatcctctcctctagcaggtcagcgactgagaggggcctgacttctgctgggacagctggagaggagtctcatgggctgggatgctgttgtggctttgactttggccagtgcttctgacagaggcggagcctggcaagtgtaccatcccacaggcagcaggcacacagcccatgggctggatccttccacactttcctgacagaccagaaccagagcatctcgaggcaactgttagaaatccagggacgagacaaacagagaagcgctggtgaagccaacatagagactgtcaatgtgtacactggagttcccacccccaccccccacccgtcacttagcccctgcctccttcccccactcgttgtcttggcttgtgctttctcctctccccatcggggatccgagactctgccaggattcacatgccactgaagcccactcagtgccctctggtgaccacacataccattcccccggactcccacccagcaggcagctgtgaccgcagaagggcaggatgaagtgggccaaggtttgggacaggttgactgtgtaggtgacagggagggaaagatgatggccaggggaaagagcatcgtataggctaggggattgaactgtggactgattcagtgtaaataaaaacaaattaacaggtagtagttcctgtcagttctgttggaagcagcccactccctcacttttactccttcctccaaccctcaatcagagctacttacagccaggcaggatggggctttccccaaagcaattggccgtttgtccagtggcagacaatggtggctacagcctttgtgcttttaagagtgggctgggattgtggagactgcccaggggcttggctttgtcagaacttgtacaatcttcttttgatgaaattatctgaactcaacatctagcacatagaatgtgttcaacaaatgcttgttgaatgaataaattatgactgcagactggctctcctgccttaaactaatttcatcccagcctagtctcctgatgtctgtgctcgttatgctatgccatgttgcttcagtcaaacaagaaacacttactgagggcatattgtttgcccatcattgtgcaatatgctgtgggacatgggatgtcgtctcagtcttcaaggaaatggaagggttaagaaatgcatatgagattattaccaatgacaccgttaatttatatgatgctttaaaattatcagagcactttcatgtatttttcgtgtgactagtgaaaaagacaatgttgtacaaaattaaaatatatacagatgcaataatgtgaatagttaggatttattaaatgcattatcttcagatctttacatgtataatctcatttctttcatgcagttactctgggatactgttcccatttgatgggtaagaatattgaaaaccagaaaaattaattatcccaaggttgcatggcctttagtggcatagctaggatttgaaccaggcctgcctgactccagagctctggctagtatctatgctatacttagttgcctctctgtaagtataatattgggcaattataaccatttgagaacaggacaatatgtattaacctgaaaagtgttcatgatgtcagtgatagtacatggcctccttatgtatttactcaagggccccaaaagaccagaggccagaatccctagtagtcagagcagtgacaggtcagaaaaaggcagctgaggtccaatagttatgtctgtgtattgctcattctacttactgatggagccagcatgtatctcaacaactcacctagcattcatcacccatccccagcattgggaaagggtcacaattaagaccgaaaggaaacacaaagttaaatatgggttaattatgtaagcagatgccccaccacggcaggatccaatcacagccgaggggcccagaagagagcagcgtaagttatattcacatagttccccaaaggctttcaacgggggctacaggaaggtgctagaaatattgaggggcctgccattactcacctagagctcactctctggagaagaggaaaaggaagaagctatttcagctgccacattctccccaatccctactatattatgctgtctttcctcttcctcctagctggctttacatgaccctaacccaaaactaccctatggccccacacgggaatgtgttcaaacgccccgacccccacccccacccccattcccaagcctccaacttagaacgtttgtgatttggcagatggtttgttaggatctgaaggatgaagagaagggtagaggtcacctggagaatgagttcaaactgccagggtcttcccttggtctttgtgcgtcaggaaggactccgagtaattattccctatgcagagacaggagagaggtcttgtttacatgagtgtgctggggcagggctggacaatccaggatatgattgtagccatcccatgtagaaagatcaaaaaccagaacgaaatgaagacagcctctcagaacctcatagaacaagcgtccaggtcatctgcttgtttggtgacttagatatacaggcttactggaactccattcactgtgacctgaagttaaataatcccaaagagaaaaagctacctggggtattggttgatgtttggggtgatagggctgaattttctgtgcatttgtccaacaaaggctttagagcacaaaaccaggttcattctccctaccaaatcttcagcttccttctcctcatccctccccaaaacaagaactgtgatttaattccgtacgttgcggatgtcactgctgacctatgtagctggagtactaatcaggcatctgacctgcactgtcatcccctgcctggacttttgcgatggactctttgggggaaaaactaacgctttttaattattgtgaaagcatcatgtgtgtattgtagaagttttaggaaaaaaaggacaaaatccaatccataagcttaccacccaagacaaacgtgtattcttttgaatataccttttagttctttttggtgtaaatgtacacacgcacacacagttgtggatttttttaaacaaaaactggatacactgaatatactctttaataacttttcaagtgtgtatttatattttagaatatgtaatcctacacagatacaaaattcaaaaagtacaaactgctctgtagtcagaagtaaatcttctccctaccccgtctgccagcatctagtttccctctaatttattttgcatcctagtggagatgcttacacattgtcaaacatatgtatatattcttttatcacacacaaatggcagcatattggacactttttgttttttgctccttctgttccttcacttaataatatcacgaacattttcggcatatcaaactttctcaacagcatcttcattgtatggatggaccctttttttatcatcaatcctcaaatagtgattatttcatttgttcccaatcttcattgtaaatagtgttgcaactgacattcttgtagctaaattttgcacatgtctataacgatttccttaggataaactccaagaagagacttgcttggctatttttaagaattttgatacatgttgccaaccaccctccagaaagtttgtaccaaaacgctctcctatttggatcctagagagtaccctgtttcctgcaccctaacactaggtatcatcacttatcaaatctttcccaatttggtagctgggataatagtatgtcaatgttattttaactttctttgattcttcgcgaataacattttcatatgcttattgaccatttgtacttctttctttgtgaattttctatttatttgatattggtatgtttattatcaatttgtaattttattaagaatattatttttgtcaagaaatgctgcaaatatgctttccaagtgctttgctttcaaattttgtttatggtgctttttgacatacataaattcttaattctgc

SEQ ID NO: 190658 - DNA, 843 bp, Homo sapiens
  Payload ID: 17660
  Gene Name: tetratricopeptide repeat domain 9B
  Uniprot ID: Q8N6N2
  ENST ID: ENST00000311308
  CDS Start-End: 19-738
cggcaggagtttcccacaatgcagcgcggcgcgctgtccccggtgctgatgctcagcgctgccccggagcctccgccgcgcccgcctcccgccctctccccaccgggctcgggcccaggctcgggctcccgccatggctcggctcgtcccggtcctaccccagagccgtcggggagcctgggcgcggcgctcgacagcagcctgcgtgccgccgtggcgttcaaggcagagggccagcgctgctatcgagagaagaagttccgggaggccatcggcaagtaccaccgagcgctgctgcagctgaaggcggcgcagggggcccgccctagcggcctgcccgcccccgcccccgggcccaccagcagccccgggccggcgcgcctcagcgaggagcagcggcgcctggtggagagcacggaggtggagtgttacgactccctcacggcttgcctgctgcagtcggagctggtaaactacgagcgcgtgcgcgagtactgtctcaaggtactggagaagcagcagggcaacttcaaggccacctaccgtgccggcattgccttctaccacctgggcgactacgcacgcgcgctgcgctacctgcaggaggcccgcagccgggaacccacagacaccaatgtgctccgctacatccagctgactcagctgaagatgaatcgttgcagcctccagcgggaagacagtggggctgggtcccagactcgggatgtaattggctgaggccaatccagggggacctctctatccctcgccctcccacctcaccatgtaacttcccccgactcatgtgtttgttggtaaaacacttgtcactggtgatcataa

SEQ ID NO: 190659 - DNA, 1833 bp, Homo sapiens
  Payload ID: 17661
  Gene Name: tetratricopeptide repeat domain 9C
  ENST ID: ENST00000294161
  CDS Start-End: 652-900
tctgattgggtggtgtggcgcaatgcgcgcgaccctcaagataccaaactgtacgcatctctgaccctttcctctccttgctcctgctggtaaaccgaagcccaggagacttccaggtttgggcatctgcagagggcgaggaactggtcacggcgccgggtgggcttgcagctgtgacgcttatgtggacacctcagtgtcgctggtggttcacctcggcttcccagtttatttattgacgtcaacaaataaatgttgaataaggaagaagagttagaattgcttgaagccctctggagttttagcactagtcccgcccactcccttctacttccaggtcgggggggggcgggtccaatagaaaggcggaagccagtgtcccaggcgttctcacgcccgcaacaattcctgagtagggccttgcttgagttcttcggaaagtctcatccacccccacatcgcctctttaggaagtcacttaatgttgggcttcattattcccacatccctttccttactacttgcctgcacttcttgagaaaaagactgcagaaaggagaggtggggctttcagtagaaacaagcaaaccgcaggtccctgtggggggactctccaggaagaaggttccgcaagaaccgtgggcgacagttatggagaagcgtctgcaggaggctcagctgtacaaggaggaagggaaccagcgctaccgggaagggaagtaccgagatgctgtgagtaggtaccatcgagctctgcttcagctgcggggtctggatccgagtctgccctctccgttacctaatctcggacctcagggcccggccctcacgcctgaacaagaaaacatattgcataccacccagacagactgctataacaatctagctgttgtgaaatagggagtgtttcccttcttaatcataaaaaggcagaacattgacctgaattgcctgaattgactcctctgcagcttgtctccttcagatggagcccgtgaactacgaacgagtgagagaatatagtcagaaagtcctggaacgacagcctgataatgccaaggccttgtatcgggccggagtggcctttttccatctgcaggactatgaccaggcccgccactacctcctggctgccgtgaataggcagcctaaaggtaagcaagaagggctttgaaatggtaaagacaaaattgtcttgctggggtggatctgtggaaagggggttttattttactttgccaatgtattattttcaataagtaatacattcacatggttgagaattcgaactgaaaaagtatacgatgaacagacctttttccactcttgtgttcttgtctccacagaaaagcagtattattagtttcatgtgtagggggttgatgcttaatcagacatacacaatatatatgttggtatgtctgtttcatatatgtatgtatgcctattctaatatataaatatatgtatatcaacgtgcttttatttataaatatacagtgtatatatttatacatatacatgaatatatatataaaataggcaggccaggtggggtggctcacatctgttatctcagcactttgggagaccaaagtgggtggatcacctgaggtcaggagtttgagaccagcctgaccaacatggagaaaccccatctctactaaaaatacaaaattagccaggcatggtggcgcatgcctgtaaacccagctactcgggaggctgaggcaggagaattgcttgaacccaggaggcggaggttgcggtgagccgagatcctgggcaacaagaacgagattctgtctcaaaaaaaaaaaaaaaaaaaaaaaa

SEQ ID NO: 190660 - DNA, 1080 bp, Homo sapiens
  Payload ID: 17661
  Gene Name: tetratricopeptide repeat domain 9C
  Uniprot ID: Q8N5M4
  ENST ID: ENST00000316461
  CDS Start-End: 311-826
agttcttcggaaagtctcatccacccccacatcgcctctttaggaagtcacttaatgttgggcttcattattcccacatccctttccttactacttgcctgcacttcttgagaaaaagactgcagaaaggagaggtggggctttcagtagaaacaagcaaaccgcaggtccctgtggggggactctccaggaagaagggtaatttcctgcctccttaaattggctgctactgtcagttattttgctcccaaccccagagcttcacttgctccttcacttcccagttccgcaagaaccgtgggcgacagttatggagaagcgtctgcaggaggctcagctgtacaaggaggaagggaaccagcgctaccgggaagggaagtaccgagatgctgtgagtaggtaccatcgagctctgcttcagctgcggggtctggatccgagtctgccctctccgttacctaatctcggacctcagggcccggccctcacgcctgaacaagaaaacatattgcataccacccagacagactgctataacaatctagctgcttgtctccttcagatggagcccgtgaactacgaacgagtgagagaatatagtcagaaagtcctggaacgacagcctgataatgccaaggccttgtatcgggccggagtggcctttttccatctgcaggactatgaccaggcccgccactacctcctggctgccgtgaataggcagcctaaagatgccaacgtccggcggtacctccagctgacacagtcagaactcagcagctaccatagaaaagagaagcagctctacctgggcatgtttggttaacaaagaagaaagatgctcctccagttgaacttaggtggaccattaaacatgcatgaaggagaaatctgagcctcagcaagagaaattaaccctatacctctgacccaggtggatttttgtttctagttctgcacaaacttcactacttagacagtctgagtctttttctgtctatccatctgtttatttctatacctttcaatacatgttattgttgcagatatttggcttgagaaatataatcagaaaacata

SEQ ID NO: 190661 - DNA, 627 bp, Homo sapiens
  Payload ID: 17661
  Gene Name: tetratricopeptide repeat domain 9C
  ENST ID: ENST00000532276
  CDS Start-End: 1-210
cgacagcctgataatgccaaggccttgtatcgggccggagtggcctttttccatctgcaggactatgaccaggcccgccactacctcctggctgccgtgaataggcagcctaaagatgccaacgtccggcggtacctccagctgacacagtcagaactcagcagctaccatagaaaagagaagcagctctacctgggcatgtttggttaacaaagaagaaagatgctcctccagttgaacttaggtggaccattaaacatgcatgaaggagaaatctgagcctcagcaagagaaattaaccctatacctctgacccagttccaggatccatgtgcaggatatgcaggtttgttacatagggaaacgtgtgcctcggtggtttgctgcacctatcaacacatcacctcggtattaagtccagcatgtattagctatttttcctcatgttctcccaccccccgccacagcccctgttaaattaatttcttattctccttaatattccatacacattcagattccttctcccctacaaaaatatttgctattttgtccttgctatttctcatacttagatcattcatacactatatttattttttcattaaactattttaaaacctttgg

SEQ ID NO: 190662 - DNA, 858 bp, Homo sapiens
  Payload ID: 17661
  Gene Name: tetratricopeptide repeat domain 9C
  Uniprot ID: Q8N5M4
  ENST ID: ENST00000532583
  CDS Start-End: 122-637
cttcttgagaaaaagactgcagaaaggagaggtggggctttcagtagaaacaagcaaaccgcaggtccctgtggggggactctccaggaagaaggttccgcaagaaccgtgggcgacagttatggagaagcgtctgcaggaggctcagctgtacaaggaggaagggaaccagcgctaccgggaagggaagtaccgagatgctgtgagtaggtaccatcgagctctgcttcagctgcggggtctggatccgagtctgccctctccgttacctaatctcggacctcagggcccggccctcacgcctgaacaagaaaacatattgcataccacccagacagactgctataacaatctagctgcttgtctccttcagatggagcccgtgaactacgaacgagtgagagaatatagtcagaaagtcctggaacgacagcctgataatgccaaggccttgtatcgggccggagtggcctttttccatctgcaggactatgaccaggcccgccactacctcctggctgccgtgaataggcagcctaaagatgccaacgtccggcggtacctccagctgacacagtcagaactcagcagctaccatagaaaagagaagcagctctacctgggcatgtttggttaacaaagaagaaagatgctcctccagttgaacttaggtggaccattaaacatgcatgaaggagaaatctgagcctcagcaagagaaattaaccctatacctctgacccaggtggatttttgtttctagttctgcacaaacttcactacttagacagtctgagtctttttctgtctatccatctgtttatttctatacctttcaatacatgttattgttgcaga

SEQ ID NO: 190663 - DNA, 606 bp, Homo sapiens
  Payload ID: 17661
  Gene Name: tetratricopeptide repeat domain 9C
  ENST ID: ENST00000530625
  CDS Start-End: 186-606
ggaggcggggtcgtttctgcgggattatttttccggagcctcttctgattgggtggtgtggcgcaatgcgcgcgaccctcaagataccaaactgtacgcatctctgaccctttcctctccttgctcctgctggtaaaccgaagcccaggagacttccagttccgcaagaaccgtgggcgacagttatggagaagcgtctgcaggaggctcagctgtacaaggaggaagggaaccagcgctaccgggaagggaagtaccgagatgctgtgagtaggtaccatcgagctctgcttcagctgcggggtctggatccgagtctgccctctccgttacctaatctcggacctcagggcccggccctcacgcctgaacaagaaaacatattgcataccacccagacagactgctataacaatctagctgcttgtctccttcagatggagcccgtgaactacgaacgagtgagagaatatagtcagaaagtcctggaacgacagcctgataatgccaaggccttgtatcgggccggagtggcctttttccatctgcaggactatgaccaggcccgccactacctcctggctgccgtgaataggcagcctaaag

SEQ ID NO: 190664 - DNA, 7470 bp, Homo sapiens
  Payload ID: 17662
  Gene Name: tetratricopeptide repeat, ankyrin repeat and coiled-coil containing 1
  Uniprot ID: Q9C0D5
  ENST ID: ENST00000263635
  CDS Start-End: 238-5823
ccgcctcgggagccggaggagaggcagccgcggagcgccgagctggcctcgccccgaggcccggccctgggtgtggggaaccgcgctgaggagctggaaactttcccggcaggagctgactgctgggcaggaacgtctctcaggagaaagagtggaagagaaaattgtgaactaaggccccctgcccccttttcctggtgcatgtgaagttatcaaaaacagaaacaagtgttgaaaatgttaaaggctgtgctgaagaagagccgagagggaggaaagggaggcaagaaggaagcaggaagtgactttggtccagagacttctccagtcctgcaccttgaccacagtgctgactctcctgtgagcagtcttcccacagcagaggacacctatagggtgagcttggccaaaggtgtctcgatgtctctgccttcctcacctttgctgcctcgacagtctcacttggtgcaatcaagagtgaacaaaaaatccccaggtcccgtcaggaagcccaagtatgtggaaagccccagagtgcctggagatgcagttataatgccattcagagaagtagccaagccaacagagcctgatgagcatgaagcaaaggccgataatgaaccgagctgttcgccggcagctcaagaactgttgacaaggctgggatttttactgggagaagggatcccaagtgccacacacataaccattgaagacaaaaatgaaaccatgtgcacagctctgagtcaaggcatcagtccttgctccacactaacaagcagcaccgcatctcctagcaccgatagcccctgctcaaccttgaatagctgtgtcagcaagacggcagccaacaaaagtccctgtgagaccattagcagccctagttccaccctggaaagcaaggacagtggaattatagccacaattacaagttcatccgaaaatgatgaccggagtggctccagtttggaatggaataaagatggaaacctaagattaggggttcagaagggagtgcttcatgaccgcagggcagataactgctccccagtggcagaagaggagaccaccgggtcagcagagagcacgctgcccaaagcagaatcctcagctggagatggtccagtcccttattctcagggctccagctcactaataatgccacggcccaactcagttgcagcaacaagctcaaccaaattggaagatctgagttatttagacgggcagagaaatgctcctctacggacgtcaattagattaccatggcacaatacggccggaggtagggcacaggaagttaaagcacgatttgctccctacaagccacaagacattttgttgaaacccttgttgtttgaagtaccaagcataacaacagactctgtgtttgtgggaagggattggctctttcaccagatagaagaaaacttgaggaacacagaactggcagaaaacagaggcgcggtggtggttggcaatgtgggatttgggaagacggcaatcatttccaagttggtggccctgagctgccacggaagccgcatgaggcagattgcttccaacagcccgggttcatcacctaaaacctctgaccccactcaggatcttcatttcactccgttgctttcaccgagttcttccacaagtgcttccagcacagctaaaacacctcttgggtctatcagtgctgaaaaccagagaccaagagaggatgcagtgaaatatcttgcttctaaggtggtggcctaccactactgccaggctgacaacacgtacacttgcctggtgcccgagtttgtgcacagcatcgcagctttgctctgccggtcccatcagctggccgcctacagagaccttctgataaaggagccccaactacagagcatgctgagcctccgatcctgtgtgcaggacccggtggcagctttcaagaggggagtgctggagccactcacaaacctgagaaatgagcagaaaattcctgaagaagaatacattattttgatagatggcttaaatgaagctgagtttcataaacctgattatggagatacgctttcttcatttattaccaaaattatttctaaatttcctgcctggttgaagttgattgtgactgtaagagcaaattttcaggaaatcataagtgcgctgccatttgtcaagctttccttagatgacttcccagacaacaaagacatccacagtgacctgcacgcctacgtccagcacagggtgcacagcagccaggacatcctcagcaacatctccctgaatggcaaggccgatgccacactcattggaaaagtgagcagccacctggtgctgcggagcctcggctcctacctgtacctcaagctcaccctggaccttttccagaggggccacttggtcattaagagtgccagctacaaggtggtgcccgtgtctctctctgagctctatttgcttcagtgcaacatgaagttcatgacccagtccgcctttgagagggcacttccgattctcaacgtggccctcgcatccctccaccccatgacagacgagcagatctttcaggctattaatgctggccacatccagggggagcagggatgggaagactttcagcagaggatggacgccctctcctgcttcctcattaagaggcgagacaaaacccgcatgttctgccacccgtccttcagggagtggcttgtatggagagcagacggggaaaacacggccttcctgtgtgagcccaggaacgggcacgcgctcttggcattcatgttctcgcgtcaggagggcaagttgaaccgccagcagaccatggagcttggccaccacatcctgaaggcgcacattttcaagggcctcagtaagaagacgggaatttcttcaagccatctccaagccctgtggatcggctacagcaccgaggggctgtccgccgccctggcctctctcaggaatctctatactcccaacgtgaaggtgagccgtctcctgattttgggaggggccaacgtgaactacaggacagaagtgttaaataatgccccaatcctgtgcgtccagtctcaccttggccacgaggaagttgtcactctgctcctggaatttggtgcctgcctggacggaacgtcagagaacggcatgactgccctctgttacgcagcagctgctggccacatgaagctggtgtgtctgctgaccaagaagggagtgagagtggaccacttggataagaagggccagtgtgcgcttgtccacagtgccctacggggccacggtgacattctccagtacctgctgacttgtgagtggtcgccgggtcctccccagccaggcaccctgaggaagagccacgccctgcagcaggcgctgaccgcggcggccagcatgggccacagctcggtggtccagtgcttgctggggatggagaaggaacatgaagtagaagtcaatggcaccgacacattgtggggagaaacagccctgactgccgccgcaggaagagggaagctggaggtctgtgagctgctgctggggcatggagctgctgtgtcgcggacaaacaggagaggggttccacctttgttttgtgcagcacgccaggggcattggcagattgttagactgctgttggaacgcggctgtgatgtgaacctaagtgacaagcaaggccggacgcccctcatggtggctgcttgtgaagggcacttgagcaccgtggaattcctcctttcaaaaggtgcagccctttcttctctagacaaagagggtctgtcagcattaagctgggcttgtctgaaaggtcacagggcagtggtccagtatctggttgaagaaggagctgcaatagaccagacagacaagaatggccgcacacccttggacctggctgccttctatggcgatgccgagactgtgctgtacctggtggagaagggagccgtgatcgagcatgtggaccacagcgggatgcggcccttggacagagccatcggctgccggaacacatctgtagtggtggcgctactcagaaagggagccaagttaggaaatgctgcttgggcgatggccacttccaaacctgatatcttgattatacttttacagaaattaatggaggaaggaaatgtgatgtacaaaaaagggaaaatgaaagaggcagcccagaggtaccagtatgccttaagaaagtttcctcgagaaggattcggagaggacatgagacccttcaatgaattaagggtttccctctatctcaatttgtcgcgatgccgaagaaaaacaaatgactttggcatggcagaggaatttgcttccaaggctctcgaattgaagcccaagtcctatgaagccttttatgccagagcaagagcgaagagaaatagcaggcaattcgtggcagctctggctgacctgcaagaggctgtgaaactctgtcccaccaatcaggaagtcaagaggcttctggcccgcgtagaagaggagtgcaaacaactccagaggagtcaacagcaaaaacagcagggcccgctaccagctccactcaacgactccgagaacgaagaggacaccccaacccctggcttaagtgaccactttcactctgaggagactgaagaggaagaaacttctccccaggaagaatctgtttccccaactcccaggtcccagccatcctcatctgtcccttcctcatacatccgaaaccttcaagaagggttacagtccaaaggaaggccggtatcgccacagagcagggcaggaatcggcaagtccctgagagagcctgtggcccagccagggctgctcctgcagccctccaagcaggcccagatcgtgaaaaccagccagcacctgggctctggccagtcggcagtgagaaatggcagtatgaaagttcagatctcttctcagaaccctcctccaagtcccatgccagggagaatcgctgccactcctgctgggagcagaacccagcatttagagggaacaggtactttcactacaagagctggttgtggccactttggggatcggctgggccccagccagaatgtccgcctgcagtgtggtgagaatggccctgcacaccctttaccaagtaagacgaaaaccacagagaggcttctgtctcattcctccgtggctgtggacgcagcccctccaaaccaaggtgggctggcgacctgcagcgacgtgcgacacccagcttccctcaccagctcaggctcttctggttctccatccagcagcataaagatgtcaagttcaaccagtagtttgacttcgagcagcagtttttcagatggcttcaaggtccaaggaccagatactagaattaaagacaaggttgtaacccacgttcagagcggtacagctgagcacagaccccgcaacacgccgttcatgggcatcatggataagactgcgaggttccaacagcagagcaatcctccaagccgcagctggcactgtccggcaccagaggggctgctgacaaacacgtcttctgcagctggcctgcagtctgctaacactgagaagccctctctcatgcaagtgggaggatataataaccaagccaaaacctgttctgtttctaccctgagtgcaagtgtccacaatggggcacaagtgaaggagctagaagaaagcaagtgccaaattccagtccactctcaagagaacaggataactaagactgtttctcatctgtaccaggaaagtatctccaaacagcagcctcatattagtaatgaagcccacaggagccacctcactgcagccaaaccaaagcgatcatttatagagtcaaatgtgtgaaccttaagaaatccccatttgtggaatttggaaacgtgtgttgactcctggtggtaaattaaatagtttttttcatcagaaaaattattttttagccattttttttctttggggtggatctgatgccattgatatatctaaaatgtgggataaaacttctttaatagctagaaatcaccataaataagaatgctaaacagaattgaaaattatatcaacttaaaattttaagacagcccagaagacattaatgactctcacttatgaaattgtttggcttttgccactttcttccttgcctttgctatatggtagaatcacagaacttacttagagaataaatatgtctattgttcaagagtaacaggtttaactcatgaccaagtgatgtacatccaagtgatgtattctggaaacgatggaattttacagttacagttccattgagtcaaatcccattttatatatacataaaaattaagttctgagtgagttctagctaaatataagtgcgactgtaaacgcagccaatttttttaagcagaatatgagaacacctaagtattctcttcatagcagttcctataaagggattaaacacttatttctgtgttatggttcttattcatatatttttatagcacttttggaacctatatttgtgcttgaaggtgtttttgatatttggaaacagtataagccatttggagtcatgattggtggtcaagtggattcaagctaaaatactaagaccagcattcttagtggcgcttataaattagctctcacctggtttccaaactgcttttaacaatggtagtgctcctggaacaatccttccaagctcctctaaggacaatatttaattcagatactaaaggtaagactggttgttacttttgttttgttgtacaattagtactttatagtcacatgttgtatatattaaatagcccagttttattcagacttgtaaatagaactatttcaatgtagttaatctaaaaacaaaaaagaaaaccccagtcacgatttgcatgttctctgtaagcttcatccatgctggttattgcactgaatgatatattattagggcatgttaacagtataccagtaacagcactttatctcatttatatgaacacctttgaggtgctacttaagtccaagctctgatgtattattcatttgtaaagataaggtacaggaatgaaccttggtttaaaggtatttttatatgaaaatggtgtgttattggaagatgttaaaatgctaatttgagagaagtaggagtgtatctgttttatatgttgggatgtgaaatttattttctaaaattgaggagaaggaagttatatatttgcagaatgttttaaagtgaattgttgtaatgaagttcctgtgaacatcattatggttttgtacaaataggaacctctgatgtcattcttcaacgtttgttcctgtgtgtacaattgtactttgtatgaacagctttatcatttttataggctttccatgagttttgctgtaactactatggcttatttattttctttaatatttgtgaaagtcttactcctttgttagttttgtttctgcacaactactgtacttttccatatggaataaagactattaatagaa

SEQ ID NO: 190665 - DNA, 4168 bp, Homo sapiens
  Payload ID: 17662
  Gene Name: tetratricopeptide repeat, ankyrin repeat and coiled-coil containing 1
  ENST ID: ENST00000454300
  CDS Start-End: 593-1981
agcggaggctttgctgtggcagctgctggagcggcggccgcctcgggagccggaggagaggcagccgcggagcgccgagctggcctcgccccgaggcccggccctgggtgtggggaaccgcgctgaggagctggaaactttcccggcaggagctgactgctgggcaggaacgtctctcaggagaaagagtggaagagaaaattgtgaactaaggccccctgcccccttttcctggtgcatgtgaagttatcaaaaacagaaacaagtgttgaaaatgttaaaggctgtgctgaagaagagccgagagggaggaaagggaggcaagaaggaagcaggaagtgactttggtccagagacttctccagtcctgcaccttgaccacagtgctgactctcctgtgagcagtcttcccacagcagaggacacctatagggtgagcttggccaaaggtgtctcgatgtctctgccttcctcacctttgctgcctcgacagtctcacttggtgcaatcaagagtgaacaaaaaatccccaggtcccgtcaggaagcccaagtatgtggaaagccccagagtgcctggagatgcagttataatgccattcagagaagtagccaagccaacagagcctgatgagcatgccacaattacaagttcatccgaaaatgatgaccggagtggctccagtttggaatggaataaagatggaaacctaagattaggggttcagaagggagtgcttcatgaccgcagggcagataactgctccccagtggcagaagaggagaccaccgggtcagcagagagcacgctgcccaaagcagaatcctcagctggagatggtccagtcccttattctcagggctccagctcactaataatgccacggcccaactcagttgcagcaacaagctcaaccaaattggaagatctgagttatttagacgggcagagaaatgctcctctacggacgtcaattagattaccatggcacaatacggccggaggtagggcacaggaagttaaagcacgatttgctccctacaagccacaagacattttgttgaaacccttgttgtttgaagtaccaagcataacaacagactctgtgtttgtgggaagggattggctctttcaccagatagaagaaaacttgaggaacacagaactggcagaaaacagaggcgcggtggtggttggcaatgtgggatttgggaagacggcaatcatttccaagttggtggccctgagctgccacggaagccgcatgaggcagattgcttccaacagcccgggttcatcacctaaaacctctgaccccactcaggatcttcatttcactccgttgctttcaccgagttcttccacaagtgcttccagcacagctaaaacacctcttgggtctatcagtgctgaaaaccagagaccaagagaggatgcagtgaaatatcttgcttctaaggtggtggcctaccactactgccaggctgacaacacgtacacttgcctggtgcccgagtttgtgcacagcatcgcagctttgctctgccggtcccatcagctggccgcctacagagaccttctgataaaggagccccaactacagagcatgctgagcctccgatcctgtgtgcaggacccggtggcagctttcaagaggggagtgctggagccactcacaaacctgagaaatgagcagaaaattcctgaagaagaatacattattttgatagatggcttaaatgaagctgagtttcataaacctgattatggagatacgctttcttcatttattaccaaaattatttctaaatttcctgcctggttgaagttgattgtgactgtaagagcaaattttcaggaaatcataagtgcgctgccatttgtcaagctttccttagatgacttcccagacaacaaagacatccacagtgacctgcacgcctccatccagcagcataaagatgtcaagttcaaccagtagtttgacttcgagcagcagtttttcagatggcttcaaggtccaaggaccagatactagaattaaagacaaggttgtaacccacgttcagagcggtacagctgagcacagaccccgcaacacgccgttcatgggcatcatggataagactgcgaggttccaacagcagagcaatcctccaagccgcagctggcactgtccggcaccagaggggctgctgacaaacacgtcttctgcagctggcctgcagtctgctaacactgagaagccctctctcatgcaagtgggaggatataataaccaagccaaaacctgttctgtttctaccctgagtgcaagtgtccacaatggggcacaagtgaaggagctagaagaaagcaagtgccaaattccagtccactctcaagagaacaggataactaagactgtttctcatctgtaccaggaaagtatctccaaacagcagcctcatattagtaatgaagcccacaggagccacctcactgcagccaaaccaaagcgatcatttatagagtcaaatgtgtgaaccttaagaaatccccatttgtggaatttggaaacgtgtgttgactcctggtggtaaattaaatagtttttttcatcagaaaaattattttttagccattttttttctttggggtggatctgatgccattgatatatctaaaatgtgggataaaacttctttaatagctagaaatcaccataaataagaatgctaaacagaattgaaaattatatcaacttaaaattttaagacagcccagaagacattaatgactctcacttatgaaattgtttggcttttgccactttcttccttgcctttgctatatggtagaatcacagaacttacttagagaataaatatgtctattgttcaagagtaacaggtttaactcatgaccaagtgatgtacatccaagtgatgtattctggaaacgatggaattttacagttacagttccattgagtcaaatcccattttatatatacataaaaattaagttctgagtgagttctagctaaatataagtgcgactgtaaacgcagccaatttttttaagcagaatatgagaacacctaagtattctcttcatagcagttcctataaagggattaaacacttatttctgtgttatggttcttattcatatatttttatagcacttttggaacctatatttgtgcttgaaggtgtttttgatatttggaaacagtataagccatttggagtcatgattggtggtcaagtggattcaagctaaaatactaagaccagcattcttagtggcgcttataaattagctctcacctggtttccaaactgcttttaacaatggtagtgctcctggaacaatccttccaagctcctctaaggacaatatttaattcagatactaaaggtaagactggttgttacttttgttttgttgtacaattagtactttatagtcacatgttgtatatattaaatagcccagttttattcagacttgtaaatagaactatttcaatgtagttaatctaaaaacaaaaaagaaaaccccagtcacgatttgcatgttctctgtaagcttcatccatgctggttattgcactgaatgatatattattagggcatgttaacagtataccagtaacagcactttatctcatttatatgaacacctttgaggtgctacttaagtccaagctctgatgtattattcatttgtaaagataaggtacaggaatgaaccttggtttaaaggtatttttatatgaaaatggtgtgttattggaagatgttaaaatgctaatttgagagaagtaggagtgtatctgttttatatgttgggatgtgaaatttattttctaaaattgaggagaaggaagttatatatttgcagaatgttttaaagtgaattgttgtaatgaagttcctgtgaacatcattatggttttgtacaaataggaacctctgatgtcattcttcaacgtttgttcctgtgtgtacaattgtactttgtatgaacagctttatcatttttataggctttccatgagttttgctgtaactactatggcttatttattttctttaatatttgtgaaagtcttactcctttgttagttttgtttctgcacaactactgtacttttccatatggaataaagactattaat

SEQ ID NO: 190666 - DNA, 6404 bp, Homo sapiens
  Payload ID: 17663
  Gene Name: tetratricopeptide repeat, ankyrin repeat and coiled-coil containing 2
  Uniprot ID: Q9HCD6
  ENST ID: ENST00000389520
  CDS Start-End: 1-6003
atgtttcggaatagtctcaagatgctgcttactggtgggaaatcaagtcgtaaaaacaggtcaagtgatggagggagcgaggaaccaccggatcgaagacagtcaagtgtagactctcgccaaagccgctctgggcaaggtggcatctccacagaaagcgactgtgcttttgagccagactacgctgtcccgccacttccagtgagtgaaggtgatgctgaacaggagcttggcccccctccatctgtagatgaggcagcaaacacactcatgactcgtctgggtttcctccttggagagaaagtcacagaagttcagccaggtgaccaatacagcatggaagtacaggatgaaaatcagacctcagcaatcacccagcggataagtccttgttccactctgactagcagcactgcctctccaccagccagtagcccctgctctacactcccacccatcagtacaaatgcaactgccaaggactgcagctatggggctgttactagtccaacctctacccttgaaagcagagatagtggcatcattgctacattaacaagctattctgaaaatgtggaacgcacaaaatatgctggggaaagcagtaaagaattaggatctggaggaaacataaaaccttggcagtctcaaaaatccagcatggactcctgtttgtatcgagtagatgaaaacatgactgcttccacctatagtctgaataagatcccagagagaaatttggaaacagtgttatctcaatcagtacagtctattcctttgtatctcatgccacggccaaattcagtagcagccaccagctctgcccacttggaagaccttgcttacctggatgagcagagacatacacctttgagaacttctctacgaatgccaagacagagcatgggtggtgctcgcacacagcaggatttaagagttcgctttgcaccttataggcctccagatatctccttgaagcctctgctctttgaagtgcccagcatcactacagagtcagtgtttgttggccgagattgggttttccacgaaatagatgctcaacttcaaagttcaaatgccagcgtgaaccaaggagtagtgattgtgggaaacattggattcggcaaaactgccatcatctccagactggtggccctcagctgccatggtacaaggatgagacagatcgcctcagacagcccacatgcctcccccaaacatgtggatgccaacagagagctgccactcacacagccaccttcagcccactcatctatcaccagtggaagctgcccaggaactccggaaatgcgcaggcggcaggaggaggctatgcgaagactagcctcgcaggtggttgcctatcactattgtcaagcagataatgcctacacttgcttggtgccagaatttgtccacaatgttgctgccttgctctgccgctcacctcagctgacagcctatcgggagcagcttcttcgggaacctcacctgcagagcatgctgagccttcgttcctgtgttcaagaccccatggcctccttccggaggggagttctggagccactagaaaatctccataaagagagaaaaatcccagatgaagatttcatcattttaattgatggattaaatgaagcagaatttcacaaaccggattatggggatacaattgtatcgtttctgagtaaaatgatcggaaagtttccttcttggctcaaactaattgtaacagttaggaccagtttacaggaaattaccaagctgctgcctttccataggatttttttggatcgactagaagagaatgaagccatagaccaggacctgcaggcttacatcctgcaccggatacacagcagctcagagatccagaataacatttcacttaatggcaaaatggacaatactacatttggcaaactcagttctcatctcaagaccctcagtcaagggtcctatctatatctgaaacttacatttgacctcatagagaaaggctatctagtgttaaagagctctagctacaaagtagttcctgtttcgctctcagaggtttatttactccagtgcaatatgaagttcccaacccagtcttcctttgaccgggtgatgcctctcctgaatgtggcagtggcctctctccacccactgactgatgagcatatcttccaggccatcaatgctgggagcattgaaggcacactagaatgggaggattttcagcagagaatggagaacctctccatgttcctaatcaagcgcagagacatgactcgtatgtttgtacatccttcttttcgagaatggcttatctggagagaagaaggagagaaaaccaaatttctctgtgatccgaggagtggtcacacgttacttgccttctggttttcccgccaagagggaaaactaaaccgacagcagactattgaactgggacatcacatcctcaaagcacacatttttaagggtttgagtaaaaaagttggtgtatcatcctccatcctccaaggtctctggatctcttatagcacagaaggtctttccatggcactggcgtctttacgaaatctctacactccaaatataaaggtcagccgactgctgattttgggaggtgccaatattaattaccggacagaggttttaaataatgctccaattctatgtgttcagtcccatcttggttacacagaaatggtagccctgctgctggagttcggggccaacgtggatgcctcttctgaaagtggcctgactcccctgggatatgctgcagcagcagggtacctgagcattgtggtgctgctgtgcaagaaacgggccaaggtggatcatttggataagaacgggcagtgtgctttggttcatgctgcactccgaggtcatctggaggttgtcaagtttttgattcagtgtgactggacgatggccggccagcagcaaggagtatttaagaagagccatgccatccaacaggccctcattgctgcagccagcatgggttatactgagattgtctcctacctacttgatcttccagaaaaagatgaagaggaagtagagcgagcacagatcaacagctttgacagtctctggggagagacagccctaacagctgcagccggaaggggcaaactggaggtgtgccgtttgctcttggaacaaggggcggcagtggcccagccaaaccgccgaggagcagtgccactattcagcacagtgcgccagggccactggcagattgttgatcttttactcacccatggagctgatgtcaacatggcagacaagcagggccgcactcccctgatgatggctgcttccgaaggccatctaggaaccgtggactttctgcttgcacaaggtgcctccattgctcttatggacaaagaaggattgacagccctcagctgggcttgtttgaagggccatctctcagtagtacgttctctggtggataacggagctgccacagaccatgctgacaagaatggccgtaccccactggatctggcagctttctatggcgatgctgaggtggtccagttcctggtagatcatggggccatgatcgagcacgttgactacagtggaatgcgccctttggatagggcagtggggtgccggaacacttctgttgttgtcactcttctgaagaaaggagccaagataggttgtcagacgttaccgagtcgcccacgaggtccagccacatgggcgatggccacctccaagccagacatcatgatcatcctgttgagcaagctgatggaagagggggacatgttttataagaaaggtaaagtaaaggaagctgcccagcgctaccagtacgccctgaagaagttccctagagaagggtttggtgaggacttgaaaactttccgggaactaaaggtgtctctcctcctcaacctctctcggtgtcgcaggaaaatgaacgattttggaatggcggaggaatttgctactaaggccctggagctgaaaccgaaatcttatgaagcttactatgcgagagcaagggcaaaacgcagcagcagacagttcgcagcagccttagaggacctgaacgaggccatcaagctgtgtcccaacaaccgtgagatccagagacttctgctgagagtggaagaagagtgtagacagatgcagcagccacagcagccaccgccgccaccgcagcctcagcagcagttgccggaagaagcagaacctgagccacagcatgaagacatatactctgtacaggatatattcgaggaggagtacctggaacaggatgttgaaaatgtttccattggcctccagacagaggcccggcccagccaggggctcccggtcatccagagcccaccctcctctcccccgcatcgggactcagcctacatctccagctcacctcttggctctcatcaggtttttgacttccggtccagtagttctgtaggctctcccactagacagacctatcagtccacctcacctgccctttctccaactcatcagaactcacattacaggcctagcccaccacacacttccccggctcatcagggaggatcttaccgtttcagcccccctcctgtgggaggacagggcaaagaatacccaagccctcccccttcccctctccggagaggccctcagtatcgggccagccctccagctgaaagtatgagtgtctatagatcccagtctggttcacccgtgcgctatcagcaggaaacaagcgtcagtcagcttcctggcagacccaaatctccattatccaaaatggcccagcggccctaccagatgcctcagctccctgtggcagttccccagcaagggctcaggctacagcctgccaaggcccagattgtgagaagtaaccagcccagcccagccgtccattcaagcaccgtcatccccacaggagcctatggccaagtagcccattcaatggccagtaaataccagtcttcacaaggagacataggagtcagccagagccggttggtttatcaagggtcaattgggggaatcgtaggggatggaaggccggtgcagcatgtccaagccagcctgagtgcaggcgccatctgtcagcatggaggattgaccaaagaggatcttccacagcgaccttcctcagcataccgaggtggcgtgagatacagccagacaccacagatcggacgcagccagtcagcatcctattacccagtctgtcactcaaaactagatctggagcgctcctccagccaactaggttcccctgatgtgtcgcatttaatcagaagacctatcagtgtcaaccctaacgaaatcaaaccgcacccgccaactcccaggccgttgctgcattcccaaagtgtaggccttcgcttctctccatctagcaatagtatctcctccacctccaacctaactccgaccttccggccatcttcttccatccagcaaatggagatcccactgaaacctgcatatgagaggtcatgtgacgagctgtcgccagtgtctccaactcaaggaggttaccccagtgagcccacccgatccaggaccacaccattcatggggatcatagataaaacagcacggactcagcagtacccccacctccaccagcagaatcggacctgggcagtgtcatctgtggacaccgtcctcagtcccacgtctccaggcaacctgcctcagcctgagtccttcagtccaccatcatccatcagcaacattgccttttataacaaaaccaacaatgcacagaatggccatttgctggaggacgattattacagcccccatgggatgctggctaacgggtctcgtggagacctcttggagcgagtcagccaggcctcctcctatcccgacgtgaaggtagctcggactctacctgtggctcaggcataccaggacaacctgtacaggcagctgtcccgagactctcggcaagggcagacatcccctatcaaaccaaagagaccgttcgtggagtctaatgtttaaaagacgttttgttggagtgagacccatatgttttcactgcacattttcaggcttggtttccacattcgaggtagttctctggcttaatttctcatgtagtttctgtgtggtgttcagaggtggcagcccacatgctgaaatcctttgcatgcagccgactgggaagcggcctcccgggagccaggacttcagtttctcttgtctgtgcccagccacatgctctctccctctcttcagatgccaacgaggagattttcgtgctgtgtgctttaacccagggagatcagacacactggtcagctttttccaggagacaatcgctttcactgatgttcttgttgtgtaattgtctttttccttttttaaaaaataaggtgttcttgttcgttttcttctagaaa

SEQ ID NO: 190667 - DNA, 11721 bp, Homo sapiens
  Payload ID: 17663
  Gene Name: tetratricopeptide repeat, ankyrin repeat and coiled-coil containing 2
  Uniprot ID: Q9HCD6
  ENST ID: ENST00000424789
  CDS Start-End: 5-5977
aaccatgtttcggaatagtctcaagatgctgcttactggtgggaaatcaagtcgtaaaaacaggtcaagtgatggagggagcgaggaaccaccggatcgaagacagtcaagtgtagactctcgccaaagccgctctgggcaaggtggcatctccacagaaagcgactgtgcttttgagccagactacgctgtcccgccacttccagtgagtgaaggtgatgctgaacaggagcttggcccccctccatctgtagatgaggcagcaaacacactcatgactcgtctgggtttcctccttggagagaaagtcacagaagttcagccaggtgaccaatacagcatggaagtacaggatgaaaatcagacctcagcaatcacccagcggataagtccttgttccactctgactagcagcactgcctctccaccagccagtagcccctgctctacactcccacccatcagtacaaatgcaactgccaaggactgcagctatggggctgttactagtccaacctctacccttgaaagcagagatagtggcatcattgctacattaacaagctattctgaaaatgtggaacgcacaaaatatgctggggaaagcagtaaagaattaggatctggaggaaacataaaaccttggcagtctcaaaaatccagcatggactcctgtttgtatcgagtagatgaaaacatgactgcttccacctatagtctgaataagatcccagagagaaatttggaaacagtgttatctcaatcagtacagtctattcctttgtatctcatgccacggccaaattcagtagcagccaccagctctgcccacttggaagaccttgcttacctggatgagcagagacatacacctttgagaacttctctacgaatgccaagacagagcatgggtggtgctcgcacacagcaggatttaagagttcgctttgcaccttataggcctccagatatctccttgaagcctctgctctttgaagtgcccagcatcactacagagtcagtgtttgttggccgagattgggttttccacgaaatagatgctcaacttcaaagttcaaatgccagcgtgaaccaaggagtagtgattgtgggaaacattggattcggcaaaactgccatcatctccagactggtggccctcagctgccatggtacaaggatgagacagatcgcctcagacagcccacatgcctcccccaaacatgtggatgccaacagagagctgccactcacacagccaccttcagcccactcatctatcaccagtggaagctgcccaggaactccggaaatgcgcaggcggcaggaggaggctatgcgaagactagcctcgcaggtggttgcctatcactattgtcaagcagataatgcctacacttgcttggtgccagaatttgtccacaatgttgctgccttgctctgccgctcacctcagctgacagcctatcgggagcagcttcttcgggaacctcacctgcagagcatgctgagccttcgttcctgtgttcaagaccccatggcctccttccggaggggagttctggagccactagaaaatctccataaagagagaaaaatcccagatgaagatttcatcattttaattgatggattaaatgaagcagaatttcacaaaccggattatggggatacaattgtatcgtttctgagtaaaatgatcggaaagtttccttcttggctcaaactaattgtaacagttaggaccagtttacaggaaattaccaagctgctgcctttccataggatttttttggatcgactagaagagaatgaagccatagaccaggacctgcaggcttacatcctgcaccggatacacagcagctcagagatccagaataacatttcacttaatggcaaaatggacaatactacatttggcaaactcagttctcatctcaagaccctcagtcaagggtcctatctatatctgaaacttacatttgacctcatagagaaaggctatctagtgttaaagagctctagctacaaagtagttcctgtttcgctctcagaggtttatttactccagtgcaatatgaagttcccaacccagtcttcctttgaccgggtgatgcctctcctgaatgtggcagtggcctctctccacccactgactgatgagcatatcttccaggccatcaatgctgggagcattgaaggcacactagaatgggaggattttcagcagagaatggagaacctctccatgttcctaatcaagcgcagagacatgactcgtatgtttgtacatccttcttttcgagaatggcttatctggagagaagaaggagagaaaaccaaatttctctgtgatccgaggagtggtcacacgttacttgccttctggttttcccgccaagagggaaaactaaaccgacagcagactattgaactgggacatcacatcctcaaagcacacatttttaagggtttgagtaaaaaagttggtgtatcatcctccatcctccaaggtctctggatctcttatagcacagaaggtctttccatggcactggcgtctttacgaaatctctacactccaaatataaaggtcagccgactgctgattttgggaggtgccaatattaattaccggacagaggttttaaataatgctccaattctatgtgttcagtcccatcttggttacacagaaatggtagccctgctgctggagttcggggccaacgtggatgcctcttctgaaagtggcctgactcccctgggatatgctgcagcagcagggtacctgagcattgtggtgctgctgtgcaagaaacgggccaaggtggatcatttggataagaacgggcagtgtgctttggttcatgctgcactccgaggtcatctggaggttgtcaagtttttgattcagtgtgactggacgatggccggccagcagcaaggagtatttaagaagagccatgccatccaacaggccctcattgctgcagccagcatgggttatactgagattgtctcctacctacttgatcttccagaaaaagatgaagaggaagtagagcgagcacagatcaacagctttgacagtctctggggagagacagccctaacagctgcagccggaaggggcaaactggaggtgtgccgtttgctcttggaacaaggggcggcagtggcccagccaaaccgccgaggagcagtgccactattcagcacagtgcgccagggccactggcagattgttgatcttttactcacccatggagctgatgtcaacatggcagacaagcagggccgcactcccctgatgatggctgcttccgaaggccatctaggaaccgtggactttctgcttgcacaaggtgcctccattgctcttatggacaaagaaggattgacagccctcagctgggcttgtttgaagggccatctctcagtagtacgttctctggtggataacggagctgccacagaccatgctgacaagaatggccgtaccccactggatctggcagctttctatggcgatgctgaggtggtccagttcctggtagatcatggggccatgatcgagcacgttgactacagtggaatgcgccctttggatagggcagtggggtgccggaacacttctgttgttgtcactcttctgaagaaaggagccaagataggtccagccacatgggcgatggccacctccaagccagacatcatgatcatcctgttgagcaagctgatggaagagggggacatgttttataagaaaggtaaagtaaaggaagctgcccagcgctaccagtacgccctgaagaagttccctagagaagggtttggtgaggacttgaaaactttccgggaactaaaggtgtctctcctcctcaacctctctcggtgtcgcaggaaaatgaacgattttggaatggcggaggaatttgctactaaggccctggagctgaaaccgaaatcttatgaagcttactatgcgagagcaagggcaaaacgcagcagcagacagttcgcagcagccttagaggacctgaacgaggccatcaagctgtgtcccaacaaccgtgagatccagagacttctgctgagagtggaagaagagtgtagacagatgcagcagccacagcagccaccgccgccaccgcagcctcagcagcagttgccggaagaagcagaacctgagccacagcatgaagacatatactctgtacaggatatattcgaggaggagtacctggaacaggatgttgaaaatgtttccattggcctccagacagaggcccggcccagccaggggctcccggtcatccagagcccaccctcctctcccccgcatcgggactcagcctacatctccagctcacctcttggctctcatcaggtttttgacttccggtccagtagttctgtaggctctcccactagacagacctatcagtccacctcacctgccctttctccaactcatcagaactcacattacaggcctagcccaccacacacttccccggctcatcagggaggatcttaccgtttcagcccccctcctgtgggaggacagggcaaagaatacccaagccctcccccttcccctctccggagaggccctcagtatcgggccagccctccagctgaaagtatgagtgtctatagatcccagtctggttcacccgtgcgctatcagcaggaaacaagcgtcagtcagcttcctggcagacccaaatctccattatccaaaatggcccagcggccctaccagatgcctcagctccctgtggcagttccccagcaagggctcaggctacagcctgccaaggcccagattgtgagaagtaaccagcccagcccagccgtccattcaagcaccgtcatccccacaggagcctatggccaagtagcccattcaatggccagtaaataccagtcttcacaaggagacataggagtcagccagagccggttggtttatcaagggtcaattgggggaatcgtaggggatggaaggccggtgcagcatgtccaagccagcctgagtgcaggcgccatctgtcagcatggaggattgaccaaagaggatcttccacagcgaccttcctcagcataccgaggtggcgtgagatacagccagacaccacagatcggacgcagccagtcagcatcctattacccagtctgtcactcaaaactagatctggagcgctcctccagccaactaggttcccctgatgtgtcgcatttaatcagaagacctatcagtgtcaaccctaacgaaatcaaaccgcacccgccaactcccaggccgttgctgcattcccaaagtgtaggccttcgcttctctccatctagcaatagtatctcctccacctccaacctaactccgaccttccggccatcttcttccatccagcaaatggagatcccactgaaacctgcatatgagaggtcatgtgacgagctgtcgccagtgtctccaactcaaggaggttaccccagtgagcccacccgatccaggaccacaccattcatggggatcatagataaaacagcacggactcagcagtacccccacctccaccagcagaatcggacctgggcagtgtcatctgtggacaccgtcctcagtcccacgtctccaggcaacctgcctcagcctgagtccttcagtccaccatcatccatcagcaacattgccttttataacaaaaccaacaatgcacagaatggccatttgctggaggacgattattacagcccccatgggatgctggctaacgggtctcgtggagacctcttggagcgagtcagccaggcctcctcctatcccgacgtgaaggtagctcggactctacctgtggctcaggcataccaggacaacctgtacaggcagctgtcccgagactctcggcaagggcagacatcccctatcaaaccaaagagaccgttcgtggagtctaatgtttaaaagacgttttgttggagtgagacccatatgttttcactgcacattttcaggcttggtttccacattcgaggtagttctctggcttaatttctcatgtagtttctgtgtggtgttcagaggtggcagcccacatgctgaaatcctttgcatgcagccgactgggaagcggcctcccgggagccaggacttcagtttctcttgtctgtgcccagccacatgctctctccctctcttcagatgccaacgaggagattttcgtgctgtgtgctttaacccagggagatcagacacactggtcagctttttccaggagacaatcgctttcactgatgttcttgttgtgtaattgtctttttccttttttaaaaaataaggtgttcttgttcgttttcttctagaaactttagaaagagtgcgatgcccctttgcctttgcatccttagccagtgtcacccacacagccagccgcagcgcattctcatgctgtggcccctccccagaccgccagcgccctgcagccaccaggtctgcagtgtgcattaggattattgctggtcttcctagggggtaaaaggatcagagagagaagaattaagtgctaaattggaagaaaaccccaatataattatgtaaaatgtcactacattgattttccaagaggcattgtaggaacatgtcaaaaacagccagccctttaaatattgcagtcagccaaggaaattagatgagaattgtggctattaagagaattcactgagagttattctctagatttttagccgacaattaaccactaaaagctgctgcttttccagggtgggggagggaatgaatacatagaaaaacaaaaaagattgttctggattctcagtgaaaggctataggaagtctgttctggagacatctactttttagatcctgatacatcactgagtgtcatactccactaaaaggaaactctaaccgaaggctggctggtgtgacaatcccgttagttggatcttcacctacagccagattttgttctagtggccctcttcctgtaaacccagatggtgtcatacagaaattgtttctttcagaagcagattggaatctcttgggaccatgagactgagtcccaatatttccacccagggtcatgcccgttgttgtctacttccattttgagatctatagtttgattatctattattacaggaactgtttcttttctttttctaggagtgtttatgagagtgtgatattttaaagtcagacgcagcaaaaactgtttcagggtgaagaaagacccctttcagccctgttttgcagccctgggtgggggcatgagatagacagcaagcttctgatcttgaagcttgtctagaagacacatcttctaggtctcgtggtcatttggtaggctgacctttgagtgagcgaggccactattgagtggatagcaagaacattggaaccaaagcctcggcacaggcctggcactggctgtacatcagctcttacaactaaacaactcaactaagcaactgaaacgaaacaaaggagcattcgttctctgttgttaggaatcattctgctctgttagggaagggctgcaggaagggcagtttcctgaataaaaatctggctgcgaccagtcccatgtgtctggtaagtaagtaagtaagtaagtgccctttgaagggatcattaagacacagggagcatgaacctgagatcagaagcatttctttactaatttagattctgcgaaatagacggacctctccacccccaaacctaaaacaggccaggacttgtctctgtgctgaaagcaaatagcaagactaactcaagccccagcctctttccacactccctgatacctaaggactgctttctcagctagaccagggtgggcatcagcgacgccttctcagctagaccagggtaggcatcagcgtcctctctccatctctatacccctctctctcacatcaggaagatgaaatgtgtagctctagcggcaacctctagccaggagcccagtggcctctcagattgctttttggccaggtctcagcactgctggcatctttacatcttactccttaaaaccgcctctcgctgaggagccactgcattttgaagaatttctcagtgtctgtcaggaaagtgctcctgctcatttggaacgccacacaccacccgcactcacctgtccaggcgaatgagcaggtcctgtagctttacaaatatgccgctgatgccgcttctccccagggtctctcagttttccaggacaaaaagatttagggcctataccctatgggcaaaacacctaaaatgtcaacagtcaaaatgccattctttttggccatcataagagggagtaggtatcactgctgcatgccagttgtttttgactagaatatgccaaccagagcttgttggggcaggagacgtttttccttacaagcagactgcctgtgccctgtgccctgtttgctacttcactgccatggaatgatccgagtactgtatttcagagctgccccttccccagcagcaaacactcgctgagtccatgtctggcttcaggtgggaggaaatgtttcagatgaaacttactcaattcataccaccctgaaatggaggacagaggtgacaaacttcagtttaataggtttctcaccaagttgtatgttccattggcccaggattcttgcactaatgggtttctatcacatcatgtctataaatgggtgcactttactgtttgaatttgtaactgaagtactggatatttaagtgtgagtaatgtcttcattagaaaatagcagaaccgctcttgtcttttagtgtatttttcaagaaaaaaggaaaggaaagacatcaagcagtggatcacaacatttatagcacaagaaataacttgtatataagcatcaaaaagattaagaattttttaatatgaaaaatatttgcagtgattttaaagtgcttttccagcaatgttcttagggactcctgagacacggttactttatctactggatcagtaaggcacacaattaacaattaacaattaatgtttatttacaaagtaaagggaaaacctgtgtaacatgagaatttggcatgacaaaatggagaccattttgtatctgctgttgtatcttgtccgggttgcagacgtgcactattaaagtcccaagttaatagagcacaaacccttctcgctcctcccccatgtgcccctctttttagatgtgtataacttaaactcgatggctcaggaaaattccactaattagaatcatgtacagtaccccaggtcgttgtccagatatacaagtttgctaatgtagttaagcctggattattaaacacttttcctaaattattgtaaacagaacagcttagagaaaggtattctcagtccttaatattgtatagtagtttatgagcccctctctaaatattggtatttttatattccagagatgtacccaatagaaaaaattaaaaattaatcagtatctaatttaatatccataagtatttttccttagattttagtcacgtacagtgggctatgtggatgtcacttgtgcttcaccatagtttaccactaggtgtcactgtggctctgcactgcgcttgttttgtagcaaagaacagcggcatcccctcgggagagaggagctgcttccagggcaacaggcaagcgggctcagaggttcaggagaaggcaacagaggcctggaaggggtcttcgtgcatctgtgccagttgtgcaagacgaactctttgaacactacatgctttggacttcagccaggcagaggctggaagaaggttgaccagagctcccttgctctggtagagggatgggtacatggagaagccccttcttccccatgagcctccctcctgtcagttcctctcagcctccagcttttataactccagaagcgtcacagttgggtggtttgattcagagagagttatttttctactgcagaaatgccttggacaaaaccagtgctcactgaatctttgccacaaaatggaataggctatcccagggggcaagaggtgcccgcccctgtgcccagcctcctcttgatgctcccagtgcccagcagcctcgcacaccctgcctgtctgttcctgggctgcccatttctcaagaaaccgacctgcaaaggcagccggctgctgcctccacaccgagggctgtgcggtcctgctgctcgctcactgggaggtgcagctctttctcctcttcctctaggaattccagaccgaccatctaccatgactaacaacaatgaacaaagggcttaggggcaagagctacctgcaaagacgtgtcatggaacccttcaccatgcaatgccttgaactcagctctggctgctcccaagaaaaggtggctggctgggggcctggacacaagcacaatggggctggtggagccactgtgcagagctacttgaataatcactgggttttcatcaactccttttgtcatacagaccactcaagggctgaagtgttggtaaccttcatttcggtgtccaaagcctcacagcaggtgagccaccctgagatgcttgtggccacatggtggccacagtcagagctttgaaagtcagtaccaaatgaacgcataattggacaccaaaaatcaagtgttactttcatgtttcctcaccccatcatctcattgcctcctgctgactctgataccgacgctgagctgacttgccaggctgccgctggacgcgtagagatcaggccagcgccgcgctcatttttccaggtagacctactctgtggaacggaagtgccctagctgctttgtttttgtagcacttgctggctgaatttttcttttgctaatcgctaaccagaaagtctggttagagggggctcaactcaatccctttggtccccagcgccagacaagagttaattctggaaaattcagtacttgaatgtacctgccttattgcataccaatttactggggggaaaaaaaaagttaagagatgccggctccagatctccacttcattcacaggtgattttggaaatcctgtaagttacacttcctgttctggttttgttttgttttttgtttcctttggctgattcctgctgagtgaggccagttcctcatcaggctcagggcaggtgccttttcaggcgtggcctcctttccatctagcacagcatctttgtctctgttctgtctcctccaaatccaagatgattttaattagtacagacatgtacagtctacaattaaagagtgatttgtactaatatgattttgattcttcctcctctttgctgtcctttcaagacacttgctggaaaaagctttaatgcacttagttttcctttaggttttctatgactcagatgtaaaggactttctctgtacagtatattatccaatgcatgtttgttctctctcctgatatattgaacaccacacagttgtgaagccgtgcagtggggatgccccacaccccacagaggcatctacccctgtgtataaggaaagacattttcctttgctgtacttgcttgagcagttttattgtctgtacatgtgagctgtgtgagatagatgtgaaaagttcaaatgaatgcattttcctgccccatgtatacagattgtcatctgtacaaggaactgtatgtatgaaagcaaatgtacttatttataaatggctaacacttgg

SEQ ID NO: 190668 - DNA, 7841 bp, Homo sapiens
  Payload ID: 17663
  Gene Name: tetratricopeptide repeat, ankyrin repeat and coiled-coil containing 2
  ENST ID: ENST00000583356
  CDS Start-End: 1-3764
atgctgaacaggagcttggcccccctccatctgtagatgaggcagcaaacacactcatgactcgtctgggtttcctccttggagagaaagtcacagaagttcagccaggtgaccaatacagcatggaagtacaggatgaaaatcagacctcagcaatcacccagcggataagtccttgttccactctgactagcagcactgcctctccaccagccagtagcccctgctctacactcccacccatcagtacaaatgcaactgccaaggactgcagctatggggctgttactagtccaacctctacccttgaaagcagagatagtggcatcattgctacattaacaagctattctgaaaatgtggaacgcacaaaatatgctggggaaagcagtaaagaattaggatctggaggaaacataaaaccttggcagtctcaaaaatccagcatggactcctgtttgtatcgagtagatgaaaacatgactgcttccacctatagtctgaataagatcccagagagaaatttggaaacagtgttatctcaatcagtacagtctattcctttgtatctcatgccacggccaaattcagtagcagccaccagctctgcccacttggaagaccttgcttacctggatgagcagagacatacacctttgagaacttctctacgaatgccaagacagagcatgggtggtgctcgcacacagcaggatttaagagttcgctttgcaccttataggcctccagatatctccttgaagcctctgctctttgaagtgcccagcatcactacagagtcagtgtttgttggccgagattgggttttccacgaaatagatgctcaacttcaaagttcaaatgccagcgtgaaccaaggagtagtgattgtgggaaacattggattcggcaaaactgccatcatctccagactggtggccctcagctgccatggtacaaggatgagacagatcgcctcagacagcccacatgcctcccccaaacatgtggatgccaacagagagctgccactcacacagccaccttcagcccactcatctatcaccagtggaagctgcccaggaactccggaaatgcgcaggcggcaggaggaggctatgcgaagactagcctcgcaggtggttgcctatcactattgtcaagcagataatgcctacacttgcttggtgccagaatttgtccacaatgttgctgccttgctctgccgctcacctcagctgacagcctatcgggagcagcttcttcgggaacctcacctgcagagcatgctgagccttcgttcctgtgttcaagaccccatggcctccttccggaggggagttctggagccactagaaaatctccataaagagagaaaaatcccagatgaagatttcatcattttaattgatggattaaatgaagcagaatttcacaaaccggattatggggatacaattgtatcgtttctgagtaaaatgatcggaaagtttccttcttggctcaaactaattgtaacagttaggaccagtttacaggaaattaccaagctgctgcctttccataggatttttttggatcgactagaagagaatgaagccatagaccaggacctgcaggcttacatcctgcaccggatacacagcagctcagagatccagaataacatttcacttaatggcaaaatggacaatactacatttggcaaactcagttctcatctcaagaccctcagtcaagggtcctatctatatctgaaacttacatttgacctcatagagaaaggctatctagtgttaaagagctctagctacaaagtagttcctgtttcgctctcagaggtttatttactccagtgcaatatgaagttcccaacccagtcttcctttgaccgggtgatgcctctcctgaatgtggcagtggcctctctccacccactgactgatgagcatatcttccaggccatcaatgctgggagcattgaaggcacactagaatgggaggattttcagcagagaatggagaacctctccatgttcctaatcaagcgcagagacatgactcgtatgtttgtacatccttcttttcgagaatggcttatctggagagaagaaggagagaaaaccaaatttctctgtgatccgaggagtggtcacacgttacttgccttctggttttcccgccaagagggaaaactaaaccgacagcagactattgaactgggacatcacatcctcaaagcacacatttttaagggtttgagtaaaaaagttggtgtatcatcctccatcctccaaggtctctggatctcttatagcacagaaggtctttccatggcactggcgtctttacgaaatctctacactccaaatataaaggtcagccgactgctgattttgggaggtgccaatattaattaccggacagaggttttaaataatgctccaattctatgtgttcagtcccatcttggttacacagaaatggtagccctgctgctggagttcggggccaacgtggatgcctcttctgaaagtggcctgactcccctgggatatgctgcagcagcagggtacctgagcattgtggtgctgctgtgcaagaaacgggccaaggtggatcatttggataagaacgggcagtgtgctttggttcatgctgcactccgaggtcatctggaggttgtcaagtttttgattcagtgtgactggacgatggccggccagcagcaaggagtatttaagaagagccatgccatccaacaggccctcattgctgcagccagcatgggttatactgagattgtctcctacctacttgatcttccagaaaaagatgaagaggaagtagagcgagcacagatcaacagctttgacagtctctggggagagacagccctaacagctgcagccggaaggggcaaactggaggtgtgccgtttgctcttggaacaaggggcggcagtggcccagccaaaccgccgaggagcagtgccactattcagcacagtgcgccagggccactggcagattgttgatcttttactcacccatggagctgatgtcaacatggcagacaagcagggccgcactcccctgatgatggctgcttccgaaggccatctaggaaccgtggactttctgcttgcacaaggtgcctccattgctcttatggacaaagaaggattgacagccctcagctgggcttgtttgaagggccatctctcagtagtacgttctctggtggataacggagctgccacagaccatgctgacaagaatggccgtaccccactggatctggcagctttctatggcgatgctgaggtggtccagttcctggtagatcatggggccatgatcgagcacgttgactacagtggaatgcgccctttggatagggcagtggggtgccggaacacttctgttgttgtcactcttctgaagaaaggagccaagataggtccagccacatgggcgatggccacctccaagccagacatcatgatcatcctgttgagcaagctgatggaagagggggacatgttttataagaaaggtaaagtaaaggaagctgcccagcgctaccagtacgccctgaagaagttccctagagaagggtttggtgaggacttgaaaactttccgggaactaaaggtgtctctcctcctcaacctctctcggtgtcgcaggaaaatgaacacagttcgcagcagccttagaggacctgaacgaggccatcaagctgtgtcccaacaaccgtgagatccagagacttctgctgagagtggaagaagagtgtagacagatgcagcagccacagcagccaccgccgccaccgcagcctcagcagcagttgccggaagaagcagaacctgagccacagcatgaagacatatactctgtacaggatatattcgaggaggagtacctggaacaggatgttgaaaatgtttccattggcctccagacagaggcccggcccagccaggggctcccggtcatccagagcccaccctcctctcccccgcatcgggactcagcctacatctccagctcacctcttggctctcatcaggtttttgacttccggtccagtagttctgtaggctctcccactagacagacctatcagtccacctcacctgccctttctccaactcatcagaactcacattacaggcctagcccaccacacacttccccggctcatcagggaggatcttaccgtttcagcccccctcctgtgggaggacagggcaaagaatacccaagccctcccccttcccctctccggagaggccctcagtatcgggccagccctccagctgaaagtatgagtgtctatagatcccagtctggttcacccgtgcgctatcagcaggaaacaagcgtcagtcagcttcctggcagacccaaatctccattatccaaaatggcccagcggccctaccagatgcctcagctccctgtggcagttccccagcaagggctcaggctacagcctgccaaggcccagattgtgagaagtaaccagcccagcccagccgtccattcaagcaccgtcatccccacaggagcctatggccaagtagcccattcaatggccagtaaataccagtcttcacaaggagacataggagtcagccagagccggttggtttatcaagggtcaattgggggaatcgtaggggatggaaggccggtgcagcatgtccaagccagcctgagtgcaggcgccatctgtcagcatggaggattgaccaaagaggatcttccacagcgaccttcctcagcataccgaggtggcgtgagatacagccagacaccacagatcggacgcagccagtcagcatcctattacccagtctgtcactcaaaactagatctggagcgctcctccagccaactaggttcccctgatgtgtcgcatttaatcagaagacctatcagtgtcaaccctaacgaaatcaaaccgcacccgccaactcccaggccgttgctgcattcccaaagtgtaggccttcgcttctctccatctagcaatagtatctcctccacctccaacctaactccgaccttccggccatcttcttccatccagcaaatggagatcccactgaaacctgcatatgagaggtcatgtgacgagctgtcgccagtgtctccaactcaaggaggttaccccagtgagcccacccgatccaggaccacaccattcatggggatcatagataaaacagcacggactcagcagtacccccacctccaccagcagaatcggacctgggcagtgtcatctgtggacaccgtcctcagtcccacgtctccaggcaacctgcctcagcctgagtccttcagtccaccatcatccatcagcaacattgccttttataacaaaaccaacaatgcacagaatggccatttgctggaggacgattattacagcccccatgggatgctggctaacgggtctcgtggagacctcttggagcgagtcagccaggcctcctcctatcccgacgtgaaggtagctcggactctacctgtggctcaggcataccaggacaacctgtacaggcagctgtcccgagactctcggcaagggcagacatcccctatcaaaccaaagagaccgttcgtggagtctaatgtttaaaagacgttttgttggagtgagacccatatgttttcactgcacattttcaggcttggtttccacattcgaggtagttctctggcttaatttctcatgtagtttctgtgtggtgttcagaggtggcagcccacatgctgaaatcctttgcatgcagccgactgggaagcggcctcccgggagccaggacttcagtttctcttgtctgtgcccagccacatgctctctccctctcttcagatgccaacgaggagattttcgtgctgtgtgctttaacccagggagatcagacacactggtcagctttttccaggagacaatcgctttcactgatgttcttgttgtgtaattgtctttttccttttttaaaaaataaggtgttcttgttcgttttcttctagaaactttagaaagagtgcgatgcccctttgcctttgcatccttagccagtgtcacccacacagccagccgcagcgcattctcatgctgtggcccctccccagaccgccagcgccctgcagccaccaggtctgcagtgtgcattaggattattgctggtcttcctagggggtaaaaggatcagagagagaagaattaagtgctaaattggaagaaaaccccaatataattatgtaaaatgtcactacattgattttccaagaggcattgtaggaacatgtcaaaaacagccagccctttaaatattgcagtcagccaaggaaattagatgagaattgtggctattaagagaattcactgagagttattctctagatttttagccgacaattaaccactaaaagctgctgcttttccagggtgggggagggaatgaatacatagaaaaacaaaaaagattgttctggattctcagtgaaaggctataggaagtctgttctggagacatctactttttagatcctgatacatcactgagtgtcatactccactaaaaggaaactctaaccgaaggctggctggtgtgacaatcccgttagttggatcttcacctacagccagattttgttctagtggccctcttcctgtaaacccagatggtgtcatacagaaattgtttctttcagaagcagattggaatctcttgggaccatgagactgagtcccaatatttccacccagggtcatgcccgttgttgtctacttccattttgagatctatagtttgattatctattattacaggaactgtttcttttctttttctaggagtgtttatgagagtgtgatattttaaagtcagacgcagcaaaaactgtttcagggtgaagaaagacccctttcagccctgttttgcagccctgggtgggggcatgagatagacagcaagcttctgatcttgaagcttgtctagaagacacatcttctaggtctcgtggtcatttggtaggctgacctttgagtgagcgaggccactattgagtggatagcaagaacattggaaccaaagcctcggcacaggcctggcactggctgtacatcagctcttacaactaaacaactcaactaagcaactgaaacgaaacaaaggagcattcgttctctgttgttaggaatcattctgctctgttagggaagggctgcaggaagggcagtttcctgaataaaaatctggctgcgaccagtcccatgtgtctggtaagtaagtaagtaagtaagtgccctttgaagggatcattaagacacagggagcatgaacctgagatcagaagcatttctttactaatttagattctgcgaaatagacggacctctccacccccaaacctaaaacaggccaggacttgtctctgtgctgaaagcaaatagcaagactaactcaagccccagcctctttccacactccctgatacctaaggactgctttctcagctagaccagggtgggcatcagcgacgccttctcagctagaccagggtaggcatcagcgtcctctctccatctctatacccctctctctcacatcaggaagatgaaatgtgtagctctagcggcaacctctagccaggagcccagtggcctctcagattgctttttggccaggtctcagcactgctggcatctttacatcttactccttaaaaccgcctctcgctgaggagccactgcattttgaagaatttctcagtgtctgtcaggaaagtgctcctgctcatttggaacgccac

SEQ ID NO: 190669 - DNA, 456 bp, Homo sapiens
  Payload ID: 17663
  Gene Name: tetratricopeptide repeat, ankyrin repeat and coiled-coil containing 2
  ENST ID: ENST00000580068
  CDS Start-End: 1-456
ggagggagcgaggaaccaccggatcgaagacagtcaagtgtagactctcgccaaagccgctctgggcaaggtggcatctccacagaaagcgactgtgcttttgagccagactacgctgtcccgccacttccagtgagtgaaggtatgcagcacattcggattatggagggcatgtctcgctctcttccatcctcccccttactcacacatcagtctatcagtgttcggctccagcctgtgaagaagttaactgcccctctgaggaaggcaaagtttgttgagagcccacgaattccagaatccgagcttggctcaccaaccctcacttcagctcagaaactggacgtggatgcatactgccctggtgatgctgaacaggagcttggcccccctccatctgtagatgaggcagcaaacacactcatgactcgtctgggtttcctccttggagagaaa

SEQ ID NO: 190670 - DNA, 331 bp, Homo sapiens
  Payload ID: 17663
  Gene Name: tetratricopeptide repeat, ankyrin repeat and coiled-coil containing 2
  ENST ID: ENST00000580466
  CDS Start-End: 1-331
accaccggatcgaagacagtcaagtgtagactctcgccaaagccgctctgggcaaggtggcatctccacagaaagcgactgtgcttttgagccagactacgctgtcccgccacttccagtgagtgaaggtatgcagcacattcggattatggagggcatgtctcgctctcttccatcctcccccttactcacacatcagtctatcagtgttcggctccagcctgtgaagaagttaactggtgatgctgaacaggagcttggcccccctccatctgtagatgaggcagcaaacacactcatgactcgtctgggtttcctccttggagagaaa

SEQ ID NO: 190671 - DNA, 652 bp, Homo sapiens
  Payload ID: 17663
  Gene Name: tetratricopeptide repeat, ankyrin repeat and coiled-coil containing 2
  ENST ID: ENST00000583016
  CDS Start-End: 1-408
gtggatcatttggataagaacgggcagtgtgctttggttcatgctgcactccgaggtcatctggaggttgtcaagtttttgattcagtgtgactggacgatggccggccagcagcaaggagtatttaagaagagccatgccatccaacaggccctcattgctgcagccagcatgggttatactgagattgtctcctacctacttgatcttccagaaaaagatgaagaggaagtagagcgagcacagatcaacagctttgacagtctctggggagagacaggtacctctcatggacgttgccctcaagaatgtgttgtgtttgtgtggactctcgaatctcacccccttattttttccctggcatacatttggcagtcttctgtctcaggcttttgtaatgcagactgattcagccaaactaaacagtcaagcagttttcctctttcaatcctctttgcctgtggattctccatactctttgcaccagagtcttctttcaaacaaaactttttccctctcttgtttccaaatatttttaaaagactgaaagttaccttacaatgtgccaaaccagagcagaaaattattgtggcctgtctcctttttatgtgatccttgtagtagttaggaataaatatttctcccatcaaaa

SEQ ID NO: 190672 - DNA, 3792 bp, Homo sapiens
  Payload ID: 17663
  Gene Name: tetratricopeptide repeat, ankyrin repeat and coiled-coil containing 2
  ENST ID: ENST00000613171
  CDS Start-End: 95-3397
gctgattttgggaggtgccaatattaattaccggacagaggttttaaataatgctccaattctatgtgttcagtcccatcttggttacacagaaatggtagccctgctgctggagttcggggccaacgtggatgcctcttctgaaagtggcctgactcccctgggatatgctgcagcagcagggtacctgagcattgtggtgctgctgtgcaagaaacgggccaaggtggatcatttggataagaacgggcagtgtgctttggttcatgctgcactccgaggtcatctggaggttgtcaagtttttgattcagtgtgactggacgatggccggccagcagcaaggagtatttaagaagagccatgccatccaacaggccctcattgctgcagccagcatgggttatactgagattgtctcctacctacttgatcttccagaaaaagatgaagaggaagtagagcgagcacagatcaacagctttgacagtctctggggagagacagccctaacagctgcagccggaaggggcaaactggaggtgtgccgtttgctcttggaacaaggggcggcagtggcccagccaaaccgccgaggagcagtgccactattcagcacagtgcgccagggccactggcagattgttgatcttttactcacccatggagctgatgtcaacatggcagacaagcagggccgcactcccctgatgatggctgcttccgaaggccatctaggaaccgtggactttctgcttgcacaaggtgcctccattgctcttatggacaaagaaggattgacagccctcagctgggcttgtttgaagggccatctctcagtagtacgttctctggtggataacggagctgccacagaccatgctgacaagaatggccgtaccccactggatctggcagctttctatggcgatgctgaggtggtccagttcctggtagatcatggggccatgatcgagcacgttgactacagtggaatgcgccctttggatagggcagtggggtgccggaacacttctgttgttgtcactcttctgaagaaaagccaagataggttgtcagacgttccgagtcgcccacgaggtccagccacatgggcgatggccacctccaagccagacatcatgatcatcctgttgagcaagctgatggaagagggggacatgttttataagaaaggtaaagtaaaggaagctgcccagcgctaccagtacgccctgaagaagttccctagagaagggtttggtgaggacttgaaaactttccgggaactaaaggtgtctctcctcctcaacctctctcggtgtcgcaggaaaatgaacgattttggaatggcggaggaatttgctactaaggccctggagctgaaaccgaaatcttatgaagcttactatgcgagagcaagggcaaaacgcagcagcagacagttcgcagcagccttagaggacctgaacgaggccatcaagctgtgtcccaacaaccgtgagatccagagacttctgctgagagtggaagaagagtgtagacagatgcagcagccacagcagccaccgccgccaccgcagcctcagcagcagttgccggaagaagcagaacctgagccacagcatgaagacatatactctgtacaggatatattcgaggaggagtacctggaacaggatgttgaaaatgtttccattggcctccagacagaggcccggcccagccaggggctcccggtcatccagagcccaccctcctctcccccgcatcgggactcagcctacatctccagctcacctcttggctctcatcaggtttttgacttccggtccagtagttctgtaggctctcccactagacagacctatcagtccacctcacctgccctttctccaactcatcagaactcacattacaggcctagcccaccacacacttccccggctcatcagggaggatcttaccgtttcagcccccctcctgtgggaggacagggcaaagaatacccaagccctcccccttcccctctccggagaggccctcagtatcgggccagccctccagctgaaagtatgagtgtctatagatcccagtctggttcacccgtgcgctatcagcaggaaacaagcgtcagtcagcttcctggcagacccaaatctccattatccaaaatggcccagcggccctaccagatgcctcagctccctgtggcagttccccagcaagggctcaggctacagcctgccaaggcccagattgtgagaagtaaccagcccagcccagccgtccattcaagcaccgtcatccccacaggagcctatggccaagtagcccattcaatggccagtaaataccagtcttcacaaggagacataggagtcagccagagccggttggtttatcaagggtcaattgggggaatcgtaggggatggaaggccggtgcagcatgtccaagccagcctgagtgcaggcgccatctgtcagcatggaggattgaccaaagaggatcttccacagcgaccttcctcagcataccgaggtggcgtgagatacagccagacaccacagatcggacgcagccagtcagcatcctattacccagtctgtcactcaaaactagatctggagcgctcctccagccaactaggttcccctgatgtgtcgcatttaatcagaagacctatcagtgtcaaccctaacgaaatcaaaccgcacccgccaactcccaggccgttgctgcattcccaaagtgtaggccttcgcttctctccatctagcaatagtatctcctccacctccaacctaactccgaccttccggccatcttcttccatccagcaaatggagatcccactgaaacctgcatatgagaggtcatgtgacgagctgtcgccagtgtctccaactcaaggaggttaccccagtgagcccacccgatccaggaccacaccattcatggggatcatagataaaacagcacggactcagcagtacccccacctccaccagcagaatcggacctgggcagtgtcatctgtggacaccgtcctcagtcccacgtctccaggcaacctgcctcagcctgagtccttcagtccaccatcatccatcagcaacattgccttttataacaaaaccaacaatgcacagaatggccatttgctggaggacgattattacagcccccatgggatgctggctaacgggtctcgtggagacctcttggagcgagtcagccaggcctcctcctatcccgacgtgaaggtagctcggactctacctgtggctcaggcataccaggacaacctgtacaggcagctgtcccgagactctcggcaagggcagacatcccctatcaaaccaaagagaccgttcgtggagtctaatgtttaaaagacgttttgttggagtgagacccatatgttttcactgcacattttcaggcttggtttccacattcgaggtagttctctggcttaatttctcatgtagtttctgtgtggtgttcagaggtggcagcccacatgctgaaatcctttgcatgcagccgactgggaagcggcctcccgggagccaggacttcagtttctcttgtctgtgcccagccacatgctctctccctctcttcagatgccaacgaggagattttcgtgctgtgtgctttaacccagggagatcagacacactggtcagctttttccaggagacaatcgctttcactgatgttcttgttgtgtaattgtctttttccttttttaaaaaataaggtgttcttgttcgttttcttc

SEQ ID NO: 190673 - DNA, 5095 bp, Homo sapiens
  Payload ID: 17664
  Gene Name: TEX13 family member C
  ENST ID: ENST00000632600
  CDS Start-End: 1-2982
atggcgatgaactttggggaccatgccagcgggttccgccatgatgatgtgatcaggttcatcaacaatgaagtcctcaggaacggcggcagcccagccttttacacggccttccgctcgcggccgtggaacgaggtagaggaccggcttcgggccattgtggccgacccgcgggtgccccgtgccattaagagggcctgtacctggagcgctttggcgctgagtgtgcaagtggctgcgaggcagcaggaggagctgctgtaccaggtttggtggctgcaagggcatgtggaggagtgccaggcgacctcctgggctctaacttcccagctgcagcagctgcgcctggagcatgaggaggtggcaacacagctgcacctcacgcaggccgccctgcagcaggtgctgaatgagcgtgatgggttatgcgggaggctgctagaagttgagagatccatgcaggtctatccgatgcctcaggattttgtacccggtccagaagccggccagtatgggcctgtggccgggactttaaatgcagaacagagtgaggcggtggccacagaggcacagggaatgccacattcggaagcccaggtagcagccccaacagctgtgtattacatgcctgaaccccagagtggcagggtccagggcatgcaacctcttctgctaatgcaggcacctcatccagtcccattccatatgccttcaccaatgggactgccatactcaacacctctaccacccccagtagtaatggaatcagcagcagcaattgcaccacagatgcctcctgcagggatctatccacctggtctttgggccacagtgggatcccaggaggagacggcccctccgtgggaccagaagtgccatggccaggatggatatcctgagaatttccagggagtatatcacccaggagataacagaagctgcaaccaaaaggaaggttctgagtgtccccaaggaatgacttcccaaggggacagcagcagccacagcctgaagaaagatccagtgatgcaagagggcacagctcccccagagtttagcaggagccacagcctggagaaaaaaccagtgatgcccaaggagatggtccccctaggggacagcaacagccacagcctgaagaaagatccagttgtgcccaaggagattgtccccataggggacagcaacagccacagcctgacgaaaaatccagttgtgcacaaggagatggtctccctgggggacagcaacagccacagcatgaagaaagatccagtgatgccccagaagatggtccccctgggggacagcaacagccacagtctgaagaaagatccaatgatgtgccaggagatggtccccctgggggacagcaacagccatagcctgaagaaagatccagtggtggcccagggcacagctcccctgatgtatagcaggaggcacagccagaagaaagtgccaatgatgcccaaggagatggtccccctgggggaaagccacagccacagcctgaagaaagatctagttgtgcccaaggagctggtccccctgggggacagcaagagtcacaggatgaagaaagatccagtgatgccccagaagatggtccccctgggggacagcagaagccacagcctgaagaaagatccagtgatgccccagaacatgatccccctggaggacagcaacagccacagcctgaagaaagatccagtgatgccccagaacatgatccccctggaggacagcaacagccacagtctgaagaaagatccaatgatgcaccaggagatggtccccctgggggacagcaacagccatagcctgaagaaagatccagtggtgccccaggacacagctcccctgatgtttagcaggagacacagcctgaagaaagtgccagtgatgcccaaggagatggtccccctgggggacagccacagcctgaagaaagatccagtgatgccccagaacatggtccccctggaggacagcaacagccatagcctgaagaaagatccagtggtgccccagggcacagctcccctgatgtttagcaggagacacagcctgaagaaagtgccagtgatgcccaaggagatggtccccctgggggacagcaacagccatagcctgaagaaagatccagtggtgccccagggcacagctcccctgatgtttagcaggagacacagcctgaagaaagtgccagtgatgcccaaggagatggtccccctgggggacagccacagcctgaagaaagatccagtgatgccccagaacatggtccccctggaggacagcaacagccatagcctgaagaaagatccagtggtgccccagggcacagctcccctgacgtttagcaggagacacagcctgaagaaagtgccagtggtgccccaggggacagcctccctggggttcagcagaatccacagcctgaagaaagagttagtgatgcccgaggagatggtccccctgggggacagcaacagccacagcatgaagaaagatctagtgatgcccaaggagatggtccccctaggggacagcaacagtcacagcctgaagaaagatccagtggtgcaccaggaggtggtctccttgggggacagcaacagccacagcctgaagaaacatccagtgattccccagggcacagcctcactgaggtttagcaagagccacagccagaaggaagatcaggagaggccccaggtaacccctctggaggatagcaagagccatggtgtgaaaaatagcccatggaaacaccagcctcaggggcagaaggtcaaggaacaaaaaaggaaaaaggcctcagaatcccagcaacagaagcctgcctcatgctccagcccagtgaattgggcctgcccatggtgtaatgccatgaattttccacggaacaaggtgtgctctaaatgcaagagagtccgtatgccagttgagaatggcagcgttgacccagcgtaaactcattgatttcaggaaggtaagtaagatggaagcactccaaagagaaaccaatttcccaggacccccttctgataaaaaagtaacttatttacttaacagaaaatttgaaaccaaaattgtagagaaaattagataaaataatccattatcctattacccaaattaagtactttttatcattgtgagtatacatacacacaaatacgtatgtatttattttcttattttattcatttatttgaataaagagagactacttctgagtataacactcagtctttaattaggggatttctcctaattgctgtcaactttttcaggtagtagattgtggttggctgatactaattggttgacaccctggagaagctgaagttatagttataaagcctgttttaaatcaaccattttctgttttttttttttctcttaacctccttttcctgaaaatgccatgtatttggctgggagcagccatgtgattttagagttccaggctatattgtattctagaaacactgcttttccttgcaagtgctatcattccttttgaaattactgcagtgttgatttttgcttatttttgttttattagttttacaggtgaagtcctgtttttgtgtcttagctccaccaaacttgcttgtttctgaagaagctgaacctgtgacattagaagatctgccaaagccacaagaagtaacacctcaattctgatggacccacacctcactgagaccccaactggctgcagtcaagaagagtgaaaggaagtcagggaagaagagatcatttgacactcattagggggaaaagggagaacaaaattgtttttgtagagttgaattttttcattggtatgggaattaacttagaaaagtttggggagttgtagtgttaaattctatagatggtagcaactttgatgaatttcacttaattcattaaatgagaagtttagggaaagagtttagggggttgtagtgttaaattctatagctgatagcaactttaattaatttcatttaattcattaaagaaatagttattgcctagtatgttttgggagctagacttgtatgttattatctagtacacacagcataatcttttattgtgaattcggttagaagataggaaagagcataatttggcatacacattagatcagggatgtattctttgccttgcatatagcgtgaccttggataaaaccaattgaagtaacatccagatccatttctgtggttctggggccaatgcgaaagagactttcatgaaaggttttttgttttgtttttgttttttttaattttttggagaaatgaggtctcattttgtcgcccaggctggagtgcagtggcatgatcatcatagctcactgcagcctcaaactcctgggctcaagtgatcctctgcctcagcctcccgagtggctgtgagccaccatgcccagcccttatgaaaggtcttgagtaaccaaactgcttgtctcattggtctcaggtgagataaatgagcagtgacaaagtttgggaaagtgtcctcacaaaaatgcaggcagagcttttctgaattcctctgctgatttcctcctttgagaaggatagctattttcctggttgcccaccagcctgcctgaaagacctggggtgtcttgaagaaaaacagtgctttggggagtgttcactacacacgctagctttcagcctcaggctgcccccatcccaagtcccttttcagtcagcagtggatgaagaacaaaatggattccaaggacaaacattgggggcaccaggttatggatggtgtttctcttgggaggataaattgggttaaaaatagagctagactggggcaagcacttttgggaataccccaggacccccacctctccctctttggtgtgttctctgcaggcttacccaaggcaactgctgcaaggcaaggaaggagccagggtggagcccaggggtggttggttagatctgccttcaatccaagctaaagatgtccttgagtttcccaatgagatcccacccagctcaccaaaatcaatgtttgtcagggattttctgggcctaactagtaataaagaatgtgcatttga

SEQ ID NO: 190674 - DNA, 4203 bp, Homo sapiens
  Payload ID: 17665
  Gene Name: TEX13 family member D
  ENST ID: ENST00000632372
  CDS Start-End: 259-2403
agcttttctctgtgacatgtcgcggagtcgccggtagggttcggtgtggcgagggggacctgcttctctctttgtgagaaccagggagtgagggaggaaggaggccaaggaggaggccaggactgagcaaggactaaagtaagactgaaaggggaggtgaggggtggactggttgtcggcagcagccggtaccggaagtggcggcagcagctgaggcgacgcaccgtgaggcagctgcttgactaggccacagccgccatggcgatgaattttggggaccatgccagcggcttccgccacaatgatgtgatcaggttcattaacaatgaagtcctcatggacggcagcggcccagccttttacgtggccttccgctcgcggccgtggaacgaggtagaggacagccttcaggccattgtggccgactctcaggtgccgcgcgccatcaagagggcctgtacctggagcgctttggctttgagcgtgcgagtggccacgaggcagcgggaggagctgctgcaccacgttcggcggctgcaaaggcatgcggaggagcgccaggcgacctcctgggctctaacgtcccagctgcagcagctgcgcctggagcatgaggtggcggcaacacagctgcacctcgcgcaggctgccctgcagcaggcgctgaatgagcgtgatgggctgtacgggaggctgctccagatcgagaggtttccccaggccgctccactggcccatgaaataatgtctgggccgcaagcagagcagaatggggctgcggcatgtcccctggctacagagcagcagagcgatatggtggccatggggacacatgctaatgcccagatgccaaccccgacagatgttctttatgtgccaggacctctgagtccctgggcccagggcatgcaaccccctctgccagtgccacatccattcccacacccaccaccattcccaatgaaattcccatccttgccacctctaccacctgctgtagtcacgggggcagaagcagcagcagtcccacttcagatgcctcctactgagatccacccaccttgcccgtggcctgcagtgggcttccaggaggagatggcccctctgtggtaccagagaagctacatccaggaggaagattccaaaatccttcaggggtcattccccttaggagacagcagaagccacagccagggagaaggttcagagaggtcccaaagaatgcccctccccggggacagtgggtgccacaacccgctgtcagagagtccccaggggacagccccactggggagcagcggatgccactcccaggaagaaggtacagaaggaccccaggggatggatcccctggggaacagagagagacaaaatcagaaagaaggtccaaagagggcccggaggatgcacaccctggtgtttcgcaggagccacaaatcagaaggtccagaggggccccaggggacggtcccccagggagacagcagaagctacagccaggaaggatgttcagatagggcccaggagatggccaccctggtgtttatcaggaggtgcaaaccagaaggtccaaagaggccccagtggactgtccccctgggggacagcagaagtcatatcaaggaagaaggcccagaggggccccagaggattgtcctccagggagacaacaggagctatagccaggaaggaagcccagagagggcccaggggatggccaccctggtgtttagcaggagctgcaaaccagaagaaggtccagagaggccccaggacactcccctgggggacagcagaagtcatatcaaggaagaaggcccagaggggccccagaggattgtcctccagggagacaacaggagctatagccaggaaggaagcccagagagggcccaggggatggccaccctggtgtttagcaggagctgcaaaccagaagaaggtccagagaggccccaggacactcccctgggggacagcagaagtcatatcaaggaagaaggcccagaggggccccagaggattgtcctccagggagacaacagaagctatagccaggaaggaagccgagagagggcccaggggatggccaccctggtgtttagcaggagctgcaaaccagaagaaggtccagagaggccccagggcactcccctgggggacagcaggagccatggtgtcagagaaagcccaaagaaatggcaacctcagaggcagaaggccaagaaaccaaaagtgaataaagtctcgggatcccagcagcaggagaagcctgcctcatttccagttccagtgaattggaaatgcccatggtgtaaagccattaatttttcatggcgtacggcctgctataaatgcaagaaagcctgtgtgccatttgagagtggaggacaaactcagtgatttcaggaaggtaagtaagaatggacacacttcaaagagaaagcaatttcctaagaccctcttctgattaaagtataacttatttacttcacagaaaaattgaaccccaaattatggagaaaattaaataaaataatttattatcccattacccaaattagccattttaaaagttgttttggatacacatacatacaaatatatatgcatttatattctcatgttattcatttacttgaacagagatggactacttttgatttctcctgattgcatttaaattttgcaggtggtggattctggatggccgatgctgattggttaataccctggagaagctgaagtcatgaagccttttcttttcctttttgtttcactccttttcctgaaaaagccatgtatgtggctgggagcagttgtgtgattttagagttagaagatatgttgaattttaggaacagtacttttccttgaaaatgctgttattcctttggaaacaaattttagaatcaccacacttccttgaaaatgctattattccttttgaaactactgcaatcttcatgttttcttcattttgctttgttggttttataggtgaggttctgtttttgtatctcagccccaccaaacttgcttgttgctgaagaagctgaacctgttccattagaagatcttccaaagccaaaagaaagtgagactgactgcagacttactggctgcagcagagaggagtaagaggaagtcagagaagaagagatgatttgacactcattgggggaaaaggaagagcagaattgttttgttagaattgaatttttccactgggacaaggaattaacttggaagagtttggggggttgtgttcaattctgtagatggtagcaactttgatgaatttcgtttagtttgttaaatagttattgtctaatatgtgttaggagctagacttataggttattatttggtgcacacatcataatccttgttgctgagttggttagaagataggagagagcataatttgggatacaaattagatcaggggtatcttctttgccttgcatgtagtgttgccttaggtaaaaccaatttaaataacatctagatccatttttgcagttttgtgggcaatgtgaaagagacttgcatgaaaggtcttgagtaaccaaactgctagtctcattggtttgcaggtgagacaaataagcagtggcaaagttcaggaaagtggtcttacagaagtgcaggcagggcttttctgattgtctgctgatttcctcctttgagagggacagatattttcctggctgccagtaagcctgcctgaaagaccactggggtgtcttgaagaaagacagtgctctgaggagtattcactacacactccagccctcagcctcgggctgcccccattccaagtccctttctagtcaataggtggatgaagaacaaaatggatttcaaggacagacagacagacataagggctgtgggctatggatggtgtttctcttgagaggactaattgggttaaaaataaaactggacaggggcgagcactcttgggaatgcccctggacccttcctctttggcgtgttctctgcaggctcccccaaggcagctgctgcaaggcaaggagggatccagggtagagctcagggatggtgggttagatctgcctccagtccaagctaaagatgtcttcaagtttccctgtaagatcccgcccagctcaccaaaatcaacctttgtcaggggttttctgatcctaactagtaataaagagtgtgcactgg

SEQ ID NO: 190675 - DNA, 5337 bp, Homo sapiens
  Payload ID: 17666
  Gene Name: TGFB1-induced anti-apoptotic factor 1
  Uniprot ID: O95411
  ENST ID: ENST00000359450
  CDS Start-End: 4659-5006
ctgctgagtgacagcctccccctggctctcctgcctcccccagctcttctccctgtggggagggagatctagcagttaggccctttatgcccacacccccaccatggaagaagggcagagcctgactcattggaatcccattgttgccagtttctctggtgcgtggtgacattttagatcaccctgcttatgtgaagctgtttttggcatgctgccctcccagggcaagcttgctgcttcccaggaggtatgtcccccgagtgcagcccctggggcacagacatttgtctcccagatgcatgaactaacacacctgtcgcatgcttgtgctgtggagcggctggacacctaggctgactttgaatggattataccaaacggactgatgtaagaccttttaaggaatggagcaagtggaatggctcagccctgctctgtcacttcccccatgcagcagatggttactgggtgctctgggaggaacaggaagcatctctgttgtaccaaggaaccagtgttggctccatagtaagacaagagtcagccgagcatggttattcacacctgtaatcccagcactttgggaggctgaggcagacagatcacctgaggttaggagttgagaccagcctggccaagatggtgaaaccccgtctctactaaaaatacaaaaattagctgggcgtggtggcgcatgcctatagtcccagctacttgggaggcagaggcaggagaatcgcttgaacccgggaggctcggaggttgcaatgaaccgagatcgcaccactgcactccagcctgggctacagagcgagactccatctcaaaaaatatatatatatatgagtcaatatttgatcaggcatctcagccttcctcttagcagccctgctaagtgccccacacccctagggcaggaagtcagctgatggacctgggagaggggtttggaaagcaaagagggccaggccttgttgcacactgcgcctctacccccagatggacatgggcctaaagctgggccatcccacactgactggcaactggcagatttcagaccccaatgccctcagcccaccatcacccttgaccccacaaccagcaataacaaaaagaccaaaagcctgtttcttccaccagccaccagcgcagttcctcttttccaccaggaaagctggagtagtcctgacgccatatataccacccgctccaaggaggattggattcactgttggtagagtggccatcaagccagaacctagccaaccaacacggagccagagggagaaggccaggggagggaggacctcagtggtgctcagcatcaactggctttggggtgggggcatgggatggagcagtcacttagcttcccatctggtgatgaggaccagcaagaatttgcaacaggaacgcagcttccatagcaaagtcaaggggaggggagctgccgccctgggcttgcctggcaggaattagcttatgtaccaaattgtttgtgacagtgctgagcaggagacgctggcttgtgaggaggaaggcttttttaaacaatttggttaaaatgttcaaattgccagctctgactcttgccctggagaggagggcagcggcctgctgttgactccctgatggctggagcagtggaagccactaagaatggctaaagatcacccaagctacgggcaagggcaatctcgtgggtccgcagcccaaggcagagagagacatggagtttaccacctccccggcagctcctgccactgcccagcgtcttgatgaaacagtatggaaacacggctgtcatttatccaggtgtctgcctagcaggtacaggaatgtgggcttggggactggagcccccaccttaaaaagaggtgaggcaatggaaaggaccagaggggccctgattcagcaatttacagtgccttggagctcgccagcagcacctcatttgcatctggattccagccctggcatctgcctcgccccgctctgctcacaaagtaaccccactgtctttccacaaagccaggcactccttagcctaacggcagatcctagccctgagtgcccagaaattctatgtaaagaatgagaaccaaaccaggctcccactaatttagaattcaaacaaccccaaagctaaaataaccccaatttttttctatattgcatagtcatcagtgagctttataattttgtcctagaaacccccccagagtccctaagtgcctttggcctatcaaagtaagactcatttatgttcagtctagtttgtgttaaatgtgttttgtgctatcctgattcctttaaaaatggtaattcattcatgagaaatacgataactattaaccagactgccccattcctgaaccattttgcataattgaacatgtattctatcagcctcttcctttcccccagggatagagaccgacctttctttacataacccctgggcacttgcccaagccagcaggagaattcaggtttggtcctttttttttttttttttttttaatctcaggtcaaccaatcgagtggcggggtgaagtcgtccaaagtctttgaggtctaagagtcccagattcaagtttacatactggctgtgtggccttggggaagatcctttcatctctttggactggcttcctcgtaatatttcatagggttattgtgaagagtaagatagcctatctcacatgcctaggccgtgtcttacacataggagtactcagtgaccaaatcttgccctctgcatctctcactgccaccttgggaaaagctaagaaggtggttcttgccgcagaacgctgactcctcctattttggtttggggatagaactttaaaagggctagtaaacaaaggtcccttttcagcttaagtcagaattataggcagcagggaacatggaactcctgcttgcccaagttggaactctaggatctggaggcagggctgcagctccagggaccacgccgagtgtggggcatcagtaggagaggagccacactgggctgtgttttctccaatggtgttgaaacgagagtgcacttgaactgacggaggcagtggaggcaggaggagtacgggaaaggtggccccaaggctttgggagaaagaaaagagaaggtgaatggagctgtgagatgaggtcccctcttccctgttcagtgctgtgatcctgctccatcagggggaagaggcctcttcacatctgggatagctggaggcctccagagccagaggcctgatgaagactctgagttatgttattgtaccaagaaaggggcttttccccttgggccatcctaaaacaggtcttcccagcctctccttcctgagcctccatttcttgttagtagatgatggcatggtcaaagctgaaaattctcacaggcctcagggagccatcattaggggaaagggttcagatctgggagtatttgacagggaaagcgcctcctcctcagaaggaatctttttaggaatcactcgcctaagagagcccctaccctagacaagttgtactcaccagacctccagtctccaagccaatgtggttcacggactgcctgcttcagagccttctggggaaggactgaaaatgcagaattactgggttgtacccaaaagccagcgattcaaggtttctaagaggaagggcccaggaacctgcatcagattcttatgcacgcttgagtccgagactcactgctctcagcatccctttcctcggagctttaaaagcttccagagtctccttcctcttagcattttgagtatcttctaagtaagccaaggaaggtttttacttaacaatgtttggcttttggggagtgctctgacgcagctttgtgggcctccagaaccaaaggcgtgcgtgcttaatggtaggagtgtcatttgtccctaaccttattcctcggtccctgcagccccaccagctactggaagtcccttgcccctgatcggtcagatgatgagcacgaccctctcgacaacacctccagaccgcgatactcccacagttatctgagtgacagcgacacagaggccaagctgacggagactaacgcatagcccaggggagtggttggcagccctctcaccccagggcctgtggctgcctgggcacctctcccaggaagtggtggggcaccggtctcccccacccgactgctgatctgcatgggaaacaccctgaccttcttctgtcaggggcactttccaggctatgggtgtctgatgtctccacgtggaagaggtgggggaaagaggagtttctgaagagaactttttgctcctctgtctcaaaatgccagactcttggcttctaccctgtgtcaccgtgggcagtggcaggtggcctggcactgcatggagccagcacgttgacctccctctcagctccctgctcagggacggtggacaggttgcctactgggacactctaggttgctgggtccatggggaggattgggggaggagaagcagtgccttccctctcgtgtggggtgggggctctctcttcttggtgcctgctgtctttctactttttaatttaaatacccaacctctccatcacagctgcatccctgagagtgggagggggctgtagtggtagctggggctcccaagaacgactcgggaatgtcatctccatcttcacccttcagagagcagtcctttctctgtgcagctggagacgctggtgaggagagccgggtccaggttcttaagaatgaggtgcggaggggctctccggtgctgctgggctgggttgagcaagcctacgcagacaagtgtgtgtgtggaccatccgcacctccagcccccaccccaccctctttgtctcagcgtgttatgtgcaatgacctatttaaggtaaacccattccaactacagcagttcagggctgatccaagcactgcctccctcctgctctgtccaggtggtctggaccataaactcaacttgagagggaaggcttggggttgaggacttgtgatcagaaaaactgaagatggaagttttggccggtgctcattagacatgagtcctcactctgtgtcctgagcccgtgtcattcttccaacctccctgcccccacacacttatcccagacacaacaccatgtggtctggaggtcccagcccccaccctaaaaaggttatccctgagaactccaccagacttgggagcccaagtgcagtgcctggtgctgctcccatctgccgccccccttctctcctgcaattggtttgtactcactgggctgtgctctcccctgtttacccgatgtatggaaataaaggcccttttcctcctg

SEQ ID NO: 190676 - DNA, 3237 bp, Homo sapiens
  Payload ID: 17667
  Gene Name: TGF-beta activated kinase 1/MAP3K7 binding protein 1
  Uniprot ID: Q15750
  ENST ID: ENST00000216160
  CDS Start-End: 63-1577
ctctagccgccccactcgctgctctgcggggaggcgggcgctcccgcaggggttcctccaagatggcggcgcagaggaggagcttgctgcagagtgagcagcagccaagctggacagatgacctgcctctctgccacctctctggggttggctcagcctccaaccgcagctactctgctgatggcaagggcactgagagccacccgccagaggacagctggctcaagttcaggagtgagaacaactgcttcctgtatggggtcttcaacggctatgatggcaaccgagtgaccaacttcgtggcccagcggctgtccgcagagctcctgctgggccagctgaatgccgagcacgccgaggccgatgtgcggcgtgtgctgctgcaggccttcgatgtggtggagaggagcttcctggagtccattgacgacgccttggctgagaaggcaagcctccagtcgcaattgccagagggagtccctcagcaccagctgcctcctcagtatcagaagatccttgagagactcaagacgttagagagggaaatttcgggaggggccatggccgttgtggcggtccttctcaacaacaagctctacgtcgccaatgtcggtacaaaccgtgcacttttatgcaaatcgacagtggatgggttgcaggtgacacagctgaacgtggaccacaccacagagaacgaggatgagctcttccgtctttcgcagctgggcttggatgctggaaagatcaagcaggtggggatcatctgtgggcaggagagcacccggcggatcggggattacaaggttaaatatggctacacggacattgaccttctcagcgctgccaagtccaaaccaatcatcgcagagccagaaatccatggggcacagccgctggatggggtgacgggcttcttggtgctgatgtcggaggggttgtacaaggccctagaggcagcccatgggcctgggcaggccaaccaggagattgctgcgatgattgacactgagtttgccaagcagacctccctggacgcagtggcccaggccgtcgtggaccgggtgaagcgcatccacagcgacaccttcgccagtggtggggagcgtgccaggttctgcccccggcacgaggacatgaccctgctagtgaggaactttggctacccgctgggcgaaatgagccagcccacaccgagcccagccccagctgcaggaggacgagtgtaccctgtgtctgtgccatactccagcgcccagagcaccagcaagaccagcgtgaccctctcccttgtcatgccctcccagggccagatggtcaacggggctcacagtgcttccaccctggacgaagccacccccaccctcaccaaccaaagcccgaccttaaccctgcagtccaccaacacgcacacgcagagcagcagctccagctctgacggaggcctcttccgctcccggcccgcccactcgctcccgcctggcgaggacggtcgtgttgagccctatgtggactttgctgagttttaccgcctctggagcgtggaccatggcgagcagagcgtggtgacagcaccgtagggcagccggagaatgcagcccaagcagggcctggcatggggcaggacagggtccagccttttcctaacatctgcctgtgccacaacggccagcaggtgccccatcctctgcccacagcagactctgtcccatggctctccgggcagtagagtgtgtgagtgcagactggacctgtggttcataccttgtcaccacccgggaagctgaaggccacttcctcccagatggcctcagccaggaccatcgccctttctcagagcagagggccaggtatagaaaccgcagtgggcctgcaagccgcccgagcctccccagcagcctcctacagagcaggaagaggcgccctgtgaaccctgagtgttgcaggcccagcagaccctgctgtcccaagcccacccctcctcccaccatcacctccctcacctcgggacagtagccctccacttctccagcctctcagccctgtgctcctgcatccagagtggaacccaggctggtgtccgcatctgtccctgggccccacccctggacctgccttggttgtgtcatctgttgtaaacgttcaggaggaccagggcagcatctggggcctgggatggccacagaaggggcaggccaggtggaaaggagccagggggaagtggtctaagagacctggaactgccagaggatggcggcctgggcttccccagagccaggcgtgcgggagaggtgaggactggccccggtgggctgaggcaggggccgctgtcgtcaggcctgagccagggtgagctggtgcctgccttgcattttccttctggtgctgtgaagaccataggctggcaggcagctgagatgaactgtctttaccactgatgaggggcctctgccggctgagggtagcaagcaggggttgtgagtcaggctgggggacttgtttgaaagaaagaggagtggaaaatggttccaggagggaagaggttctttgagacacagtaccctgggaggcataggagaagggtcgggccagcccagcccagggcctgagttagactatttcccacatgttctctgccttcagtggggagggggtgccaccagggctgtcggccaggattgccactcctgtttcagaggaagcaggccgagagacttgcaccttggccaagccacacaatcagtggggcagccagagctcagacctgagccattttgtcagtatccaggaccccccggattctccacgccctccccatctcccagtctccctgccccccatgccccagaccggcccaccagggactagccgctgtcgcacagcctctggggtgcttggtctctgcgaagtcaaaggcctgacagctctgtggcctgggaatccattttcctgcggcagagcagggcctggtgtggaaccagggagctgtgggaagccacagcagaaatggaagaaaaacaggtctcagcccagggtcctcgctcactccctcactccccactttgaagccatctctgttctgcaggtgagaggatttaaagtcagtcacaaaggcttgggaacaaaaggaattctcttccaagaatgcctctgtggtgctgtttggtctctagaaacagggtcacttttttaatgtagtaaagaagtaataaatggtggcattacacattgtgatattaa

SEQ ID NO: 190677 - DNA, 1660 bp, Homo sapiens
  Payload ID: 17667
  Gene Name: TGF-beta activated kinase 1/MAP3K7 binding protein 1
  Uniprot ID: Q15750
  ENST ID: ENST00000331454
  CDS Start-End: 20-1408
ccgcaggggttcctccaagatggcggcgcagaggaggagcttgctgcagagtgagcagcagccaagctggacagatgacctgcctctctgccacctctctggggttggctcagcctccaaccgcagctactctgctgatggcaagggcactgagagccacccgccagaggacagctggctcaagttcaggagtgagaacaactgcttcctgtatggggtcttcaacggctatgatggcaaccgagtgaccaacttcgtggcccagcggctgtccgcagagctcctgctgggccagctgaatgccgagcacgccgaggccgatgtgcggcgtgtgctgctgcaggccttcgatgtggtggagaggagcttcctggagtccattgacgacgccttggctgagaaggcaagcctccagtcgcaattgccagagggagtccctcagcaccagctgcctcctcagtatcagaagatccttgagagactcaagacgttagagagggaaatttcgggaggggccatggccgttgtggcggtccttctcaacaacaagctctacgtcgccaatgtcggtacaaaccgtgcacttttatgcaaatcgacagtggatgggttgcaggtgacacagctgaacgtggaccacaccacagagaacgaggatgagctcttccgtctttcgcagctgggcttggatgctggaaagatcaagcaggtggggatcatctgtgggcaggagagcacccggcggatcggggattacaaggttaaatatggctacacggacattgaccttctcagcgctgccaagtccaaaccaatcatcgcagagccagaaatccatggggcacagccgctggatggggtgacgggcttcttggtgctgatgtcggaggggttgtacaaggccctagaggcagcccatgggcctgggcaggccaaccaggagattgctgcgatgattgacactgagtttgccaagcagacctccctggacgcagtggcccaggccgtcgtggaccgggtgaagcgcatccacagcgacaccttcgccagtggtggggagcgtgccaggttctgcccccggcacgaggacatgaccctgctagtgaggaactttggctacccgctgggcgaaatgagccagcccacaccgagcccagccccagctgcaggaggacgagtgtaccctgtgtctgtgccatactccagcgcccagagcaccagcaagaccagcgtgaccctctcccttgtcatgccctcccagggccagatggtcaacggggctcacagtgcttccaccctggacgaagccacccccaccctcaccaaagacccttccaggcctgcaagcgatttgacagccatccctcagtgccaactaaacctcctgggcagcctgaccccagggtaggaaggaagcgcctacaccaaggggccctctgggagctgagatcatcctggggttttgtcgcctggtctgacttgtgcactgggatcttctcgtgccaggccaggccccgccccctccccgggactgggcagaccccctccctcatgcatctgtgtccactgaggcttccctcacctagaatggcccatccttcaggacccagctcactctcatcttctttccagggacttatcccccaaggctgtcctctgt

SEQ ID NO: 190678 - DNA, 4553 bp, Homo sapiens
  Payload ID: 17668
  Gene Name: TGF-beta activated kinase 1/MAP3K7 binding protein 2
  Uniprot ID: Q9NYJ8
  ENST ID: ENST00000367456
  CDS Start-End: 578-2659
gaaaagttttaggcagctaggaatgtggagatgtgggtagtggtggctgccaagcacaggaaaatgatcatgctgaactgtacaaaggagattgtctctgaaccttttcataggttctgacactctatatatgtcatcttatttaaaaccctctgtattaaaatgataaggatttggagacattgaaattatatagaatttaaatgtatgcatgttcatatgtttttgcctctggctcatatttccagaatacttaacagtattttaacattttgtttcttatgattctggtcctaaaaaatcaaggacgctgcttactcagaaagctaaaaaacctgagctccagacccagttcctggacctgccctggaaaagaagtatcccgtagagatgagctcactgcagttacttaattaacaatttgtaagctgcaaaaatggcaatgggccaaccaagaacagctacaatttgaatttttctatttccagaaaatgcttggacagaagagatgagtactatttccactaaggcctagaattgcctactgtacaaatagtcctgatcaggcaatatacgaatggcccaaggaagccaccaaattgattttcaggttttacatgacctgcgacaaaaattccctgaagtacctgaagttgttgtatccaggtgcatgttacagaataataataacctggatgcctgctgtgctgttctctctcaggagagtacaagatatctttatggtgaaggagacttgaatttttcagatgattctggaatttctggtctacgcaatcacatgacttctctcaacttggacttgcaatcacagaacatttaccaccatggaagagaaggaagtaggatgaatggaagtaggactctaacgcacagcattagtgatggacaacttcaaggtggccagtccaatagtgaactatttcagcaggagccacagacagcaccagctcaagttcctcaaggctttaatgtttttggaatgtccagttcctctggtgcttcaaattcagcaccacatcttggatttcacttaggcagcaaaggaacatctagcctttctcaacaaactcccagatttaatcccattatggtaactttagccccaaatatccagactggtcgtaatactcctacatctttgcacatacatggtgtacctccacctgtacttaacagtccacagggaaattctatctatattaggccttacattacaactcctggtggtacaactcgacagacacaacagcattctggctgggtatctcagtttaatcccatgaaccctcagcaagtttatcagccttcacagcctggtccctggactacttgtcctgcatctaatcctctgtcacatacctcatctcaacagccaaatcagcaaggccaccagacctctcatgtctacatgccaatcagttcacctactacttcacaaccaccaaccattcattcatctggtagctcacagtcttctgcccatagccaatataacattcagaatatttcaacaggacctcgaaaaaaccagattgaaatcaaacttgaacccccacaaagaaataattcttcaaaactgcgttcttctggacctcgaacctccagcacttcctcttcagtcaatagccagaccttaaacagaaatcagcccactgtttacatagctgccagccccccaaatacggatgagctgatgtcccgtagtcaacctaaggtctatatttcagcgaatgctgccacaggagatgaacaggtcatgcggaatcagcccacactcttcatatccacaaactctggagcatctgctgcctccaggaacatgtctgggcaagtgagcatgggtcctgcctttattcatcaccatcctcccaaaagtcgagcaataggcaataactctgcaacctctcctcgagtggtagtcactcagcccaatacgaaatacactttcaaaattacagtctctcccaataagccccctgcagtttcaccaggggtggtgtcccctacctttgaacttacaaatcttcttaatcatcctgatcattatgtagaaaccgagaatattcagcacctcacggaccctacattagcacatgtggatagaataagtgaaacacggaaactgagtatgggatctgatgatgctgcctacacacaagctcttttggtacaccagaaggccagaatggaacgacttcaaagagaacttgagattcaaaagaaaaagctggataaattaaaatctgaggttaatgaaatggaaaataatctaactcgaaggcgcctgaaaagatcaaattctatatcccagataccttcccttgaagaaatgcagcagctgagaagttgtaatagacaactccagattgacattgactgcttaaccaaagaaattgatctttttcaagcccgaggaccacattttaaccccagcgctattcataacttttatgacaatattggatttgtaggtcctgtgccaccaaaacccaaagatcaaaggtccatcatcaaaacaccaaagactcaagacacagaagatgatgagggagctcagtggaattgtaccgcctgtacttttttgaaccatccagccttaattcgctgtgaacagtgtgagatgccaaggcatttctgagccaaatggccctgtatcttctctaaaaccacatctaaagttcaagaaactagtctgtcatcgggaaaaagtttcactgctacataggattttgtcaaattgaaggtgtgacaagatggtgttctgctaatgttaaatgtcagcccacagagctaataatacctcagtataatgtcatgagcagttgaaattcatcacatgaaaagtaatctgctgaaagacttggttgcccactgcctaactgtgtacagtgttaccagtgtcccattatggataattctcaatatgttaacacctaggtgttcccaatacctttttcccctcatgtcactactgaattttgacaggaggaaggaatagaatgatagcttgttttatttgtaaagctttcagtgaaacactacatacacgaagaaaaggaacaaggtttaactatttaagaaccatttgctgccgcatagtgccattggatagggaagaacttcagaaatctgtggtactcttggccttgtctttgtcttccctgaacgtgtctccactctgtgaagccagcatctaggggctaaagatgcaaaggaaagcagcatgcattgtctgtacaaatgtgcagcgaaataccccaaagcttttcctactgtacagatctctcgagtctgctttaagtgatttcttttcttcttgattattttcttatatttctatatgtatagtgtaatagccttttgttaactaattttcttttttccttttagtaattaagcacgatcatgtccctttttaagccttacctgagaggaacaatgccttaaaataaaaaagcattaatgagatgaaagtatgcacagaataactttcctctacttattctgtactttgccctcatgagttccaatgttgtgtgaagacaggcagatgctgcacagtgaattgcagatgatattacagaagtgatgtctgtaggtcacattaaatactgacttgagcagtgggtgacacaacacagtgtttgtcttccacagggaagcttaaaacaaaagatatttttaacccactgacagaacaacaaggttaagcttcatctgcttggtgtcccacagaacttgcacaagcagttgttattgggaaagtacagtctcaaaaccagcaacagcagcagtacctacagccctttttttggagagaagtttaaatgctttactgttggggcagtccatttctaatcctgacttggtgacagtatcatgtgtatttataaaacaaggctagccatatttaggacaactgaagaaaagctggaaaaaaaaacaagcaaacttgaacactgaagcaacctcaagcatctctttattttgatgatatatttttgtaaggaaaatattcagatgatcaggaatgtatataactgaaatcaagaaaaagaacagtatgcatttaaaaagacagaattatgaaattatatgagtgcttagaatggggctaagggaagtgctgaaatagagcaaaggatggaagataatatagactaccacccactgtaaatgtttgcaagtggctgtgttttaaatgggattattacagttgatctctatgaatgtcagagccctaactttcaggctttgcattttgtatatgggaagaaatatgacaatcctaggtaattaaaccatagacccaaagcccttacgtttgatgcaatttatttttaaaataggccttgtttttcagcttcatctgcagttctatgtgaagattgataaatcagtttttacttgttttattaataaaacgtaatttggatatcttgagttgatggttttgtgatttagctgggtaaactatctttgtaacagataagttatttataaaaattaaaaaacttatattctaatgtgga

SEQ ID NO: 190679 - DNA, 4199 bp, Homo sapiens
  Payload ID: 17668
  Gene Name: TGF-beta activated kinase 1/MAP3K7 binding protein 2
  Uniprot ID: Q9NYJ8
  ENST ID: ENST00000470466
  CDS Start-End: 111-1721
tttgaatttttctatttccagaaaatgcttggacagaagagatgagtactatttccactaaggcctagaattgcctactgtacaaatagtcctgatcaggcaatatacgaatggcccaaggaagccaccaaattgattttcaggttttacatgacctgcgacaaaaattccctgaagtacctgaagttgttgtatccaggtgcatgttacagaataataataacctggatgcctgctgtgctgttctctctcaggagagtacaagatatctttatggtgaaggagacttgaatttttcagatgattctggaatttctggtctacgcaatcacatgacttctctcaacttggacttgcaatcacagaacatttaccaccatggaagagaaggaagtaggatgaatggaagtaggactctaacgcacagcattagtgatggacaacttcaaggtggccagtccaatagtgaactatttcagcaggagccacagacagcaccagctcaagttcctcaaggctttaatgtttttggaatgtccagttcctctggtgcttcaaattcagcaccacatcttggatttcacttaggcagcaaaggaacatctagcctttctcaacaaactcccagatttaatcccattatggtaactttagccccaaatatccagactggtcgtaatactcctacatctttgcacatacatggtgtacctccacctgtacttaacagtccacagggaaattctatctatattaggccttacattacaactcctggtggtacaactcgacagacacaacagcattctggctgggtatctcagtttaatcccatgaaccctcagcaagtttatcagccttcacagcctggtccctggactacttgtcctgcatctaatcctctgtcacatacctcatctcaacagccaaatcagcaaggccaccagacctctcatgtctacatgccaatcagttcacctactacttcacaaccaccaaccattcattcatctggtagctcacagtcttctgcccatagccaatataacattcagaatatttcaacaggacctcgaaaaaaccagattgaaatcaaacttgaacccccacaaagaaataattcttcaaaactgcgttcttctggacctcgaacctccagcacttcctcttcagtcaatagccagaccttaaacagaaatcagcccactgtttacatagctgccagccccccaaatacggatgagctgatgtcccgtagtcaacctaaggtctatatttcagcgaatgctgccacaggagatgaacaggtcatgcggaatcagcccacactcttcatatccacaaactctggagcatctgctgcctccaggaacatgtctgggcaagtgagcatgggtcctgcctttattcatcaccatcctcccaaaagtcgagcaataggcaataactctgcaacctctcctcgagtggtagtcactcagcccaatacgaaatacactttcaaaattacagtctctcccaataagccccctgcagtttcaccaggggtggtgtcccctacctttgaacttacaaatcttcttaatcatcctgatcattatgtagaaaccgagaatattcagcacctcacggaccctacattagcacatgtggatagaataagtgaaacacggaaactgagtatgggatctgatgatgctgcctacacacaagatatttgaagaataagtaattcttggctgggcatggtggctcacgcctgtaattccagtgctttgggaggccaagatgggaggatcatttgagcccaggagtttgagaccagctggggcaacatatggagactccgtctctacagaaggttttgaaattatgcaggcatggtggcacacacctgtagtcccagttactcagtagactgagctcttttggtacaccagaaggccagaatggaacgacttcaaagagaacttgagattcaaaagaaaaagctggataaattaaaatctgaggttaatgaaatggaaaataatctaactcgaaggcgcctgaaaagatcaaattctatatcccagataccttcccttgaagaaatgcagcagctgagaagttgtaatagacaactccagattgacattgactgcttaaccaaagaaattgatctttttcaagcccgaggaccacattttaaccccagcgctattcataacttttatgacaatattggatttgtaggtcctgtgccaccaaaacccaaagatcaaaggtccatcatcaaaacaccaaagactcaagacacagaagatgatgagggagctcagtggaattgtaccgcctgtacttttttgaaccatccagccttaattcgctgtgaacagtgtgagatgccaaggcatttctgagccaaatggccctgtatcttctctaaaaccacatctaaagttcaagaaactagtctgtcatcgggaaaaagtttcactgctacataggattttgtcaaattgaaggtgtgacaagatggtgttctgctaatgttaaatgtcagcccacagagctaataatacctcagtataatgtcatgagcagttgaaattcatcacatgaaaagtaatctgctgaaagacttggttgcccactgcctaactgtgtacagtgttaccagtgtcccattatggataattctcaatatgttaacacctaggtgttcccaatacctttttcccctcatgtcactactgaattttgacaggaggaaggaatagaatgatagcttgttttatttgtaaagctttcagtgaaacactacatacacgaagaaaaggaacaaggtttaactatttaagaaccatttgctgccgcatagtgccattggatagggaagaacttcagaaatctgtggtactcttggccttgtctttgtcttccctgaacgtgtctccactctgtgaagccagcatctaggggctaaagatgcaaaggaaagcagcatgcattgtctgtacaaatgtgcagcgaaataccccaaagcttttcctactgtacagatctctcgagtctgctttaagtgatttcttttcttcttgattattttcttatatttctatatgtatagtgtaatagccttttgttaactaattttcttttttccttttagtaattaagcacgatcatgtccctttttaagccttacctgagaggaacaatgccttaaaataaaaaagcattaatgagatgaaagtatgcacagaataactttcctctacttattctgtactttgccctcatgagttccaatgttgtgtgaagacaggcagatgctgcacagtgaattgcagatgatattacagaagtgatgtctgtaggtcacattaaatactgacttgagcagtgggtgacacaacacagtgtttgtcttccacagggaagcttaaaacaaaagatatttttaacccactgacagaacaacaaggttaagcttcatctgcttggtgtcccacagaacttgcacaagcagttgttattgggaaagtacagtctcaaaaccagcaacagcagcagtacctacagccctttttttggagagaagtttaaatgctttactgttggggcagtccatttctaatcctgacttggtgacagtatcatgtgtatttataaaacaaggctagccatatttaggacaactgaagaaaagctggaaaaaaaaacaagcaaacttgaacactgaagcaacctcaagcatctctttattttgatgatatatttttgtaaggaaaatattcagatgatcaggaatgtatataactgaaatcaagaaaaagaacagtatgcatttaaaaagacagaattatgaaattatatgagtgcttagaatggggctaagggaagtgctgaaatagagcaaaggatggaagataatatagactaccacccactgtaaatgtttgcaagtggctgtgttttaaatgggattattacagttgatctctatgaatgtcagagccctaactttcaggctttgcattttgtatatgggaagaaatatgacaatcctaggtaattaaaccatagacccaaagcccttacgtttgatgcaatttatttttaaaataggccttgtttttcagcttcatctgcagttctatgtgaagattgataaatcagtttttacttgttttattaataaaacgtaatttgga

SEQ ID NO: 190680 - DNA, 4240 bp, Homo sapiens
  Payload ID: 17668
  Gene Name: TGF-beta activated kinase 1/MAP3K7 binding protein 2
  Uniprot ID: Q9NYJ8
  ENST ID: ENST00000538427
  CDS Start-End: 267-2348
ttactctagtttctcttctgctttcaaggctccagacccagttcctggacctgccctggaaaagaagtatcccgtagagatgagctcactgcagttacttaattaacaatttgtaagctgcaaaaatggcaatgggccaaccaagaacagctacaatttgaatttttctatttccagaaaatgcttggacagaagagatgagtactatttccactaaggcctagaattgcctactgtacaaatagtcctgatcaggcaatatacgaatggcccaaggaagccaccaaattgattttcaggttttacatgacctgcgacaaaaattccctgaagtacctgaagttgttgtatccaggtgcatgttacagaataataataacctggatgcctgctgtgctgttctctctcaggagagtacaagatatctttatggtgaaggagacttgaatttttcagatgattctggaatttctggtctacgcaatcacatgacttctctcaacttggacttgcaatcacagaacatttaccaccatggaagagaaggaagtaggatgaatggaagtaggactctaacgcacagcattagtgatggacaacttcaaggtggccagtccaatagtgaactatttcagcaggagccacagacagcaccagctcaagttcctcaaggctttaatgtttttggaatgtccagttcctctggtgcttcaaattcagcaccacatcttggatttcacttaggcagcaaaggaacatctagcctttctcaacaaactcccagatttaatcccattatggtaactttagccccaaatatccagactggtcgtaatactcctacatctttgcacatacatggtgtacctccacctgtacttaacagtccacagggaaattctatctatattaggccttacattacaactcctggtggtacaactcgacagacacaacagcattctggctgggtatctcagtttaatcccatgaaccctcagcaagtttatcagccttcacagcctggtccctggactacttgtcctgcatctaatcctctgtcacatacctcatctcaacagccaaatcagcaaggccaccagacctctcatgtctacatgccaatcagttcacctactacttcacaaccaccaaccattcattcatctggtagctcacagtcttctgcccatagccaatataacattcagaatatttcaacaggacctcgaaaaaaccagattgaaatcaaacttgaacccccacaaagaaataattcttcaaaactgcgttcttctggacctcgaacctccagcacttcctcttcagtcaatagccagaccttaaacagaaatcagcccactgtttacatagctgccagccccccaaatacggatgagctgatgtcccgtagtcaacctaaggtctatatttcagcgaatgctgccacaggagatgaacaggtcatgcggaatcagcccacactcttcatatccacaaactctggagcatctgctgcctccaggaacatgtctgggcaagtgagcatgggtcctgcctttattcatcaccatcctcccaaaagtcgagcaataggcaataactctgcaacctctcctcgagtggtagtcactcagcccaatacgaaatacactttcaaaattacagtctctcccaataagccccctgcagtttcaccaggggtggtgtcccctacctttgaacttacaaatcttcttaatcatcctgatcattatgtagaaaccgagaatattcagcacctcacggaccctacattagcacatgtggatagaataagtgaaacacggaaactgagtatgggatctgatgatgctgcctacacacaagctcttttggtacaccagaaggccagaatggaacgacttcaaagagaacttgagattcaaaagaaaaagctggataaattaaaatctgaggttaatgaaatggaaaataatctaactcgaaggcgcctgaaaagatcaaattctatatcccagataccttcccttgaagaaatgcagcagctgagaagttgtaatagacaactccagattgacattgactgcttaaccaaagaaattgatctttttcaagcccgaggaccacattttaaccccagcgctattcataacttttatgacaatattggatttgtaggtcctgtgccaccaaaacccaaagatcaaaggtccatcatcaaaacaccaaagactcaagacacagaagatgatgagggagctcagtggaattgtaccgcctgtacttttttgaaccatccagccttaattcgctgtgaacagtgtgagatgccaaggcatttctgagccaaatggccctgtatcttctctaaaaccacatctaaagttcaagaaactagtctgtcatcgggaaaaagtttcactgctacataggattttgtcaaattgaaggtgtgacaagatggtgttctgctaatgttaaatgtcagcccacagagctaataatacctcagtataatgtcatgagcagttgaaattcatcacatgaaaagtaatctgctgaaagacttggttgcccactgcctaactgtgtacagtgttaccagtgtcccattatggataattctcaatatgttaacacctaggtgttcccaatacctttttcccctcatgtcactactgaattttgacaggaggaaggaatagaatgatagcttgttttatttgtaaagctttcagtgaaacactacatacacgaagaaaaggaacaaggtttaactatttaagaaccatttgctgccgcatagtgccattggatagggaagaacttcagaaatctgtggtactcttggccttgtctttgtcttccctgaacgtgtctccactctgtgaagccagcatctaggggctaaagatgcaaaggaaagcagcatgcattgtctgtacaaatgtgcagcgaaataccccaaagcttttcctactgtacagatctctcgagtctgctttaagtgatttcttttcttcttgattattttcttatatttctatatgtatagtgtaatagccttttgttaactaattttcttttttccttttagtaattaagcacgatcatgtccctttttaagccttacctgagaggaacaatgccttaaaataaaaaagcattaatgagatgaaagtatgcacagaataactttcctctacttattctgtactttgccctcatgagttccaatgttgtgtgaagacaggcagatgctgcacagtgaattgcagatgatattacagaagtgatgtctgtaggtcacattaaatactgacttgagcagtgggtgacacaacacagtgtttgtcttccacagggaagcttaaaacaaaagatatttttaacccactgacagaacaacaaggttaagcttcatctgcttggtgtcccacagaacttgcacaagcagttgttattgggaaagtacagtctcaaaaccagcaacagcagcagtacctacagccctttttttggagagaagtttaaatgctttactgttggggcagtccatttctaatcctgacttggtgacagtatcatgtgtatttataaaacaaggctagccatatttaggacaactgaagaaaagctggaaaaaaaaacaagcaaacttgaacactgaagcaacctcaagcatctctttattttgatgatatatttttgtaaggaaaatattcagatgatcaggaatgtatataactgaaatcaagaaaaagaacagtatgcatttaaaaagacagaattatgaaattatatgagtgcttagaatggggctaagggaagtgctgaaatagagcaaaggatggaagataatatagactaccacccactgtaaatgtttgcaagtggctgtgttttaaatgggattattacagttgatctctatgaatgtcagagccctaactttcaggctttgcattttgtatatgggaagaaatatgacaatcctaggtaattaaaccatagacccaaagcccttacgtttgatgcaatttatttttaaaataggccttgtttttcagcttcatctgcagttctatgtgaagattgataaatcagtttttacttgttttattaataaaacgtaatttggatatcttgagttgatggttttgtgatttagctgggtaaactatctttgtaacagataagttatttataaaaattaaaaaacttatattctaatgtg

SEQ ID NO: 190681 - DNA, 677 bp, Homo sapiens
  Payload ID: 17668
  Gene Name: TGF-beta activated kinase 1/MAP3K7 binding protein 2
  ENST ID: ENST00000606797
  CDS Start-End: 578-677
gaaaagttttaggcagctaggaatgtggagatgtgggtagtggtggctgccaagcacaggaaaatgatcatgctgaactgtacaaaggagattgtctctgaaccttttcataggttctgacactctatatatgtcatcttatttaaaaccctctgtattaaaatgataaggatttggagacattgaaattatatagaatttaaatgtatgcatgttcatatgtttttgcctctggctcatatttccagaatacttaacagtattttaacattttgtttcttatgattctggtcctaaaaaatcaaggacgctgcttactcagaaagctaaaaaacctgagctccagacccagttcctggacctgccctggaaaagaagtatcccgtagagatgagctcactgcagttacttaattaacaatttgtaagctgcaaaaatggcaatgggccaaccaagaacagctacaatttgaatttttctatttccagaaaatgcttggacagaagagatgagtactatttccactaaggcctagaattgcctactgtacaaatagtcctgatcaggcaatatacgaatggcccaaggaagccaccaaattgattttcaggttttacatgacctgcgacaaaaattccctgaagtacctgaagttgccagagggaacaggcctgatg

SEQ ID NO: 190682 - DNA, 648 bp, Homo sapiens
  Payload ID: 17668
  Gene Name: TGF-beta activated kinase 1/MAP3K7 binding protein 2
  ENST ID: ENST00000606202
  CDS Start-End: 257-648
agtgaggtgaactccttcagggccacaggctgtaaagatctaaacaccatctgatccagtttcaatatgactgcctggatgaagaaggatttgagactaagtttattcctccaaagcaaaccaactgagaatgcagaataataataacctggatgcctgctgtgctgttctctctcaggagagtacaagatatctttatggtgaaggagacttgaatttttcagatgattctggaatttctggtctacgcaatcacatgacttctctcaacttggacttgcaatcacagaacatttaccaccatggaagagaaggaagtaggatgaatggaagtaggactctaacgcacagcattagtgatggacaacttcaaggtggccagtccaatagtgaactatttcagcaggagccacagacagcaccagctcaagttcctcaaggctttaatgtttttggaatgtccagttcctctggtgcttcaaattcagcaccacatcttggatttcacttaggcagcaaaggaacatctagcctttctcaacaaactcccagatttaatcccattatggtaactttagccccaaatatccagactggtcgtaatactcctacatctttgcacatacatggtgtacctccacctgtact

SEQ ID NO: 190683 - DNA, 805 bp, Homo sapiens
  Payload ID: 17669
  Gene Name: TGF-beta activated kinase 1/MAP3K7 binding protein 3
  ENST ID: ENST00000288422
  CDS Start-End: 664-805
cccgacggaagccctgaagccagagcttgcttgccaagctctcgctcagaccggatctaggaaatacgaggcgggcctcggtgggagggacgcactgagggaggagggaggaaagggggcggcggcggcggcggcggctcacaccggatcccggccctgcacggcgcgtaccctgggggttcgggcggggaagcggcgccggcccggaccccccgcgggagtaggcgacgggcgtgagggcgaggcggcggcggcggcggccagagagcagcagccgcctggacactgtcttcagccttttcttcaagtttttgaccgtggattgtgttgtgtcaaactggatgaattatcttagttgaattttcaccagttgaaaaattggagatttctagactactgaaaagaagttgctttcagagctggagatgtgaataaaatttctgtgccagggttgataaaccatcttgaggattccatccaggaaaccccatcacagttggttgttatgtctccttagactcctcttggctgtgacagtttctcagacttttgttcttgaggagtactgatcagaaaatgactgtggtgctagaagatcattacttttggaaagccggttaacatccatttcctaagagaaacttggccaccatttgctctggcatggcgcaaagcagcccacagcttgatattcaggttctccatgatcttcgacaacgtttccctgaaattccagagggcgtggtgtctcagtgcatgttacagaataacaacaatcttgaagcctgttgccgagccctttccc

SEQ ID NO: 190684 - DNA, 6255 bp, Homo sapiens
  Payload ID: 17669
  Gene Name: TGF-beta activated kinase 1/MAP3K7 binding protein 3
  Uniprot ID: Q8N5C8
  ENST ID: ENST00000378930
  CDS Start-End: 133-2271
tgtaactagacttaaccatactttttttttttttttaaatagaaaatgactgtggtgctagaagatcattacttttggaaagccggttaacatccatttcctaagagaaacttggccaccatttgctctggcatggcgcaaagcagcccacagcttgatattcaggttctccatgatcttcgacaacgtttccctgaaattccagagggcgtggtgtctcagtgcatgttacagaataacaacaatcttgaagcctgttgccgagccctttcccaggagagtagcaaatacttatatatggaataccatagtccagatgacaataggatgaatagaaatcgccttttacatattaacctgggtatccattctcctagtagctatcacccaggagatggagcccaacttaatggtggtcgaacactggtacatagctcaagtgatggacatattgatcctcagcatgcagcaggtaaacagctgatatgtttagttcaagaaccacactcagctccagctgttgttgctgctactcccaactacaatccattttttatgaacgaacagaacagaagtgcagctactcctccttcacaaccacctcaacagccatcttccatgcaaacaggaatgaatccgtctgctatgcaagggccttcaccaccaccgccacctccttcatacatgcacatacctcggtatagtacaaatccaattactgttacagtatcccagaacctcccttctggacagactgtaccaagagctttacaaattcttccacaaattccaagcaatctctatgggtctcctggttctatttatattagacagacatctcagagttcatcaggaagacaaactcctcagagtacgccgtggcagtcctcaccacagggcccagtgcctcactatagccagcgtcctttacctgtttatccacaccaacagaactatcagccttctcagtattctcccaaacagcagcagatccctcagtctgcttaccattcaccacctccttctcaatgtccttcacccttcagctctccacagcatcaagtgcaaccttcccagttgggccacatctttatgccacctagtccttcaactactccaccccatccatatcaacaaggacctcctagctatcagaaacagggaagccattcagtagcctatcttccatacacagcatctagtttatccaaaggttccatgaagaagatagaaattacagttgaaccttctcaaagacctgggacagcaattaataggagtccttcacccatcagtaatcaaccatctccacggaatcaacactcactgtacacagccaccacgccaccttcaagttctccttcaagagggatatctagtcaaccaaaacctccatttagtgttaatcctgtgtatattacatatacacagccaactggaccttcttgtactccatcaccatctcctcgagtgataccaaacccaactacagtttttaaaattaccgtaggccgagcaacgactgaaaatcttttaaatttagtggaccaagaagagcgctctgcagcaccagaacctattcagcccatttcagtgataccaggctctgggggagaaaagggaagccataaatatcagagaagttctagttctggatcagatgactatgcctacacacaagccttgctgttacatcaacgagcaaggatggagaggttagcaaagcaactgaaacttgagaaagaggagctagagcggttgaagtctgaagttaatggtatggagcatgacctgatgcagagacggctcagaagagtcagctgcaccactgcgatccctacgcctgaggaaatgacaagattgagaagcatgaacagacaactccagataaatgttgactgtacactgaaagaagttgacctccttcaatctagaggaaactttgatccaaaagccatgaataatttttatgacaacatagaacctggcccagttgtaccacccaagccatctaaaaaagactcctcagacccctgcacaattgagagaaaagcccgaagaattagcgtgacctccaaagtacaggcagacatccatgacacccaggcagcagctgcagatgagcatcgaactggctccacacaaagtcctcggacacaacctcgagatgaagactacgaaggggctccatggaattgtgatagctgcacctttcttaaccacccagcactaaatcgctgtgagcagtgcgagatgccacggtacacctgaattcagaaaagtctgcgccaggttgaaagtgaaactttgagcactaccagaagaaaaggaaacctcgggactctattcatccacccagccttttcattttcgattgcacagcggggaggaggaatggctttgtggtcgtcgttgtgctcacgaaaggaaaaatggggaggtcttttttttctcctttcttaactcactacagagtgagagatagaaagggatacttgaaactgggaaaggattcactctgtgaaagaatgtacacacagaagtcaagagctcttctgtggtggaatcccaattgttaaagttactgctgagtggcccttattttttaaagtagtactttgaatcatagtatgaaatgctacagtttatgcaaactgtgaattcccagagcagacttacctggtcaccgctctctggaaaaccaaggctccccgtgcttcttcccattgcttcctactaaagaggacaacaggaaaaagcacctagaatatttggggggggggggcaaattaattaagggtatttgtaattgctgcttttttcaggggtaatttccaacacacatacatgcacacaaacaaaatgttttaaaatgtgatttgtagcagtcaggaactaggcatatcatgcctttgtttaaaagtacaatcagaggtggtaagatgcctttggcttgtacagtgtgattcatcgagctctatcaacactggtaactaagacctacttatgccacataagagatgcatttttttaagttactgcatgtttttattaaggccattggttttcaaaataacaagtccttacaaagtatgattttataaatgatattctcgtaaaactgcgctttgccagtagcacagtgaatgtatgccaaatgcaagtccattccaaaatccatttggaaatcttgagctcagctgtggttcttaaacttttgcagtccatagggccttttttttttccttccaattttgtgataaattcatgatgtttacagcacagataaaactttgtgccataatcctaatttagctgaaatcaatattaactgttcaataaaaacttacttgcatatgttaacaaaccagtgtgaggggaattacagttggccaacgacaaagttgcacactgcattatttaggaaaggagggattgtcaaaaattattaagagaaaggtgaatatagaggactttgaaacaacttttaaaatttaacataactgtatctagaggtcaattgagtctctacaggcagttcagatcattttaaagcactccttatttatgaaatagaacttcagggtgcggataagagatataaagtcatgtgactcactagggtgcatcgctggaaacttaatagcacatttcattaaggtctctgccattgttggagttccttcttagctcagaattggagttttggaatcttcccctcattttggtgagtataaacagcaataaagttagtaggttctcccatcctaaaggattttacctgaggatatcgtcttaggaatatccatagacgctcccatcaggtttctcccccaacccccctacaccgcccccccacttctaatttagcagtaatctctggcagacctggaaaaacaagctgctcttaatagcataatgaaaccaaaggcgtaataactcatcatagttttccatcagaatcatttcacactctgcctacagctttgaaaacattttttcatatgtgaaaaactccccaaaatatatccactagtctcccaaaggaagcatggtaattaacactgataaaaacatctctcacacaacaactgtggcaaaactgtgaaaataacggtgagaaagcagatgggcttaaaagcatggtccccaaaacaacgttcttcaaaggtttttgtaacactggtctctgtctccaataacagtctagccgtcctactgttctgtaatatgcctttgcctttgtatggtttcatatctctttagtgatggtcaaccccacttggttttaagttacaatttaggggaaatatatatatatatactgcttggtgtcctagctaaaaggtttaccagtattcatagtgatatgctgaagtggaggcaattaacttggcagttgtcagttgagaatgaaagtagcatgtctgaaaacagtctgatgctttataaaaccatgtagatgactttaaaactattgcatgaaaatacatcaaggttaataagctgttatacagtagatgcatggtttcaatcctttggtgatattatctagtcaatcattgttttcacctgccaggaaaagagagaaaacagtctattggataggtgtaaagggtggggtatgcggtatcagattgattttaaggaagttttgtacatgttaatttttaattgtgcacaagtttcatatgccaacataggctgtattcagttttaaaataggcaaaatgacttgacactgataaatctggtatgtttaactgtgtcccatatgtagactgctttttgcctatgaccagtttgaacaagaattcacccaactttcaagatgccttttcaaaaggatcttgtagtcagttggtatgtacagacaattggcatggaagtggtaggatataaatcggatgacgcctggctgctgaggtgccagctggatcagctggtgcacttcttgtttcttgtaagaggtttctttaaaatgactagtttgatgtatctggtaacatataggcctgactatacattttacattatttcgctattttgtaaactgggattttagaaagcacgtttgccattttgttaaagtacattgccccttaaattttggagtagtttttaaaagtttaaaatggtaatagaggagccagaaactttttaagcattgtaaaatgttttgaattgatattgactttgtttggaagagagtagaggcagggggctttaaagaaacaaagaaatgcattgtaaaaatgtagttttagagcaaattaataatgatggtggggaaagtgttgctaatttgtttatttccctggaagaaatgggaagtgtgataagcagtttaatttttaaggagctggtctcaattttagtactttttaattatgcaaataaatcaatgtttccttaaattttgtcattgctttgtcacagttgtctagggttcatatccaaccttctgtggcaattcaattttatatagtcttttaagaggtaattgtaatgtatttctgacagtataaacaaaaagaatataaggcatagaagaattgtcctctaaaaatatcaatgatgtatcctggaatgtgaagatgtccctttatagttaaaaattgaattattttaatattgtaccattgttagaccttgaatgagtccatgttaccgtgtgtgtctgtatatctatctgtagagaaagaaaaatgacaactgaaatgttacttttaaaaatcagaataaattgggcactgtctgtgttgcaccactactgtatcttttcgaaagaattaacagtatttgcctattgtaaaggttaattctgatgacgttttcacattcaccagactttttttcctgtattatttgcatccccaaatatttaatacaagtagattctgcatggcttgggcattcagagattaatagaatgatgactcaattttaattctaaagccatgaaaagttactttgagactgaacaattctgaattatttatgatacccaatgtccatgtttctttccctactgtaaaagaattgatcagtttcttcattaaagcagcaaaaacttattaaatcttgtaaataccatgtctcttttagatttctgtgtatgctgtgaatgaaatcattttgagatgaaattgtacaaaggcattttaaaaggctctgcatgcatcgtacctccaaacagtacatattcggaaagtcaaagattcctgcaaaataaataaactaaaagcaaacact

SEQ ID NO: 190685 - DNA, 3698 bp, Homo sapiens
  Payload ID: 17669
  Gene Name: TGF-beta activated kinase 1/MAP3K7 binding protein 3
  Uniprot ID: Q8N5C8
  ENST ID: ENST00000378932
  CDS Start-End: 548-2602
cacatgaccattggctggagcccagttgaccaagaaggaagccagagaaagccacacattcgggcgagcaaggatcacaaggagacacatctgagcctgatatagaggattgcacatcagcacatcattcagagatcctggactttgagatgtatgtagtaacaggacactgtcttcagccttttcttcaagtttttgaccgtggattgtgttgtgtcaaactggatgaattatcttagttgaattttcaccagttgaaaaattggagatttctagactactgaaaagaagttgctttcagagctggagatgtgaataaaatttctgtgccagggttgataaaccatcttgaggattccatccaggaaaccccatcacagttggttgttatgtctccttagactcctcttggctgtgacagtttctcagacttttgttcttgaggagtactgatcagaaaatgactgtggtgctagaagatcattacttttggaaagccggttaacatccatttcctaagagaaacttggccaccatttgctctggcatggcgcaaagcagcccacagcttgatattcaggttctccatgatcttcgacaacgtttccctgaaattccagagggcgtggtgtctcagtgcatgttacagaataacaacaatcttgaagcctgttgccgagccctttcccaggagagtagcaaatacttatatatggaataccatagtccagatgacaataggatgaatagaaatcgccttttacatattaacctgggtatccattctcctagtagctatcacccaggagatggagcccaacttaatggtggtcgaacactggtacatagctcaagtgatggacatattgatcctcagcatgcagcaggtaaacagctgatatgtttagttcaagaaccacactcagctccagctgttgttgctgctactcccaactacaatccattttttatgaacgaacagaacagaagtgcagctactcctccttcacaaccacctcaacagccatcttccatgcaaacaggaatgaatccgtctgctatgcaagggccttcaccaccaccgccacctccttcatacatgcacatacctcggtatagtacaaatccaattactgttacagtatcccagaacctcccttctggacagactgtaccaagagctttacaaattcttccacaaattccaagcaatctctatgggtctcctggttctatttatattagacagacatctcagagttcatcaggaagacaaactcctcagagtacgccgtggcagtcctcaccacagggcccagtgcctcactatagccagcgtcctttacctgtttatccacaccaacagaactatcagccttctcagtattctcccaaacagcagcagatccctcagtctgcttaccattcaccacctccttctcaatgtccttcacccttcagctctccacagcatcaagtgcaaccttcccagttgggccacatctttatgccacctagtccttcaactactccaccccatccatatcaacaaggacctcctagctatcagaaacagggaagccattcagtagcctatcttccatacacagcatctagtttatccaaaggttccatgaagaagatagaaattacagttgaaccttctcaaagacctgggacagcaattaataggagtccttcacccatcagtaatcaaccatctccacggaatcaacactcactgtacacagccaccacgccaccttcaagttctccttcaagagggatatctagtcaaccaaaacctccatttagtgttaatcctgtgtatattacatatacacagccaactggaccttcttgtactccatcaccatctcctcgagtgataccaaacccaactacagtttttaaaattaccgtaggccgagcaacgactgaaaatcttttaaatttagtggaccaagaagagcgctctgcagcaccagaacctattcagcccatttcagtgataccaggctctgggggagaaaagggaagccataaatatcagagaagttctagttctggatcagatgactatgcctacacacaagccttgctgttacatcaacgagcaaggatggagaggttagcaaagcaactgaaacttgagaaagaggagctagagcggttgaagtctgaagttaatggtatggagcatgacctgatgcagagacggctcagaagagtcagctgcaccactgcgatccctacgcctgaggaaatgacaagattgagaagcatgaacagacaactccagataaatgttgactgtacactgaaagaagttgacctccttcaatctagagactcctcagacccctgcacaattgagagaaaagcccgaagaattagcgtgacctccaaagtacaggcagacatccatgacacccaggcagcagctgcagatgagcatcgaactggctccacacaaagtcctcggacacaacctcgagatgaagactacgaaggggctccatggaattgtgatagctgcacctttcttaaccacccagcactaaatcgctgtgagcagtgcgagatgccacggtacacctgaattcagaaaagtctgcgccaggttgaaagtgaaactttgagcactaccagaagaaaaggaaacctcgggactctattcatccacccagccttttcattttcgattgcacagcggggaggaggaatggctttgtggtcgtcgttgtgctcacgaaaggaaaaatggggaggtcttttttttctcctttcttaactcactacagagtgagagatagaaagggatacttgaaactgggaaaggattcactctgtgaaagaatgtacacacagaagtcaagagctcttctgtggtggaatcccaattgttaaagttactgctgagtggcccttattttttaaagtagtactttgaatcatagtatgaaatgctacagtttatgcaaactgtgaattcccagagcagacttacctggtcaccgctctctggaaaaccaaggctccccgtgcttcttcccattgcttcctactaaagaggacaacaggaaaaagcacctagaatatttggggggggggggcaaattaattaagggtatttgtaattgctgcttttttcaggggtaatttccaacacacatacatgcacacaaacaaaatgttttaaaatgtgatttgtagcagtcaggaactaggcatatcatgcctttgtttaaaagtacaatcagaggtggtaagatgcctttggcttgtacagtgtgattcatcgagctctatcaacactggtaactaagacctacttatgccacataagagatgcatttttttaagttactgcatgtttttattaaggccattggttttcaaaataacaagtccttacaaagtatgattttataaatgatattctcgtaaaactgcgctttgccagtagcacagtgaatgtatgccaaatgcaagtccattccaaaatccatttggaaatcttgagctcagctgtggttcttaaacttttgcagtccatagggccttttttttttccttccaattttgtgataaattcatgatgtttacagcacagataaaactttgtgccataatcctaatttagctgaaatcaatattaactgttcaataaaaacttacttgcatatgttaacaaa

SEQ ID NO: 190686 - DNA, 6671 bp, Homo sapiens
  Payload ID: 17669
  Gene Name: TGF-beta activated kinase 1/MAP3K7 binding protein 3
  Uniprot ID: Q8N5C8
  ENST ID: ENST00000378933
  CDS Start-End: 548-2686
cacatgaccattggctggagcccagttgaccaagaaggaagccagagaaagccacacattcgggcgagcaaggatcacaaggagacacatctgagcctgatatagaggattgcacatcagcacatcattcagagatcctggactttgagatgtatgtagtaacaggacactgtcttcagccttttcttcaagtttttgaccgtggattgtgttgtgtcaaactggatgaattatcttagttgaattttcaccagttgaaaaattggagatttctagactactgaaaagaagttgctttcagagctggagatgtgaataaaatttctgtgccagggttgataaaccatcttgaggattccatccaggaaaccccatcacagttggttgttatgtctccttagactcctcttggctgtgacagtttctcagacttttgttcttgaggagtactgatcagaaaatgactgtggtgctagaagatcattacttttggaaagccggttaacatccatttcctaagagaaacttggccaccatttgctctggcatggcgcaaagcagcccacagcttgatattcaggttctccatgatcttcgacaacgtttccctgaaattccagagggcgtggtgtctcagtgcatgttacagaataacaacaatcttgaagcctgttgccgagccctttcccaggagagtagcaaatacttatatatggaataccatagtccagatgacaataggatgaatagaaatcgccttttacatattaacctgggtatccattctcctagtagctatcacccaggagatggagcccaacttaatggtggtcgaacactggtacatagctcaagtgatggacatattgatcctcagcatgcagcaggtaaacagctgatatgtttagttcaagaaccacactcagctccagctgttgttgctgctactcccaactacaatccattttttatgaacgaacagaacagaagtgcagctactcctccttcacaaccacctcaacagccatcttccatgcaaacaggaatgaatccgtctgctatgcaagggccttcaccaccaccgccacctccttcatacatgcacatacctcggtatagtacaaatccaattactgttacagtatcccagaacctcccttctggacagactgtaccaagagctttacaaattcttccacaaattccaagcaatctctatgggtctcctggttctatttatattagacagacatctcagagttcatcaggaagacaaactcctcagagtacgccgtggcagtcctcaccacagggcccagtgcctcactatagccagcgtcctttacctgtttatccacaccaacagaactatcagccttctcagtattctcccaaacagcagcagatccctcagtctgcttaccattcaccacctccttctcaatgtccttcacccttcagctctccacagcatcaagtgcaaccttcccagttgggccacatctttatgccacctagtccttcaactactccaccccatccatatcaacaaggacctcctagctatcagaaacagggaagccattcagtagcctatcttccatacacagcatctagtttatccaaaggttccatgaagaagatagaaattacagttgaaccttctcaaagacctgggacagcaattaataggagtccttcacccatcagtaatcaaccatctccacggaatcaacactcactgtacacagccaccacgccaccttcaagttctccttcaagagggatatctagtcaaccaaaacctccatttagtgttaatcctgtgtatattacatatacacagccaactggaccttcttgtactccatcaccatctcctcgagtgataccaaacccaactacagtttttaaaattaccgtaggccgagcaacgactgaaaatcttttaaatttagtggaccaagaagagcgctctgcagcaccagaacctattcagcccatttcagtgataccaggctctgggggagaaaagggaagccataaatatcagagaagttctagttctggatcagatgactatgcctacacacaagccttgctgttacatcaacgagcaaggatggagaggttagcaaagcaactgaaacttgagaaagaggagctagagcggttgaagtctgaagttaatggtatggagcatgacctgatgcagagacggctcagaagagtcagctgcaccactgcgatccctacgcctgaggaaatgacaagattgagaagcatgaacagacaactccagataaatgttgactgtacactgaaagaagttgacctccttcaatctagaggaaactttgatccaaaagccatgaataatttttatgacaacatagaacctggcccagttgtaccacccaagccatctaaaaaagactcctcagacccctgcacaattgagagaaaagcccgaagaattagcgtgacctccaaagtacaggcagacatccatgacacccaggcagcagctgcagatgagcatcgaactggctccacacaaagtcctcggacacaacctcgagatgaagactacgaaggggctccatggaattgtgatagctgcacctttcttaaccacccagcactaaatcgctgtgagcagtgcgagatgccacggtacacctgaattcagaaaagtctgcgccaggttgaaagtgaaactttgagcactaccagaagaaaaggaaacctcgggactctattcatccacccagccttttcattttcgattgcacagcggggaggaggaatggctttgtggtcgtcgttgtgctcacgaaaggaaaaatggggaggtcttttttttctcctttcttaactcactacagagtgagagatagaaagggatacttgaaactgggaaaggattcactctgtgaaagaatgtacacacagaagtcaagagctcttctgtggtggaatcccaattgttaaagttactgctgagtggcccttattttttaaagtagtactttgaatcatagtatgaaatgctacagtttatgcaaactgtgaattcccagagcagacttacctggtcaccgctctctggaaaaccaaggctccccgtgcttcttcccattgcttcctactaaagaggacaacaggaaaaagcacctagaatatttggggggggggggcaaattaattaagggtatttgtaattgctgcttttttcaggggtaatttccaacacacatacatgcacacaaacaaaatgttttaaaatgtgatttgtagcagtcaggaactaggcatatcatgcctttgtttaaaagtacaatcagaggtggtaagatgcctttggcttgtacagtgtgattcatcgagctctatcaacactggtaactaagacctacttatgccacataagagatgcatttttttaagttactgcatgtttttattaaggccattggttttcaaaataacaagtccttacaaagtatgattttataaatgatattctcgtaaaactgcgctttgccagtagcacagtgaatgtatgccaaatgcaagtccattccaaaatccatttggaaatcttgagctcagctgtggttcttaaacttttgcagtccatagggccttttttttttccttccaattttgtgataaattcatgatgtttacagcacagataaaactttgtgccataatcctaatttagctgaaatcaatattaactgttcaataaaaacttacttgcatatgttaacaaaccagtgtgaggggaattacagttggccaacgacaaagttgcacactgcattatttaggaaaggagggattgtcaaaaattattaagagaaaggtgaatatagaggactttgaaacaacttttaaaatttaacataactgtatctagaggtcaattgagtctctacaggcagttcagatcattttaaagcactccttatttatgaaatagaacttcagggtgcggataagagatataaagtcatgtgactcactagggtgcatcgctggaaacttaatagcacatttcattaaggtctctgccattgttggagttccttcttagctcagaattggagttttggaatcttcccctcattttggtgagtataaacagcaataaagttagtaggttctcccatcctaaaggattttacctgaggatatcgtcttaggaatatccatagacgctcccatcaggtttctcccccaacccccctacaccgcccccccacttctaatttagcagtaatctctggcagacctggaaaaacaagctgctcttaatagcataatgaaaccaaaggcgtaataactcatcatagttttccatcagaatcatttcacactctgcctacagctttgaaaacattttttcatatgtgaaaaactccccaaaatatatccactagtctcccaaaggaagcatggtaattaacactgataaaaacatctctcacacaacaactgtggcaaaactgtgaaaataacggtgagaaagcagatgggcttaaaagcatggtccccaaaacaacgttcttcaaaggtttttgtaacactggtctctgtctccaataacagtctagccgtcctactgttctgtaatatgcctttgcctttgtatggtttcatatctctttagtgatggtcaaccccacttggttttaagttacaatttaggggaaatatatatatatatactgcttggtgtcctagctaaaaggtttaccagtattcatagtgatatgctgaagtggaggcaattaacttggcagttgtcagttgagaatgaaagtagcatgtctgaaaacagtctgatgctttataaaaccatgtagatgactttaaaactattgcatgaaaatacatcaaggttaataagctgttatacagtagatgcatggtttcaatcctttggtgatattatctagtcaatcattgttttcacctgccaggaaaagagagaaaacagtctattggataggtgtaaagggtggggtatgcggtatcagattgattttaaggaagttttgtacatgttaatttttaattgtgcacaagtttcatatgccaacataggctgtattcagttttaaaataggcaaaatgacttgacactgataaatctggtatgtttaactgtgtcccatatgtagactgctttttgcctatgaccagtttgaacaagaattcacccaactttcaagatgccttttcaaaaggatcttgtagtcagttggtatgtacagacaattggcatggaagtggtaggatataaatcggatgacgcctggctgctgaggtgccagctggatcagctggtgcacttcttgtttcttgtaagaggtttctttaaaatgactagtttgatgtatctggtaacatataggcctgactatacattttacattatttcgctattttgtaaactgggattttagaaagcacgtttgccattttgttaaagtacattgccccttaaattttggagtagtttttaaaagtttaaaatggtaatagaggagccagaaactttttaagcattgtaaaatgttttgaattgatattgactttgtttggaagagagtagaggcagggggctttaaagaaacaaagaaatgcattgtaaaaatgtagttttagagcaaattaataatgatggtggggaaagtgttgctaatttgtttatttccctggaagaaatgggaagtgtgataagcagtttaatttttaaggagctggtctcaattttagtactttttaattatgcaaataaatcaatgtttccttaaattttgtcattgctttgtcacagttgtctagggttcatatccaaccttctgtggcaattcaattttatatagtcttttaagaggtaattgtaatgtatttctgacagtataaacaaaaagaatataaggcatagaagaattgtcctctaaaaatatcaatgatgtatcctggaatgtgaagatgtccctttatagttaaaaattgaattattttaatattgtaccattgttagaccttgaatgagtccatgttaccgtgtgtgtctgtatatctatctgtagagaaagaaaaatgacaactgaaatgttacttttaaaaatcagaataaattgggcactgtctgtgttgcaccactactgtatcttttcgaaagaattaacagtatttgcctattgtaaaggttaattctgatgacgttttcacattcaccagactttttttcctgtattatttgcatccccaaatatttaatacaagtagattctgcatggcttgggcattcagagattaatagaatgatgactcaattttaattctaaagccatgaaaagttactttgagactgaacaattctgaattatttatgatacccaatgtccatgtttctttccctactgtaaaagaattgatcagtttcttcattaaagcagcaaaaacttattaaatcttgtaaataccatgtctcttttagatttctgtgtatgctgtgaatgaaatcattttgagatgaaattgtacaaaggcattttaaaaggctctgcatgcatcgtacctccaaacagtacatattcggaaagtcaaagattcctgcaaaataaataaactaaaagcaaacacta

SEQ ID NO: 190687 - DNA, 7987 bp, Homo sapiens
  Payload ID: 17669
  Gene Name: TGF-beta activated kinase 1/MAP3K7 binding protein 3
  ENST ID: ENST00000467136
  CDS Start-End: 384-2210
ggacactgtcttcagccttttcttcaagtttttgaccgtggattgtgttgtgtcaaactggatgaattatcttagttgaattttcaccagttgaaaaattggagatttctagactactgaaaagaagttgctttcagagctggagatgtgaataaaatttctgtgccagggttgataaaccatcttgaggattccatccaggaaaccccatcacagttggttgttatgtctccttagactcctcttggctgtgacagtttctcagacttttgttcttgaggagtactgatcagaaaatgactgtggtgctagaagatcattacttttggaaagccggttaacatccatttcctaagagaaacttggccaccatttgctctggcatggcgcaaagcagcccacagcttgatattcaggttctccatgatcttcgacaacgtttccctgaaattccagagggcgtggtgtctcagtgcatgttacagaataacaacaatcttgaagcctgttgccgagccctttcccaggagagtagcaaatacttatatatggaataccatagtccagatgacaataggatgaatagaaatcgccttttacatattaacctgggtatccattctcctagtagctatcacccaggagatggagcccaacttaatggtggtcgaacactggtacatagctcaagtgatggacatattgatcctcagcatgcagcaggtaaacagctgatatgtttagttcaagaaccacactcagctccagctgttgttgctgctactcccaactacaatccattttttatgaacgaacagaacagaagtgcagctactcctccttcacaaccacctcaacagccatcttccatgcaaacaggaatgaatccgtctgctatgcaagggccttcaccaccaccgccacctccttcatacatgcacatacctcggtatagtacaaatccaattactgttacagtatcccagaacctcccttctggacagactgtaccaagagctttacaaattcttccacaaattccaagcaatctctatgggtctcctggttctatttatattagacagacatctcagagttcatcaggaagacaaactcctcagagtacgccgtggcagtcctcaccacagggcccagtgcctcactatagccagcgtcctttacctgtttatccacaccaacagaactatcagccttctcagtattctcccaaacagcagcagatccctcagtctgcttaccattcaccacctccttctcaatgtccttcacccttcagctctccacagcatcaagtgcaaccttcccagttgggccacatctttatgccacctagtccttcaactactccaccccatccatatcaacaaggacctcctagctatcagaaacagggaagccattcagtagcctatcttccatacacagcatctagtttatccaaaggttccatgaagaagatagaaattacagttgaaccttctcaaagacctgggacagcaattaataggagtccttcacccatcagtaatcaaccatctccacggaatcaacactcactgtacacagccaccacgccaccttcaagttctccttcaagagggatatctagtcaaccaaaacctccatttagtgttaatcctgtgtatattacatatacacagccaactggaccttcttgtactccatcaccatctcctcgagtgataccaaacccaactacagtttttaaaattaccgtaggccgagcaacgactgaaaatcttttaaatttagtggaccaagaagagcgctctgcagcaccagaacctattcagcccatttcagtgataccaggctctgggggagaaaagggaagccataaatatcagagaagttctagttctggatcagatgactatgcctacacacaagccttgctgttacatcaacgagcaaggatggagaggttagcaaagcaactgaaacttgagaaagaggagctagagcggttgaagtctgaagttaatggtatggagcatgacctgatgcagagacggctcagaagagtcagctgcaccactgcgatccctacgcctgaggaaatgacaagattgagaagcatgaacagacaactccagataaatgttgactgtacactgaaagaagttgacctccttcaatctagaggtatagacttgattatttggtaaaccataagtaatagtgtggtattttaagctgcttaaatagcaataactttggttttgtagatttaagagacagtttttatccgtaagattacaatcctgggaaagagatccccctgtcccatggtcatggatcagatttggggatgaaaaaatagttttacttcggcagtttcatcaagttcttatcatttagactgttctatgttgttactttgcatttatcctctttttgtcatttactgtgaatattttataaattgatgggttttaattctaaaacttagtagagttcatattatgtgatagacatctaaaatatctgtaaaaagggatcccaaatcagagtatcagatttctcagttttaaaataaactctatatatgttatttttcatgttatgttatgtgaaaacattcaactataatcatagttttagttttttggatttttttacagaagtatactacagcagaagctctcttaaactttcatttacccaactcaccagattagagatggtcttcattttctgtggaaaatatactgactgatgtccacagctgctgcatacttttgactagtaggctgcattctggtaggcccatgaatattgctcccatcggttgaattgtctgcttaccaagagttgattctgtccccaaacctgtttatgccagttattgtatttctgcaatttaatgtttcataaactgacatgaaggagaaagccgctctttctatgaaagccaaaggcaaatcactcaaaaaatagggattgtgaattagatatgggtgaaaacaactgaaaaaagtctaaaaggattctgtactcaaattgcattataagtgttcttaatatctttcttgctccattctaaagcaatcaaaattatagatgagggttcagcaaactagggcctgttgcctgtttctgtgaataaaagttttagtggagcgatagccatgcccatttgtttacatattgcctatggttgcctttgtgcttcaacagcacagttgactacttgcaacagagactctatcacaggtccacaaagtctaaaatattatctggcccttgacagaaaaggtttgccaacctctgctgtaggtcatcatgggtgtggtttatgtaagaaatacaatatggaaccccagccaacagacacgtaaaaattaggtctttatctaactaactttaaaatatagctatatacaagtgttttgttacgttaaagttgacgtgtaatttttcttaattctgtgtattaatcagctttcctgccccccatcccccacacttaacttttcttgattatggcagctaagactttctacagtgttttaagagtatataataaaatatctcactgccatttttaggcaagattaaacaaacagtaggctgggcacaatggctcatgcctgtattcccagcagtttgggaggccaaggtgagaggatcacttgagcctaagagttagagaccagcctgggcaacatagggagaccccatccctacaaataattttttaaaaattagctaggtgtggtggtgtgtgcctgtgatcccagctacgtgggaggctaaggcaggaggatcacctgagcccaggaggtcaaggctgcagtgagccgtgatcacaccgctgcactctagcctaggcaacagaaggagactcggtctaaaaaacaaagagcgagagattaaagattagtggcaggtgaacccaaaagacacggcattatctgaacaacagacagaagcaaatttgaatgtgagaattgagcaatctagtcaggtacccttaaagtcattttcagaagcctagtcactctatagcccactaacttgaagcaatcaaagaattactatgcatgatgtaggggttacataaactattgctactatattttagaagattgcatcaatttcttttacttgtgtggtctttggagcaaaacaaacagtaaaacatttggttaggatacttatagtaagccttttgtgatctagaaattagaacatgagctgtaacaagtaattgaagaaatacatatgcagcttcttaaagcataaaaagattcaattaatacatcaaatagcactgtggcttttatgagctatcacagcaattattttcagaaaattatcttaaaacagcatattcaagtggataaaacatttgtgaaagggcctgcaagggaaaccactattaaggttttataagcaaagagctgtgttttttgtctgcattggacaatgagctctttgggatacttaggcatttctaaatctcttttcataacgaatctaaatgtatccattttatactaaattctactcttccacactgcagaaaactttttatactgagtttccaatctaaacttttaagctagggaaggaatctaaacctttttcggtggtgacggggggaggcaggggaataagcatttagaatagatgcaaatcagtgcatgacttgatgaaaaccagcttttttgtgatttttggtaaggaaaacttgttgggaaaaaaaaaagtagatctggaaatgaagagatttaatatatttaaactatcagtattagtaccatacagcatcttctataaataagtatggctacagttaactgtaatcgtttagaacaagcagagcacagtgataggttcacagaagtgaaggcaggacccaaaaccaaccttggaggagacacagcaggagatgtggctgaaatacagacactagaccagggaatgaacatttgaagacagacaggtgaaaattttgtggcaagacaaaattctcaggtattgttctatctattctgaaattggcaccttttatcattgataaatctgtaggaaacatttaacacttagtgtaagattctccttttcttgaaaataagaatacataaactgctgatgttatttcacatttattgaggttgcttagtagtctcaaaatataacttgattaatccttgtaaatgtttatatttggctttttctgtagttcaatttataatgaatttttaaggtaaattatgataaatatgaaagtaagctttcattatttaagtgttctttctcacagtttgttcattaaaaatcaaaacaagcagaaagagaaaacagttcaaccatcctttcatttctcttcttcatttatctccccaaatgccccacatgcctaatcctgcctaaggagactagccttacaattagaaaaatattcctttaagtgtaatacattgtagacatacatctgtgtagtggttttcttgggtcttttctcacagcgatgaaaacacaatttcattgggaggacagaattatgtaatgaattttgaaatcctggaaaacatttttcccttcttatgtgttttatttacatattttctttaaaaaaaaatcaaataacaggaaaaaagagttcttaaatgcctgatgaatttactttctttataggaaactttgatccaaaagccatgaataatttttatgacaacatagaacctggcccagttgtaccacccaagccatctaaaaaagggtcccgctctgtcgcccaggctggagtgcagtggcatgatcatagctcattgcagcctcgacctcccaggctcaagccatcctcctgcctcagccacctgagtagctgggactacagacgcacaccaccacgcccggctaatttgtgtattttttgtggagacagggtttcgccatgttgcccgggctggtctcaaactcctgggctgaagcgatcctgctgccttggcctcccaaagtgctgcgattacaggcataagtcactgttcctggtctgaaagactcttttctatgactcatttaactcaaacacaatttgcaaaaactgatagtcccttagagttagttataatgggatttcggttaaaatttcttaaatatgtattgaatgctcaatgcgtagctcaattatgtagatagatgcttgctgttacacagggaaaacatgactcctaccccaagcagtttaatattctacatatgtacacttctaataaaaaagagactaggaagccatctcagtcatcttcactataaatgaatttctattttagaaatttagtagttgtaattctataataatatatattattggtgaaagtataaatggttctattatatgccaaattgtctttaacccgttttttatcttcttctgttaaaacttagaaacagtagaacttgattaaattctataattttttggtaagcctttcatcacaaatttataaaagctattcagttttctccataaaatcaagtttgttttccattaagcacttgcagattctcatattgtatttgaaactaaatcggcgttttctaaaagtacatatagtttagcacagattggcctgctattgcaggccactcaaatacaaaaagaaaaaagataaaccagtaaaacacaaattactggtagaataggtttattggttcgaataaataaatgtcttggagttattacagatatataccagaaatccaagtgtaattaatatagtttatctgaattctaagtgtgataattaaagaatgtgagggagacagaaggaaagagagagaaagagacagagaaacaaaccttttttggattggactttgtagttaagcaatacagtgtgtacgtgctcttcagcgggcttagaatgtctcccaacccttattagtaactcataacagtggtagattggactttgtagttaaacaatacagtgtgtatgtgtgctcttcagtgggcttagacagcttccccaaccttcatcagtaagcaagcaagcacactgaccttggtgtcccacgatctgagcactggtcctggtcatcttggccacctgaccttgttcaaactcaatctgagcaccatagagggacaatccagccaaatactccaaaggttgtaagagttagtgagataaggtatgtgactcgacagaagtactttgcaaatctaagaaacagaactttaccttattctttggagccttaaggagacattcactctgcttttgtttactcagacaatggagtatttaagtacctgagcaccatgctttggattctggagcagtgatttccaaagatgagttgtactgtgggctcagaattcattagaaaatgcaagatctttctttggttcctaagggcaaataatataaaggctgccatttttcatttttaatccaaagggttgcttactaataaactataaatttatagaaacaattttctagcaagatattaggatgcctacagttcttgtctgtgttgcaaagtgtctgctgggcttctgcacacataggtaattggaattcaggaaatgatttgggagcacgtggttgtcagtatatactattatatcgagttggttctgatttttcaagtactgctatttttaaaaaatccaccagacacagtggctcctgcctgtaataccaacactttgggaggctgaggtgggaggatcacttgaggccaggagtttgagaccagcctgggcaacatagcgagagaccctgtctctacaaaaaataaaatttaaaaaattagctgggcgtggtagtggcatgcacctgtagtcttggatacttgggaggctgaggcaggaggatcacttgagcccaggagatcaaggctgcagtgagccattattgtgccactgtactccagcctggacagcagaacaagaccctgtctcaaaaaaaacaaaaacaaa

SEQ ID NO: 190688 - DNA, 1980 bp, Homo sapiens
  Payload ID: 17670
  Gene Name: TGFB-induced factor homeobox 1
  Uniprot ID: Q15583
  ENST ID: ENST00000330513
  CDS Start-End: 304-1509
gggaggccctgaaacgcgcggagcttccctctgcctccaggctttcccagcgagagtgaaattaaacttgaaactcggatcaactggcagtcgttgttggtagaacgccctaaggacccctccccgcgggacggagggaggactcgggacagggaattggccctgggagaaaacgcgcggggggcgtccgagacgccccgtgaaagccgtgccgacccttgggaggactgacaggtctagagacacgcgctgtctgttgtggtgggcctcccgggaataagtgaggggctctgtgtttcgaggatggttctagcgcagagccgggtgtctgccggggtgggctccccgcattgttcgggctccggcgggggcggctctgattcctttccatggcccgcctcccaccccgggaatccccagtgctccttttccacggcttttctggcgtccccccgactctcccgcggcactttggcctaccttcccccagcgccgtggtcctccctggcgaccccctctgcgctcctggggtcctcctgcgccccccctcctccaccggcgcgctgcccacagccgcgtgccctctccccggagctggggaccaaggctgggccccgccggccgcatcggtgggaacttccgcggtccccatcccagggcgcacagggtccagctcctcggcgccgactcctggaaacaatgaaaggtattgttgcagcatctggcagtgagactgaggatgaggacagcatggacattcccttggacctttcttcatccgctggctcaggcaagagaaggagaaggggcaacctacccaaggagtctgtgcagattcttcgggattggctgtatgagcaccgttacaatgcctatccttcagagcaagaaaaagcgttgctgtcccagcaaacacacctgtctacgctacaggtctgtaactggttcatcaacgcccgccgcaggctcctccctgacatgctgagaaaggatggcaaagatccaaatcagttcacaatttcccgccgtggggccaagatttctgaaacgagctctgtggagtccgtgatgggcatcaaaaacttcatgccagctctagaggagaccccatttcattcctgtacagctgggccaaacccaaccctagggaggccactgtctcctaagccgtcatccccgggatcagttttggctcgtccatcagtgatctgccataccactgtgactgcattgaaagatgtccctttctctctctgccagtcggtcggtgtgggacaaaacacagatatacagcagatagcggccaaaaacttcacagacacctctctcatgtacccagaggacacttgtaaatctggaccaagtacgaatacacagagtggtcttttcaacactcctccccctactccaccggacctcaaccaggacttcagtggatttcagcttctagtggatgttgcactcaaacgggctgcagagatggagcttcaggcaaaacttacagcttaacccattttcaagcaaaacagttctcagaaatgtcatgattgccggggtgaaggcaagagatgaattgcattattttatatattttttattaatatttgcacatgggattgctaaaacagcttcctgttactgagatgtcttcaatggaatacagtcattccaagaactataaacttaaagctactgtagaaacaaagggttttcttttttaaatgtttcttggtagattattcataatgtgagatggttcccaatatcatgtgattttttttttcctccccttccctttttttgttattttttcagactgtgcaatacttagagaacctatagcatcttctcattcccatgtggaacaggatgcccacatactgtctaattaataaattttccattttttttcaaacaagtatgaatctagttggttgatgccttttttttcatgacataataaagtattttctttaaaaa

SEQ ID NO: 190689 - DNA, 2076 bp, Homo sapiens
  Payload ID: 17670
  Gene Name: TGFB-induced factor homeobox 1
  Uniprot ID: Q15583
  ENST ID: ENST00000343820
  CDS Start-End: 787-1605
atcagaggcggctgtctcgtgcggctagagcagggccagtagagttcggggcagctgtcaaaaacgagacggggaggcttttcttcccgggggtggaggagggaaggagggaggtgtccttttttccatctgttgcagtttccgaaccaaacgcaccctcgccagccccgggaagaaaggcccaagggagaaacctggggcgctcggctggtgcccccaccgccgggcgagggatgcgggcggtccgtgcgcggcaggcggaaaggatcgtgtttctggacccggccaccccccgcgtccgcaccgccgcccccgagggacgagtgacagcggccgccgcgctcggtccagtcttcccggctggaaggtgcgggggaggggcggaggagcggcggggcgggagggggacggggcgggcggctgggggcggaggcaggacctcctgtaccttccctcctcgcctctctcactctgacagcgccgaggtgcgccgagcaggagcagggaacaaaggagcggagaggggaggggagagagttgggcgagggagagcccccggccggctgccagaagatcccggcgggaggaagcccaagtgtcacttgaattccacccaaggagcgggcgcctgggatcagagcgtcctgtttagcaataacggctggagcacgtcctacaagttacgggagagtcggctgtgaaggagacgttcgcttatcccctgtgtccccgctcctggcccctccagacccccgccttgcctcgcgctgggaggggagatccagaatgaaaggcaagaaaggtattgttgcagcatctggcagtgagactgaggatgaggacagcatggacattcccttggacctttcttcatccgctggctcaggcaagagaaggagaaggggcaacctacccaaggagtctgtgcagattcttcgggattggctgtatgagcaccgttacaatgcctatccttcagagcaagaaaaagcgttgctgtcccagcaaacacacctgtctacgctacaggtctgtaactggttcatcaacgcccgccgcaggctcctccctgacatgctgagaaaggatggcaaagatccaaatcagttcacaatttcccgccgtggggccaagatttctgaaacgagctctgtggagtccgtgatgggcatcaaaaacttcatgccagctctagaggagaccccatttcattcctgtacagctgggccaaacccaaccctagggaggccactgtctcctaagccgtcatccccgggatcagttttggctcgtccatcagtgatctgccataccactgtgactgcattgaaagatgtccctttctctctctgccagtcggtcggtgtgggacaaaacacagatatacagcagatagcggccaaaaacttcacagacacctctctcatgtacccagaggacacttgtaaatctggaccaagtacgaatacacagagtggtcttttcaacactcctccccctactccaccggacctcaaccaggacttcagtggatttcagcttctagtggatgttgcactcaaacgggctgcagagatggagcttcaggcaaaacttacagcttaacccattttcaagcaaaacagttctcagaaatgtcatgattgccggggtgaaggcaagagatgaattgcattattttatatattttttattaatatttgcacatgggattgctaaaacagcttcctgttactgagatgtcttcaatggaatacagtcattccaagaactataaacttaaagctactgtagaaacaaagggttttcttttttaaatgtttcttggtagattattcataatgtgagatggttcccaatatcatgtgattttttttttcctccccttccctttttttgttattttttcagactgtgcaatacttagagaacctatagcatcttctcattcccatgtggaacaggatgcccacatactgtctaattaataaattttccattttttttcaaacaagtatgaatctagttggttgatgccttttttttcatgacataataaagtattttctttaaaaa

SEQ ID NO: 190690 - DNA, 1088 bp, Homo sapiens
  Payload ID: 17670
  Gene Name: TGFB-induced factor homeobox 1
  Uniprot ID: Q15583
  ENST ID: ENST00000345133
  CDS Start-End: 147-905
tttctgtgggaggccctgaaacgcgcggagcttccctctgcctccaggctttcccagcgagagtgaaattaaacttgaaactcggatcaactggcagtcgttgtattgttgcagcatctggcagtgagactgaggatgaggacagcatggacattcccttggacctttcttcatccgctggctcaggcaagagaaggagaaggggcaacctacccaaggagtctgtgcagattcttcgggattggctgtatgagcaccgttacaatgcctatccttcagagcaagaaaaagcgttgctgtcccagcaaacacacctgtctacgctacaggtctgtaactggttcatcaacgcccgccgcaggctcctccctgacatgctgagaaaggatggcaaagatccaaatcagttcacaatttcccgccgtggggccaagatttctgaaacgagctctgtggagtccgtgatgggcatcaaaaacttcatgccagctctagaggagaccccatttcattcctgtacagctgggccaaacccaaccctagggaggccactgtctcctaagccgtcatccccgggatcagttttggctcgtccatcagtgatctgccataccactgtgactgcattgaaagatgtccctttctctctctgccagtcggtcggtgtgggacaaaacacagatatacagcagatagcggccaaaaacttcacagacacctctctcatgtacccagaggacacttgtaaatctggaccaagtacgaatacacagagtggtcttttcaacactcctccccctactccaccggacctcaaccaggacttcagtggatttcagcttctagtggatgttgcactcaaacgggctgcagagatggagcttcaggcaaaacttacagcttaacccattttcaagcaaaacagttctcagaaatgtcatgattgccggggtgaaggcaagagatgaattgcattattttatatattttttattaatatttgcacatgggattgctaaaacagcttcctgttactgagatgtcttcaatggaatacagtcattccaagaactataaacttaaagcta

SEQ ID NO: 190691 - DNA, 1352 bp, Homo sapiens
  Payload ID: 17670
  Gene Name: TGFB-induced factor homeobox 1
  Uniprot ID: Q15583
  ENST ID: ENST00000400167
  CDS Start-End: 128-886
cacaacatttccttgtatgtggatagcgtgaaagaagcttgtgatcctgcccccaccctccccaccgccacattttttaaagtgtattgttgcagcatctggcagtgagactgaggatgaggacagcatggacattcccttggacctttcttcatccgctggctcaggcaagagaaggagaaggggcaacctacccaaggagtctgtgcagattcttcgggattggctgtatgagcaccgttacaatgcctatccttcagagcaagaaaaagcgttgctgtcccagcaaacacacctgtctacgctacaggtctgtaactggttcatcaacgcccgccgcaggctcctccctgacatgctgagaaaggatggcaaagatccaaatcagttcacaatttcccgccgtggggccaagatttctgaaacgagctctgtggagtccgtgatgggcatcaaaaacttcatgccagctctagaggagaccccatttcattcctgtacagctgggccaaacccaaccctagggaggccactgtctcctaagccgtcatccccgggatcagttttggctcgtccatcagtgatctgccataccactgtgactgcattgaaagatgtccctttctctctctgccagtcggtcggtgtgggacaaaacacagatatacagcagatagcggccaaaaacttcacagacacctctctcatgtacccagaggacacttgtaaatctggaccaagtacgaatacacagagtggtcttttcaacactcctccccctactccaccggacctcaaccaggacttcagtggatttcagcttctagtggatgttgcactcaaacgggctgcagagatggagcttcaggcaaaacttacagcttaacccattttcaagcaaaacagttctcagaaatgtcatgattgccggggtgaaggcaagagatgaattgcattattttatatattttttattaatatttgcacatgggattgctaaaacagcttcctgttactgagatgtcttcaatggaatacagtcattccaagaactataaacttaaagctactgtagaaacaaagggttttcttttttaaatgtttcttggtagattattcataatgtgagatggttcccaatatcatgtgattttttttttcctccccttccctttttttgttattttttcagactgtgcaatacttagagaacctatagcatcttctcattcccatgtggaacaggatgcccacatactgtctaattaataaattttccattttttttcaaacaagtatgaatctagttggttgatgccttttttttcatgacataataaagtattttcttt

SEQ ID NO: 190692 - DNA, 1585 bp, Homo sapiens
  Payload ID: 17670
  Gene Name: TGFB-induced factor homeobox 1
  Uniprot ID: Q15583
  ENST ID: ENST00000407501
  CDS Start-End: 358-1176
ggcccaagggagaaacctggggcgctcggctggtgcccccaccgccgggcgagggatgcgggcggtccgtgcgcggcaggcggaaaggatcgtgtttctggacccggccaccccccgcgtccgcaccgccgcccccgagggacgagtgacagcggccgccgcgctcggtccagtcttcccggctggaaggagcgggcgcctgggatcagagcgtcctgtttagcaataacggctggagcacgtcctacaagttacgggagagtcggctgtgaaggagacgttcgcttatcccctgtgtccccgctcctggcccctccagacccccgccttgcctcgcgctgggaggggagatccagaatgaaaggcaagaaaggtattgttgcagcatctggcagtgagactgaggatgaggacagcatggacattcccttggacctttcttcatccgctggctcaggcaagagaaggagaaggggcaacctacccaaggagtctgtgcagattcttcgggattggctgtatgagcaccgttacaatgcctatccttcagagcaagaaaaagcgttgctgtcccagcaaacacacctgtctacgctacaggtctgtaactggttcatcaacgcccgccgcaggctcctccctgacatgctgagaaaggatggcaaagatccaaatcagttcacaatttcccgccgtggggccaagatttctgaaacgagctctgtggagtccgtgatgggcatcaaaaacttcatgccagctctagaggagaccccatttcattcctgtacagctgggccaaacccaaccctagggaggccactgtctcctaagccgtcatccccgggatcagttttggctcgtccatcagtgatctgccataccactgtgactgcattgaaagatgtccctttctctctctgccagtcggtcggtgtgggacaaaacacagatatacagcagatagcggccaaaaacttcacagacacctctctcatgtacccagaggacacttgtaaatctggaccaagtacgaatacacagagtggtcttttcaacactcctccccctactccaccggacctcaaccaggacttcagtggatttcagcttctagtggatgttgcactcaaacgggctgcagagatggagcttcaggcaaaacttacagcttaacccattttcaagcaaaacagttctcagaaatgtcatgattgccggggtgaaggcaagagatgaattgcattattttatatattttttattaatatttgcacatgggattgctaaaacagcttcctgttactgagatgtcttcaatggaatacagtcattccaagaactataaacttaaagctactgtagaaacaaagggttttcttttttaaatgtttcttggtagattattcataatgtgagatggttcccaatatcatgtgattttttttttcctccccttccctttttttgttattttttcagactgtgcaatacttagagaacctatagcatcttctcattcccatgtggaacaggatgcccacatactgtctaattaataaattttccattttttttcaaacaa

SEQ ID NO: 190693 - DNA, 1689 bp, Homo sapiens
  Payload ID: 17670
  Gene Name: TGFB-induced factor homeobox 1
  Uniprot ID: Q15583
  ENST ID: ENST00000405385
  CDS Start-End: 465-1223
gaagaagttggttcttgtctcgaatacttttcctcccgtgccccgccccttgaatcagaggcggctgtctcgtgcggctagagcagggccagtagagttcggggcagctgtcaaaaacgagacggggaggcttttcttcccgggggtggaggagggaaggagggaggtgtccttttttccatctgttgcagtttccgaaccaaacgcaccctcgccagccccgggaagaaaggcccaagggagaaacctggggcgctcggctggtgcccccaccgccgggcgagggatgcgggcggtccgtgcgcggcaggcggaaaggatcgtgtttctggacccggccaccccccgcgtccgcaccgccgcccccgagggacgagtgacagcggccgccgcgctcggtccagtcttcccggctggaaggtattgttgcagcatctggcagtgagactgaggatgaggacagcatggacattcccttggacctttcttcatccgctggctcaggcaagagaaggagaaggggcaacctacccaaggagtctgtgcagattcttcgggattggctgtatgagcaccgttacaatgcctatccttcagagcaagaaaaagcgttgctgtcccagcaaacacacctgtctacgctacaggtctgtaactggttcatcaacgcccgccgcaggctcctccctgacatgctgagaaaggatggcaaagatccaaatcagttcacaatttcccgccgtggggccaagatttctgaaacgagctctgtggagtccgtgatgggcatcaaaaacttcatgccagctctagaggagaccccatttcattcctgtacagctgggccaaacccaaccctagggaggccactgtctcctaagccgtcatccccgggatcagttttggctcgtccatcagtgatctgccataccactgtgactgcattgaaagatgtccctttctctctctgccagtcggtcggtgtgggacaaaacacagatatacagcagatagcggccaaaaacttcacagacacctctctcatgtacccagaggacacttgtaaatctggaccaagtacgaatacacagagtggtcttttcaacactcctccccctactccaccggacctcaaccaggacttcagtggatttcagcttctagtggatgttgcactcaaacgggctgcagagatggagcttcaggcaaaacttacagcttaacccattttcaagcaaaacagttctcagaaatgtcatgattgccggggtgaaggcaagagatgaattgcattattttatatattttttattaatatttgcacatgggattgctaaaacagcttcctgttactgagatgtcttcaatggaatacagtcattccaagaactataaacttaaagctactgtagaaacaaagggttttcttttttaaatgtttcttggtagattattcataatgtgagatggttcccaatatcatgtgattttttttttcctccccttccctttttttgttattttttcagactgtgcaatacttagagaacctatagcatcttctcattcccatgtggaacaggatgcccacatactgtctaattaataaattttccattttttttcaaacaagtatgaatctagttggttgatgccttttttttcatgacataataaagtattttcttt

SEQ ID NO: 190694 - DNA, 1670 bp, Homo sapiens
  Payload ID: 17670
  Gene Name: TGFB-induced factor homeobox 1
  Uniprot ID: Q15583
  ENST ID: ENST00000401449
  CDS Start-End: 446-1204
gactcccgcccgcatctcggggtgggaagggttcaggaaacacagaccagcttatcttaaggaagcctggtcgggaatctttcaaaaacacatctgttacaagggggaaagacacctccaggacaacagtgatttgcctcagcggggcaaaggccaggcctgacggaagagcccagccttcgccgagggccgcagggagccagagactcgagcctgcggttccagccccgccgcggttccggccccgccgcgatcccgaggcctgcgcatgctcggtgctgcgcggggctccctccttaccgcaggagctcctcatcgagaaacccaggttggtgtcttttccacgtggtagaagctggctaacctccacttccacattccagcccaagggaaagtccaaggtattgttgcagcatctggcagtgagactgaggatgaggacagcatggacattcccttggacctttcttcatccgctggctcaggcaagagaaggagaaggggcaacctacccaaggagtctgtgcagattcttcgggattggctgtatgagcaccgttacaatgcctatccttcagagcaagaaaaagcgttgctgtcccagcaaacacacctgtctacgctacaggtctgtaactggttcatcaacgcccgccgcaggctcctccctgacatgctgagaaaggatggcaaagatccaaatcagttcacaatttcccgccgtggggccaagatttctgaaacgagctctgtggagtccgtgatgggcatcaaaaacttcatgccagctctagaggagaccccatttcattcctgtacagctgggccaaacccaaccctagggaggccactgtctcctaagccgtcatccccgggatcagttttggctcgtccatcagtgatctgccataccactgtgactgcattgaaagatgtccctttctctctctgccagtcggtcggtgtgggacaaaacacagatatacagcagatagcggccaaaaacttcacagacacctctctcatgtacccagaggacacttgtaaatctggaccaagtacgaatacacagagtggtcttttcaacactcctccccctactccaccggacctcaaccaggacttcagtggatttcagcttctagtggatgttgcactcaaacgggctgcagagatggagcttcaggcaaaacttacagcttaacccattttcaagcaaaacagttctcagaaatgtcatgattgccggggtgaaggcaagagatgaattgcattattttatatattttttattaatatttgcacatgggattgctaaaacagcttcctgttactgagatgtcttcaatggaatacagtcattccaagaactataaacttaaagctactgtagaaacaaagggttttcttttttaaatgtttcttggtagattattcataatgtgagatggttcccaatatcatgtgattttttttttcctccccttccctttttttgttattttttcagactgtgcaatacttagagaacctatagcatcttctcattcccatgtggaacaggatgcccacatactgtctaattaataaattttccattttttttcaaacaagtatgaatctagttggttgatgccttttttttcatgacataataaagtattttcttt

SEQ ID NO: 190695 - DNA, 564 bp, Homo sapiens
  Payload ID: 17670
  Gene Name: TGFB-induced factor homeobox 1
  ENST ID: ENST00000551333
  CDS Start-End: 152-564
atgccattgtttgtaattcatttctgtttttaagattctagattgtctacaagcaaaagaatgtatttctttagtcattcggagtagcctgctgtagtttttgaaaggtattgttgcagcatctggcagtgagactgaggatgaggacagcatggacattcccttggacctttcttcatccgctggctcaggcaagagaaggagaaggggcaacctacccaaggagtctgtgcagattcttcgggattggctgtatgagcaccgttacaatgcctatccttcagagcaagaaaaagcgttgctgtcccagcaaacacacctgtctacgctacaggtctgtaactggttcatcaacgcccgccgcaggctcctccctgacatgctgagaaaggatggcaaagatccaaatcagttcacaatttcccgccgtggggccaagatttctgaaacgagctctgtggagtccgtgatgggcatcaaaaacttcatgccagctctagaggagaccccatttcattcctgtacagctgggccaaacccaaccctagggaggccactgtctcc

SEQ ID NO: 190696 - DNA, 1089 bp, Homo sapiens
  Payload ID: 17670
  Gene Name: TGFB-induced factor homeobox 1
  ENST ID: ENST00000551402
  CDS Start-End: 314-712
gacagcgccgaggtgcgccgagcaggagcagggaacaaaggagcggagaggggaggggagagagttgggcgagggagagcccccggccggctgccagaagatcccggcgggaggaagcccaagtgtcacttgaattccacccaaggagcgggcgcctgggatcagagcgtcctgtttagcaataacggctggagcacgtcctacaagttacgggagagtcggctgtgaaggagacgttcgcttatcccctgtgtccccgctcctggcccctccagacccccgccttgcctcgcgctgggaggggagatccagaatgaaaggcaagaaaggtattgttgcagcatctggcagtgagactgaggatgaggacagcatggacattcccttggacctttcttcatccgctggctcaggcaagagaaggagaaggggcaacctacccaaggagtctgtgcagattcttcgggattggctgtatgagcaccgttacaatgcctatccttcagagcaagaaaaagcgttgctgtcccagcaaacacacctgtctacgctacaggtaaagaaagagagcgtgaggtttatggatgcatttttagtttcaaagtcattttatggcattcctgtgtgtcaagtcattaagctccttgccactcaaagacagaaggaatatctttttattgtaaacttgatagtgttaaaagctaataactagctatttagagaacacagaaacacttgacagtcatctatcagatagcatttcctttaatgcctaaaagaaccttcctttatgcaacagacattaaaaggaggttaaaccttactctattgtccaggaaactggtttgatatttaaacaaggacgacttcagtgaggtaattcatgttatgtctgttgacacagtcatttgaactgggaaaaatcagttactgggaggagtggcccttttcataaggagaggttttcctgtagttgattaacttaaatgttggggcagtaggtgataggttaaaatggggagagttaaaaagtaaacctctctctcaaatcatttttaagcatttgagattgtatgtctttttcttcgt

SEQ ID NO: 190697 - DNA, 1536 bp, Homo sapiens
  Payload ID: 17670
  Gene Name: TGFB-induced factor homeobox 1
  Uniprot ID: Q15583
  ENST ID: ENST00000548489
  CDS Start-End: 312-1070
agaaaataaaatattagccgagtgtggcgtcacacgcctgtagtcctatctacttgggaggctgagacaggaggatctcttgagctcaggagttcaagactgcagtgagctgtgatggcgtcactgcactccagcctgggcgacaaaacgaggctctgtccccaaacaccaaaaacctcacaaggctcttccaggttggtgtcttttccacgtggtagaagctggctaacctccacttccacattccagcccaagggaaagtccaaggtattgttgcagcatctggcagtgagactgaggatgaggacagcatggacattcccttggacctttcttcatccgctggctcaggcaagagaaggagaaggggcaacctacccaaggagtctgtgcagattcttcgggattggctgtatgagcaccgttacaatgcctatccttcagagcaagaaaaagcgttgctgtcccagcaaacacacctgtctacgctacaggtctgtaactggttcatcaacgcccgccgcaggctcctccctgacatgctgagaaaggatggcaaagatccaaatcagttcacaatttcccgccgtggggccaagatttctgaaacgagctctgtggagtccgtgatgggcatcaaaaacttcatgccagctctagaggagaccccatttcattcctgtacagctgggccaaacccaaccctagggaggccactgtctcctaagccgtcatccccgggatcagttttggctcgtccatcagtgatctgccataccactgtgactgcattgaaagatgtccctttctctctctgccagtcggtcggtgtgggacaaaacacagatatacagcagatagcggccaaaaacttcacagacacctctctcatgtacccagaggacacttgtaaatctggaccaagtacgaatacacagagtggtcttttcaacactcctccccctactccaccggacctcaaccaggacttcagtggatttcagcttctagtggatgttgcactcaaacgggctgcagagatggagcttcaggcaaaacttacagcttaacccattttcaagcaaaacagttctcagaaatgtcatgattgccggggtgaaggcaagagatgaattgcattattttatatattttttattaatatttgcacatgggattgctaaaacagcttcctgttactgagatgtcttcaatggaatacagtcattccaagaactataaacttaaagctactgtagaaacaaagggttttcttttttaaatgtttcttggtagattattcataatgtgagatggttcccaatatcatgtgattttttttttcctccccttccctttttttgttattttttcagactgtgcaatacttagagaacctatagcatcttctcattcccatgtggaacaggatgcccacatactgtctaattaataaattttccattttttttcaaacaagtatgaatctagttggttgatgccttttttttcatgacataataaagtattttcttt

SEQ ID NO: 190698 - DNA, 801 bp, Homo sapiens
  Payload ID: 17670
  Gene Name: TGFB-induced factor homeobox 1
  ENST ID: ENST00000549780
  CDS Start-End: 144-801
tggcttgtccccaggaccgcgctccccccgagccgttttaggtgtgtgttctcttctgtcccgagcagtcagcaaaccacagaagaaaaaaatcgtaaggtattgttgcagcatctggcagtgagactgaggatgaggacagcatggacattcccttggacctttcttcatccgctggctcaggcaagagaaggagaaggggcaacctacccaaggagtctgtgcagattcttcgggattggctgtatgagcaccgttacaatgcctatccttcagagcaagaaaaagcgttgctgtcccagcaaacacacctgtctacgctacaggtctgtaactggttcatcaacgcccgccgcaggctcctccctgacatgctgagaaaggatggcaaagatccaaatcagttcacaatttcccgccgtggggccaagatttctgaaacgagctctgtggagtccgtgatgggcatcaaaaacttcatgccagctctagaggagaccccatttcattcctgtacagctgggccaaacccaaccctagggaggccactgtctcctaagccgtcatccccgggatcagttttggctcgtccatcagtgatctgccataccactgtgactgcattgaaagatgtccctttctctctctgccagtcggtcggtgtgggacaaaacacagatatacagcagatagcggccaaaaacttcacagacacctctctcatgtacccagaggacacttgtaaatctggaccaagtacgaatacacagagtggtcttttcaacactcctccccctactc

SEQ ID NO: 190699 - DNA, 554 bp, Homo sapiens
  Payload ID: 17670
  Gene Name: TGFB-induced factor homeobox 1
  ENST ID: ENST00000546979
  CDS Start-End: 201-554
gccgccgcgctcggtccagtcttcccggctggaagcgggcgcctgggatcagagcgtcctgtttagcaataacggctggagcacgtcctacaagttacgggagagtcggctgtgaaggagacgttcgcttatcccctgtgtccccgctcctggcccctccagacccccgccttgcctcgcgctgggaggggagatccagaatgaaaggcaagaaaggtattgttgcagcatctggcagtgagactgaggatgaggacagcatggacattcccttggacctttcttcatccgctggctcaggcaagagaaggagaaggggcaacctacccaaggagtctgtgcagattcttcgggattggctgtatgagcaccgttacaatgcctatccttcagagcaagaaaaagcgttgctgtcccagcaaacacacctgtctacgctacaggtctgtaactggttcatcaacgcccgccgcaggctcctccctgacatgctgagaaaggatggcaaagatccaaatcagttcacaatttcccgccgtggggccaagatttct

SEQ ID NO: 190700 - DNA, 1267 bp, Homo sapiens
  Payload ID: 17670
  Gene Name: TGFB-induced factor homeobox 1
  ENST ID: ENST00000552383
  CDS Start-End: 765-1267
ctctcgctcttgccctctggggacccaaaaggcccctggtcctcaagtcagccacctctgtgtcttcctccatccaaaagacctgcaggagcttctgagcctggtgacacttgctggggaccaagaccatcctactccgccccagccacgctgcatgacctcatctcagcccaaaaacagacattgggaacatctgaccatccatcccgttcccccgctctttttggctacctgcagtgaccccagcagcaggggcgggagttgcctgccctcttccagcctggaagagcatctgtcctacgctcctccttccgggagtgactcccgcccgcatctcggggtgggaagggttcaggaaacacagaccagcttatcttaaggaagcctggtcgggaatctttcaaaaacacatctgttacaagggggaaagacacctccaggacaacagtgatttgcctcagcggggcaaaggccaggcctgacggaagagcccagccttcgccgagggccgcagggagccagagactcgagcctgcggttccagccccgccgcggttccggccccgccgcgatcccgaggcctgcgcatgctcggtgctgcgcggggctccctccttaccgcaggagctcctcatcgagaaacccaggttggtgtcttttccacgtggtagaagctggctaacctccacttccacattccagcccaagggaaagtccaaggtattgttgcagcatctggcagtgagactgaggatgaggacagcatggacattcccttggacctttcttcatccgctggctcaggcaagagaaggagaaggggcaacctacccaaggagtctgtgcagattcttcgggattggctgtatgagcaccgttacaatgcctatccttcagagcaagaaaaagcgttgctgtcccagcaaacacacctgtctacgctacaggtctgtaactggttcatcaacgcccgccgcaggctcctccctgacatgctgagaaaggatggcaaagatccaaatcagttcacaatttcccgccgtggggccaagatttctgaaacgagctctgtggagtccgtgatgggcatcaaaaacttcatgccagctctagaggagaccccatttcattcctgtacagctgggccaaacccaaccctagggaggccactgtctcctaagccgtcatccccgggatcagttttggctcgtccatcagtgatctgccataccactgtgactgcattgaaagatgtccctttctctct

SEQ ID NO: 190701 - DNA, 2214 bp, Homo sapiens
  Payload ID: 17670
  Gene Name: TGFB-induced factor homeobox 1
  Uniprot ID: Q15583
  ENST ID: ENST00000472042
  CDS Start-End: 985-1743
aaagtacttacagccaaaagagcttcctctggggcttgcatattcagtttcctttgtcatgtaatcatttaagactgaactctgcttattgatatgtagtattctattctaggttgagctcaaactggtagctgaaatttaggagacatttttaattcatttagtattaggcatcttttgaccttactaaagtaccagtagtagaaaaatatttttgtgtgatgaaactgaaaacatcagtggtcgtatttaataaaaggtgactagtactgcccatttaaagtaggtgtctaactttgaataaatgtggatagcaatgaataagaaatgaccatgcatggtgttagcagaaaattttaacatgtgttttacctttagaatactaactgggttcagcgtagtatgtaattttccttccttatatccatgaaaaaaaatgtacgagtgctccctttcatttcaaaccttcagtagaggaaggaggaagagtagcatttaaaatgtacattaggactggttaggttgcttttcctagttagcactgatcttagaaagaaggttggtaggcatattccaactgccacagcacccttcctgtttcaaatgtggcaggttattcattttgggtgcagtttgtctcctccaatgattagacgaaagagttttctgaccatcattcaaaaggaatgtgagaagttaatgaatcctagaggaaagcggctgagaaaaggcatctggcatttggttgagagcctcctatgtggtgctagtcaaactacttttacttggaccctgaattcaggacagaaaacactgctccttctcctcgctctcagttgttgggaaagcatggttacattgaatggtcagcgttaagtgagctttgcaatagttgctgtgcttataaagcaactgacaactggcccttgtcctttcctaggtattgttgcagcatctggcagtgagactgaggatgaggacagcatggacattcccttggacctttcttcatccgctggctcaggcaagagaaggagaaggggcaacctacccaaggagtctgtgcagattcttcgggattggctgtatgagcaccgttacaatgcctatccttcagagcaagaaaaagcgttgctgtcccagcaaacacacctgtctacgctacaggtctgtaactggttcatcaacgcccgccgcaggctcctccctgacatgctgagaaaggatggcaaagatccaaatcagttcacaatttcccgccgtggggccaagatttctgaaacgagctctgtggagtccgtgatgggcatcaaaaacttcatgccagctctagaggagaccccatttcattcctgtacagctgggccaaacccaaccctagggaggccactgtctcctaagccgtcatccccgggatcagttttggctcgtccatcagtgatctgccataccactgtgactgcattgaaagatgtccctttctctctctgccagtcggtcggtgtgggacaaaacacagatatacagcagatagcggccaaaaacttcacagacacctctctcatgtacccagaggacacttgtaaatctggaccaagtacgaatacacagagtggtcttttcaacactcctccccctactccaccggacctcaaccaggacttcagtggatttcagcttctagtggatgttgcactcaaacgggctgcagagatggagcttcaggcaaaacttacagcttaacccattttcaagcaaaacagttctcagaaatgtcatgattgccggggtgaaggcaagagatgaattgcattattttatatattttttattaatatttgcacatgggattgctaaaacagcttcctgttactgagatgtcttcaatggaatacagtcattccaagaactataaacttaaagctactgtagaaacaaagggttttcttttttaaatgtttcttggtagattattcataatgtgagatggttcccaatatcatgtgattttttttttcctccccttccctttttttgttattttttcagactgtgcaatacttagagaacctatagcatcttctcattcccatgtggaacaggatgcccacatactgtctaattaataaattttccattttttttcaaacaagtatgaatctagttggttgatgccttttttttcatgacataataaagtattttctttaaaaa

SEQ ID NO: 190702 - DNA, 706 bp, Homo sapiens
  Payload ID: 17670
  Gene Name: TGFB-induced factor homeobox 1
  ENST ID: ENST00000550958
  CDS Start-End: 314-706
taagaaaataaaatattagccgagtgtggcgtcacacgcctgtagtcctatctacttgggaggctgagacaggaggatctcttgagctcaggagttcaagactgcagtgagctgtgatggcgtcactgcactccagcctgggcgacaaaacgaggctctgtccccaaacaccaaaaacctcacaaggctcttccaggttggtgtcttttccacgtggtagaagctggctaacctccacttccacattccagcccaagggaaagtccaaggtattgttgcagcatctggcagtgagactgaggatgaggacagcatggacattcccttggacctttcttcatccgctggctcaggcaagagaaggagaaggggcaacctacccaaggagtctgtgcagattcttcgggattggctgtatgagcaccgttacaatgcctatccttcagagcaagaaaaagcgttgctgtcccagcaaacacacctgtctacgctacaggtctgtaactggttcatcaacgcccgccgcaggctcctccctgacatgctgagaaaggatggcaaagatccaaatcagttcacaatttcccgccgtggggccaagatttctgaaacgagctctgtggagtccgtgatgggcatcaaaaacttcatgccagctctagaggagaccccatttcattcctgtacagctgggccaaacccaacc

SEQ ID NO: 190703 - DNA, 820 bp, Homo sapiens
  Payload ID: 17670
  Gene Name: TGFB-induced factor homeobox 1
  ENST ID: ENST00000549546
  CDS Start-End: 84-820
cagcgagagtgaaattaaacttgaaactcggatcaactggtattgttgcagcatctggcagtgagactgaggatgaggacagcatggacattcccttggacctttcttcatccgctggctcaggcaagagaaggagaaggggcaacctacccaaggagtctgtgcagattcttcgggattggctgtatgagcaccgttacaatgcctatccttcagagcaagaaaaagcgttgctgtcccagcaaacacacctgtctacgctacaggtctgtaactggttcatcaacgcccgccgcaggctcctccctgacatgctgagaaaggatggcaaagatccaaatcagttcacaatttcccgccgtggggccaagatttctgaaacgagctctgtggagtccgtgatgggcatcaaaaacttcatgccagctctagaggagaccccatttcattcctgtacagctgggccaaacccaaccctagggaggccactgtctcctaagccgtcatccccgggatcagttttggctcgtccatcagtgatctgccataccactgtgactgcattgaaagatgtccctttctctctctgccagtcggtcggtgtgggacaaaacacagatatacagcagatagcggccaaaaacttcacagacacctctctcatgtacccagaggacacttgtaaatctggaccaagtacgaatacacagagtggtcttttcaacactcctccccctactccaccggacctcaaccaggacttcagtggatttcagcttctagtggatgttgcactcaaacgggctgcagagatggagct

SEQ ID NO: 190704 - DNA, 526 bp, Homo sapiens
  Payload ID: 17670
  Gene Name: TGFB-induced factor homeobox 1
  ENST ID: ENST00000549468
  CDS Start-End: 128-526
cacaacatttccttgtatgtggatagcgtgaaagaagcttgtgatcctgcccccaccctccccaccgccacattttttaaagtgtattgttgcagcatctggcagtgagactgaggatgaggacagcatggacattcccttggacctttcttcatccgctggctcaggcaagagaaggagaaggggcaacctacccaaggagtctgtgcagattcttcgggattggctgtatgagcaccgttacaatgcctatccttcagagcaagaaaaagcgttgctgtcccagcaaacacacctgtctacgctacaggtctgtaactggttcatcaacgcccgccgcaggctcctccctgacatgctgagaaaggatggcaaagatccaaatcagttcacaatttcccgccgtggggccaagatttctgaaacgagctctgtggagtccgtgatgggcatcaaaaacttcatgccagctctagaggagaccccatttcattcctgtacagctgggccaaacccaaccctaggg

SEQ ID NO: 190705 - DNA, 563 bp, Homo sapiens
  Payload ID: 17670
  Gene Name: TGFB-induced factor homeobox 1
  ENST ID: ENST00000549253
  CDS Start-End: 289-563
agcatgtgagcgtgacaagtgtctgtccgcaacgtgtcagatttcgaaactgccttgcaatccagtccggaactcgcagctttagcccgggggaacagacgttcgtttaggctgtgtctcatcattcccccccgccccacccccgccgacctcccactgtcgctgctggaggaagagccccgggaggagaagggtgcgccgcgccgcgcccgcgtgtcaatggcagccgcgcattctggaagaagtattgttgcagcatctggcagtgagactgaggatgaggacagcatggacattcccttggacctttcttcatccgctggctcaggcaagagaaggagaaggggcaacctacccaaggagtctgtgcagattcttcgggattggctgtatgagcaccgttacaatgcctatccttcagagcaagaaaaagcgttgctgtcccagcaaacacacctgtctacgctacaggtctgtaactggttcatcaacgcccgccgcaggctcctccctgacatgctgagaaaggatggcaaagatccaaatcagttcacaatttcccg

SEQ ID NO: 190706 - DNA, 990 bp, Homo sapiens
  Payload ID: 17670
  Gene Name: TGFB-induced factor homeobox 1
  Uniprot ID: Q15583
  ENST ID: ENST00000551541
  CDS Start-End: 228-986
acattctttcagacccggcccgctgcggggcgttcctggggggtagcctcaaggccagcggggttccttcggctgcgtttctgtgggaggccctgaaacgcgcggagcttccctctgcctccaggctttcccagcgagagtgaaattaaacttgaaactcggatcaactggcagtcgttgttggtattgttgcagcatctggcagtgagactgaggatgaggacagcatggacattcccttggacctttcttcatccgctggctcaggcaagagaaggagaaggggcaacctacccaaggagtctgtgcagattcttcgggattggctgtatgagcaccgttacaatgcctatccttcagagcaagaaaaagcgttgctgtcccagcaaacacacctgtctacgctacaggtctgtaactggttcatcaacgcccgccgcaggctcctccctgacatgctgagaaaggatggcaaagatccaaatcagttcacaatttcccgccgtggggccaagatttctgaaacgagctctgtggagtccgtgatgggcatcaaaaacttcatgccagctctagaggagaccccatttcattcctgtacagctgggccaaacccaaccctagggaggccactgtctcctaagccgtcatccccgggatcagttttggctcgtccatcagtgatctgccataccactgtgactgcattgaaagatgtccctttctctctctgccagtcggtcggtgtgggacaaaacacagatatacagcagatagcggccaaaaacttcacagacacctctctcatgtacccagaggacacttgtaaatctggaccaagtacgaatacacagagtggtcttttcaacactcctccccctactccaccggacctcaaccaggacttcagtggatttcagcttctagtggatgttgcactcaaacgggctgcagagatggagcttcaggcaaaacttacagcttaaccca

SEQ ID NO: 190707 - DNA, 729 bp, Homo sapiens
  Payload ID: 17670
  Gene Name: TGFB-induced factor homeobox 1
  ENST ID: ENST00000577543
  CDS Start-End: 279-533
caaaggagcggagaggggaggggagagagttgggcgagggagagcccccggccggctgccagaagatcccggcgggaggaagcccaagtgtcacttgaattccacccaaggagcgggcgcctgggatcagagcgtcctgtttagcaataacggctggagcacgtcctacaagttacgggagagtcggctgtgaaggagacgttcgcttatcccctgtgtccccgctcctggcccctccagacccccgccttgcctcgcgctgggaggggagatccagaatgaaaggcaagaaaggtattgttgcagcatctggcagtgagactgaggatgaggacagcatggacattcccttggacctttcttcatccgctggctcaggcaagagaaggagaaggggcaacctacccaaggagtctgtgcagattcttcgggattggctgtatgagcaccgttacaatgcctatccttcagagcaagaaaaagcgttgctgtcccagcaaacacacctgtctacgctacaggctcctccctgacatgctgagaaaggatggcaaagatccaaatcagttcacaatttcccgccgtggggccaagatttctgaaacgagctctgtggagtccgtgatgggcatcaaaaacttcatgccagctctagaggagaccccatttcattcctgtacagctgggccaaacccaaccctagggaggccactgtctcctaagccgtca

SEQ ID NO: 190708 - DNA, 3030 bp, Homo sapiens
  Payload ID: 17670
  Gene Name: TGFB-induced factor homeobox 1
  Uniprot ID: Q15583
  ENST ID: ENST00000618001
  CDS Start-End: 132-992
cagcgttggctggggggaggcagtgggggtgcatctacgggagcggttgggctgtaagctttcgctacatcacagaattgtgccagtgtttctctttggagtgcctcgccagctttaacaaccgtttggatatgacttgctcgggcaaaagttgtgcattggcccgatcaagcctgacttctagccaaggtattgttgcagcatctggcagtgagactgaggatgaggacagcatggacattcccttggacctttcttcatccgctggctcaggcaagagaaggagaaggggcaacctacccaaggagtctgtgcagattcttcgggattggctgtatgagcaccgttacaatgcctatccttcagagcaagaaaaagcgttgctgtcccagcaaacacacctgtctacgctacaggtctgtaactggttcatcaacgcccgccgcaggctcctccctgacatgctgagaaaggatggcaaagatccaaatcagttcacaatttcccgccgtggggccaagatttctgaaacgagctctgtggagtccgtgatgggcatcaaaaacttcatgccagctctagaggagaccccatttcattcctgtacagctgggccaaacccaaccctagggaggccactgtctcctaagccgtcatccccgggatcagttttggctcgtccatcagtgatctgccataccactgtgactgcattgaaagatgtccctttctctctctgccagtcggtcggtgtgggacaaaacacagatatacagcagatagcggccaaaaacttcacagacacctctctcatgtacccagaggacacttgtaaatctggaccaagtacgaatacacagagtggtcttttcaacactcctccccctactccaccggacctcaaccaggacttcagtggatttcagcttctagtggatgttgcactcaaacgggctgcagagatggagcttcaggcaaaacttacagcttaacccattttcaagcaaaacagttctcagaaatgtcatgattgccggggtgaaggcaagagatgaattgcattattttatatattttttattaatatttgcacatgggattgctaaaacagcttcctgttactgagatgtcttcaatggaatacagtcattccaagaactataaacttaaagctactgtagaaacaaagggttttcttttttaaatgtttcttggtagattattcataatgtgagatggttcccaatatcatgtgattttttttttcctccccttccctttttttgttattttttcagactgtgcaatacttagagaacctatagcatcttctcattcccatgtggaacaggatgcccacatactgtctaattaataaattttccattttttttcaaacaagtatgaatctagttggttgatgccttttttttcatgacataataaagtattttctttaaaaattgttgtaattcagagtatttctgttgagggaggtgcttcttaaaaataagtaggaatatagcaccccagtgagcaggaagctgggggggtagggtgcagtgttagggggtgtcaccagctctttgaaaacctgtggacaacaagccagtttgcataaacaggatgtgtgatatttactcttgataggaggcatagcaggcccttagagctttacttaaactgcatggcaaattgaaatgaatcattttagtgtttagctagccactaaatcccttgctgatctgtcctgcgtagtttaaaacgtggccatgttataaagaaaagtcttgaagcatccggttattgctgagttttcagaagaaaacaacgcaagcaatctcttgccctttttccacgttaccctttaaaataacctttgttcagtggtacatttagttaaggcatttgtattcaaatgtagcatagtatttgcagagaaattaccttttaaaacatctcaaaagtgttttctaaaatgatgaaataaacggtggggttctgtctatggtgggattgtcagtttattaggtgagtattttccaaggtctcagtttgtgaaaaaatggtgctatgtacaagtggagtttgttgggatagacaatcacttacaaagcccagatggccagaagggaattggtgttgctcctttcacttgtatggttgagcagatttgtcacatgccacaaaaccattctttgtagtcatgcttagtatgagcttgctttgttgttacggtcatgttctttccagccctgccccagctatgaattgtctaagtgtgagggagcatcagagcttcagtattgtttaaagaatgtagaaaaatacaaatttgtctaattttgaaactattttagaaagtccctactgtagaaagagctaaactcaaagactttccttgtaagtgaaagaaaaaaactgctgatgattaccaagaggcgtaagaaaattaggtgagggaatgttgtgctctagcctgtggggtgcagcttcgtagggcacatcagcttagaatggtctggcctcacctcagagagtcacagaaatagacaaaaacccaaaaagtactagtaaagtaaatacaaggaacaaaataaacattaataaaaatgaatgacgcaaaggtgatccagaatcattacttgctccaacagctagatcaaaggctgaacattttgctttagtatagatgagggaaatgagcaagtcctaaaaggtttgccctgttacggtgtttcatcactcatactggaaggagaaggaaaggagccatatgactcatttaaaagaaaaactgtaagtcaccttaaattccctatgttttacttcattttttccctattgaggttgttacaggtcatggttgataatagttggtgttgaatgaatgtaatccattatttaaaaacaggtacatttaagtgaaaagataaatgtaaaaagctgttcatatcaaagccaaatagaaatgatttttatgcttataatttacatggtgcaatatatctttttaatttgtttactttt

SEQ ID NO: 190709 - DNA, 3406 bp, Homo sapiens
  Payload ID: 17671
  Gene Name: TGFB-induced factor homeobox 2
  Uniprot ID: Q9GZN2
  ENST ID: ENST00000373872
  CDS Start-End: 174-887
gtgctttccagccgcgagctgtcaggccgagtgtcaggccgggcaggtacgcggcgcgcgcccccggcgccccccgctccccgccgggacgccccgcgccgagccggaggccgcgtggacccgaaagccgctgggaaaagtttacccaaggtccagcctagcccctaggcaccatgtcggacagtgatctaggtgaggacgaaggcctcctctccctggcgggcaaaaggaagcgcagggggaacctgcccaaggagtcggtgaagatcctccgggactggctgtacttgcaccgctacaacgcctacccctcagagcaggagaagctgagcctttctggacagaccaacctgtcagtgctgcaaatatgtaactggttcatcaatgcccggcggcggcttctcccagacatgcttcggaaggatggcaaagaccctaatcagtttaccatttcccgccgcgggggtaaggcctcagatgtggccctcccccgtggcagcagcccctcagtgctggctgtgtctgtcccagcccccaccaatgtgctctccctgtctgtgtgctccatgccgcttcactcaggccagggggaaaagccagcagcccctttcccacgtggggagctggagtctcccaagcccctggtgacccctggtagcacacttactctgctgaccagggctgaggctggaagccccacaggtggactcttcaacacgccaccacccacacccccagagcaggacaaagaggacttcagcagcttccagctgctggtggaggtggcgctacagagggctgctgagatggagcttcagaagcagcaggacccatcactcccattactgcacactcccatccctttagtctctgaaaatccccagtaggcatctgccaagaagggtgctgaaggctccagccagctgtcctgggtttccgttttggttccctttcatacagagggttttctatggatcactgccaaacattgggatcatctcctctgtccagaggtcttcaacaggaagatgccagctggcaccactgcactgtgatgggggccctctcctctgctgactctgccgtttctccaggcctccgctcagtgatgagaccaagagatcggagacaagcatggtgctgctgcttctgctgcttctccagaaaatccctgggacacctttgttccagcctggtttcctgggctgggctcaggaaagctgccaaattcagtcctatgttgggtccaagctgcccctgtgctgtttctgtcaagccaggtgtggacattccaagttcatatgcgtgaacaaaagaaaagaggaacccagtggatgtaacagaaccgactccagttgaatgtttagatttttgctaaactgttttctttttcccttttttgctgtggtttgcattcacggcagtagttagcccaggtgtggggaacgagagtgcactgcatgatagcgttctggtgagctgggaaggacccaccactgccactgaggattgttttggaagaaaggaatatttttatcttggggaccagctaagtctctgcagtagtgtgaaattccaaatggttgttttatcattggtttggtttaccaaaaaaaaggcagggaaaaaaaaaaaaaacaaccgtatgagcgcattggcttgtctgccgcaggcacagaagggtagaaagccacagcagggggcagtccagcagactctgactcaactttctaggcacctagcagagaaagataagatcaaaaggtgtttggtttttcttttaatttttattgtagtttttttgggtgggtgggggaagtaaactagactgaagcgatggattttttttttcttttttttctttagtgtttttccctttgttcttgaacacttttgccctgcagcctcagttttgaattcttttagcaacttggattagaggggcccatatgtcagaagctcccagcacctcctacttgggagaaaagtgagccatctgctggtcaggaagtcctccagagaggcagcttttcccacaatggtggcaggaaactttggggaaagcaggaatggtgtccactgctgcggaggaactgccttcagagaaggtggggctggaaaagggttagaagcctcctagctgggattgtctttgtttcacctttctttaaattagaattacagaagcccctgcccagtgaacagataacgattggtcttatgctcctccctttcccccattttttcttttgctgttttgttttttgttttttgtttgtttgtttgtttttttgagacagagtcatgctctgtcacccgggctggagtgcagtggtgcgatctcagctcactgtaacctccgcctcccgggttcaagcaattatttgcctcagcctcccgagtagctgggattataggcacccgccaccatgtctggcttttagtagagacggggtttcaccatcttggccaggctggtcttggaactcctgacctcgtgagccaccacgcccagcctcttttgctgtttcattgctgacagtgttcaacaatatgccccatctttatatatcctaagaaacactaatcctaggttattgctagccaaaatatttttgtcctgagtagtgtcactgggccaaaagatagatcaggacgacagcctttagttttcctgaaatcaccaggtcaggcacaaggagaaaaggttcctggatactgactaacttgggtgggtggatctagccaggagaaagacagtaacatgtgttctgtactttctgggaagatccctgaagccatcacagaggctccccaacttctgagtcgcccatctgttgctgtgggagtgtgaacggatcgctgaaggagagggagctttgctctctctaggtgggcaagtttcctgggctctctgtgttgcctccctctggcttcttcctcccgtgccctctccccgtgtgccccagggggatcagggatcctcaccctcctgaggcccagtggggaagaatgaacatggcttcatccaggttaactgatgctgccatttgcccagcctcttccatcccagccctgtcagtgagcccaggtctggtgcaactgctgcaggatgcctgtagtagggaactctggaagtgtattgggctgaggtgggattttccctccccacagtgcactgagcaatggagggtggtgagggagccatgctgctgaattctggttggcatttccccattatgtaaaatggggtgttgggtagggcagactctgcttgggtttggttgtaagataaacctggaggagaagcacagttgtcccattgaattatttgagcaaaaactactgtaaataacttttttgtcttttgtcaaataaaatttttttttgtttttttaagcagaaa

SEQ ID NO: 190710 - DNA, 3432 bp, Homo sapiens
  Payload ID: 17671
  Gene Name: TGFB-induced factor homeobox 2
  Uniprot ID: Q9GZN2
  ENST ID: ENST00000373874
  CDS Start-End: 200-913
gcggggggtgggcgcagctcgtcgcgctccgcacaaagtttgttttctccctccgggcgggtgggggagggcgcagagggcgcggggggaggagaggggatctgacgtcaggccgcgaggtgctttccagccgcgagctgtcaggccgagtgtcaggccgggcaggtttacccaaggtccagcctagcccctaggcaccatgtcggacagtgatctaggtgaggacgaaggcctcctctccctggcgggcaaaaggaagcgcagggggaacctgcccaaggagtcggtgaagatcctccgggactggctgtacttgcaccgctacaacgcctacccctcagagcaggagaagctgagcctttctggacagaccaacctgtcagtgctgcaaatatgtaactggttcatcaatgcccggcggcggcttctcccagacatgcttcggaaggatggcaaagaccctaatcagtttaccatttcccgccgcgggggtaaggcctcagatgtggccctcccccgtggcagcagcccctcagtgctggctgtgtctgtcccagcccccaccaatgtgctctccctgtctgtgtgctccatgccgcttcactcaggccagggggaaaagccagcagcccctttcccacgtggggagctggagtctcccaagcccctggtgacccctggtagcacacttactctgctgaccagggctgaggctggaagccccacaggtggactcttcaacacgccaccacccacacccccagagcaggacaaagaggacttcagcagcttccagctgctggtggaggtggcgctacagagggctgctgagatggagcttcagaagcagcaggacccatcactcccattactgcacactcccatccctttagtctctgaaaatccccagtaggcatctgccaagaagggtgctgaaggctccagccagctgtcctgggtttccgttttggttccctttcatacagagggttttctatggatcactgccaaacattgggatcatctcctctgtccagaggtcttcaacaggaagatgccagctggcaccactgcactgtgatgggggccctctcctctgctgactctgccgtttctccaggcctccgctcagtgatgagaccaagagatcggagacaagcatggtgctgctgcttctgctgcttctccagaaaatccctgggacacctttgttccagcctggtttcctgggctgggctcaggaaagctgccaaattcagtcctatgttgggtccaagctgcccctgtgctgtttctgtcaagccaggtgtggacattccaagttcatatgcgtgaacaaaagaaaagaggaacccagtggatgtaacagaaccgactccagttgaatgtttagatttttgctaaactgttttctttttcccttttttgctgtggtttgcattcacggcagtagttagcccaggtgtggggaacgagagtgcactgcatgatagcgttctggtgagctgggaaggacccaccactgccactgaggattgttttggaagaaaggaatatttttatcttggggaccagctaagtctctgcagtagtgtgaaattccaaatggttgttttatcattggtttggtttaccaaaaaaaaggcagggaaaaaaaaaaaaaacaaccgtatgagcgcattggcttgtctgccgcaggcacagaagggtagaaagccacagcagggggcagtccagcagactctgactcaactttctaggcacctagcagagaaagataagatcaaaaggtgtttggtttttcttttaatttttattgtagtttttttgggtgggtgggggaagtaaactagactgaagcgatggattttttttttcttttttttctttagtgtttttccctttgttcttgaacacttttgccctgcagcctcagttttgaattcttttagcaacttggattagaggggcccatatgtcagaagctcccagcacctcctacttgggagaaaagtgagccatctgctggtcaggaagtcctccagagaggcagcttttcccacaatggtggcaggaaactttggggaaagcaggaatggtgtccactgctgcggaggaactgccttcagagaaggtggggctggaaaagggttagaagcctcctagctgggattgtctttgtttcacctttctttaaattagaattacagaagcccctgcccagtgaacagataacgattggtcttatgctcctccctttcccccattttttcttttgctgttttgttttttgttttttgtttgtttgtttgtttttttgagacagagtcatgctctgtcacccgggctggagtgcagtggtgcgatctcagctcactgtaacctccgcctcccgggttcaagcaattatttgcctcagcctcccgagtagctgggattataggcacccgccaccatgtctggcttttagtagagacggggtttcaccatcttggccaggctggtcttggaactcctgacctcgtgagccaccacgcccagcctcttttgctgtttcattgctgacagtgttcaacaatatgccccatctttatatatcctaagaaacactaatcctaggttattgctagccaaaatatttttgtcctgagtagtgtcactgggccaaaagatagatcaggacgacagcctttagttttcctgaaatcaccaggtcaggcacaaggagaaaaggttcctggatactgactaacttgggtgggtggatctagccaggagaaagacagtaacatgtgttctgtactttctgggaagatccctgaagccatcacagaggctccccaacttctgagtcgcccatctgttgctgtgggagtgtgaacggatcgctgaaggagagggagctttgctctctctaggtgggcaagtttcctgggctctctgtgttgcctccctctggcttcttcctcccgtgccctctccccgtgtgccccagggggatcagggatcctcaccctcctgaggcccagtggggaagaatgaacatggcttcatccaggttaactgatgctgccatttgcccagcctcttccatcccagccctgtcagtgagcccaggtctggtgcaactgctgcaggatgcctgtagtagggaactctggaagtgtattgggctgaggtgggattttccctccccacagtgcactgagcaatggagggtggtgagggagccatgctgctgaattctggttggcatttccccattatgtaaaatggggtgttgggtagggcagactctgcttgggtttggttgtaagataaacctggaggagaagcacagttgtcccattgaattatttgagcaaaaactactgtaaataacttttttgtcttttgtcaaataaaatttttttttgtttttttaagcagaaa

SEQ ID NO: 190711 - DNA, 638 bp, Homo sapiens
  Payload ID: 17671
  Gene Name: TGFB-induced factor homeobox 2
  ENST ID: ENST00000558028
  CDS Start-End: 117-638
cccgcgccccgaagagtcggccagccccgaactgccggagtaggggtgggaaccaaactttttcctgccccgggacagacacgtttacccaaggtccagcctagcccctaggcaccatgtcggacagtgatctaggtgaggacgaaggcctcctctccctggcgggcaaaaggaagcgcagggggaacctgcccaaggagtcggtgaagatcctccgggactggctgtacttgcaccgctacaacgcctacccctcagagcaggagaagctgagcctttctggacagaccaacctgtcagtgctgcaaatatgtaactggttcatcaatgcccggcggcggcttctcccagacatgcttcggaaggatggcaaagaccctaatcagtttaccatttcccgccgcgggggtaaggcctcagatgtggccctcccccgtggcagcagcccctcagtgctggctgtgtctgtcccagcccccaccaatgtgctctccctgtctgtgtgctccatgccgcttcactcaggccagggggaaaagccagcagcccctttcccacgtggggagctggagtctcccaagcccctggtgacccctggtagcacacttactctgctgaccagggctgaggctggaagc

SEQ ID NO: 190712 - DNA, 923 bp, Homo sapiens
  Payload ID: 17671
  Gene Name: TGFB-induced factor homeobox 2
  Uniprot ID: Q9GZN2
  ENST ID: ENST00000560025
  CDS Start-End: 212-923
ggatggcgggcccgcgcgggagctggtgcgcggagtcggcccggggtgtggggactgtggggtgcaagcgccccgagcgccggacgattcctcgccgacccaggagccatgtgctccgactcggtctgggccgcgggggaggttgcgcgctttgtctgaactgctgggaatgcgggcgtttacccaaggtccagcctagcccctaggcaccatgtcggacagtgatctaggtgaggacgaaggcctcctctccctggcgggcaaaaggaagcgcagggggaacctgcccaaggagtcggtgaagatcctccgggactggctgtacttgcaccgctacaacgcctacccctcagagcaggagaagctgagcctttctggacagaccaacctgtcagtgctgcaaatatgtaactggttcatcaatgcccggcggcggcttctcccagacatgcttcggaaggatggcaaagaccctaatcagtttaccatttcccgccgcgggggtaaggcctcagatgtggccctcccccgtggcagcagcccctcagtgctggctgtgtctgtcccagcccccaccaatgtgctctccctgtctgtgtgctccatgccgcttcactcaggccagggggaaaagccagcagcccctttcccacgtggggagctggagtctcccaagcccctggtgacccctggtagcacacttactctgctgaccagggctgaggctggaagccccacaggtggactcttcaacacgccaccacccacacccccagagcaggacaaagaggacttcagcagcttccagctgctggtggaggtggcgctacagagggctgctgagatggagcttcagaagcagcaggacccatcactcccattactgcacactcccatccctttagtctctgaaaatccccagt

SEQ ID NO: 190713 - DNA, 785 bp, Homo sapiens
  Payload ID: 17671
  Gene Name: TGFB-induced factor homeobox 2
  ENST ID: ENST00000558465
  CDS Start-End: 1-108
aagctgagcctttctggacagaccaacctgtcagtgctgcaaaggtcttcaacaggaagatgccagctggcaccactgcactgtgatgggggccctctcctctgctgactctgccgtttctccaggcctccgctcagtgatgagaccaagagatcggagacaagcatggtgctgctgcttctgctgcttctccagaaaatccctgggacacctttgttccagcctggtttcctgggctgggctcaggaaagctgccaaattcagtcctatgttgggtccaagctgcccctgtgctgtttctgtcaagccaggtgtggacattccaagttcatatgcgtgaacaaaagaaaagaggaacccagtggatgtaacagaaccgactccagttgaatgtttagatttttgctaaactgttttctttttcccttttttgctgtggtttgcattcacggcagtagttagcccaggtgtggggaacgagagtgcactgcatgatagcgttctggtgagctgggaaggacccaccactgccactgaggattgttttggaagaaaggaatatttttatcttggggaccagctaagtctctgcagtagtgtgaaattccaaatggttgttttatcattggtttggtttaccaaaaaaaaggcagggaaaaaaaaaaaaaacaaccgtatgagcgcattggcttgtctgccgcaggcacagaagggtagaaagccacagcagggggcagtccagcagactctgactcaactttctaggcacctagcagagaaagata

SEQ ID NO: 190714 - DNA, 797 bp, Homo sapiens
  Payload ID: 17671
  Gene Name: TGFB-induced factor homeobox 2
  ENST ID: ENST00000561398
  CDS Start-End: 1-277
cctcctctccctggcgggcaaaaggaagcgcagggggaacctgcccaaggagtcggtgaagatcctccgggactggctgtacttgcaccgctacaacgcctacccctcagagcaggagaagctgagcctttctggacagaccaacctgtcagtgctgcaaagggttttctatggatcactgccaaacattgggatcatctcctctgtccagaggtcttcaacaggaagatgccagctggcaccactgcactgtgatgggggccctctcctctgctgactctgccgtttctccaggcctccgctcagtgatgagaccaagagatcggagacaagcatggtgctgctgcttctgctgcttctccagaaaatccctgggacacctttgttccagcctggtttcctgggctgggctcaggaaagctgccaaattcagtcctatgttgggtccaagctgcccctgtgctgtttctgtcaagccaggtgtggacattccaagttcatatgcgtgaacaaaagaaaagaggaacccagtggatgtaacagaaccgactccagttgaatgtttagatttttgctaaactgttttctttttcccttttttgctgtggtttgcattcacggcagtagttagcccaggtgtggggaacgagagtgcactgcatgatagcgttctggtgagctgggaaggacccaccactgccactgaggattgttttggaagaaaggaatatttttatcttggggaccagctaagtctctgcagtagtgtgaaattccaaatggttgttttatcattg

SEQ ID NO: 190715 - DNA, 659 bp, Homo sapiens
  Payload ID: 17671
  Gene Name: TGFB-induced factor homeobox 2
  ENST ID: ENST00000557885
  CDS Start-End: 1-335
aaaggaagcgcagggggaacctgcccaaggagtcggtgaagatcctccgggactggctgtacttgcaccgctacaacgcctacccctcagagcaggagaagctgagcctttctggacagaccaacctgtcagtgctgcaaatatgtaactggttcatcaatgcccggcggcggcttctcccagacatgcttcggaaggatggcaaagaccctaatcagtttaccatttcccgccgcggggagggttttctatggatcactgccaaacattgggatcatctcctctgtccagaggtcttcaacaggaagatgccagctggcaccactgcactgtgatgggggccctctcctctgctgactctgccgtttctccaggcctccgctcagtgatgagaccaagagatcggagacaagcatggtgctgctgcttctgctgcttctccagaaaatccctgggacacctttgttccagcctggtttcctgggctgggctcaggaaagctgccaaattcagtcctatgttgggtccaagctgcccctgtgctgtttctgtcaagccaggtgtggacattccaagttcatatgcgtgaacaaaagaaaagaggaacccagtggatgtaacagaaccgactccagttgaatgtttagatttttgctaaa

SEQ ID NO: 190716 - DNA, 3344 bp, Homo sapiens
  Payload ID: 17671
  Gene Name: TGFB-induced factor homeobox 2
  Uniprot ID: Q9GZN2
  ENST ID: ENST00000611732
  CDS Start-End: 117-830
cccgcgccccgaagagtcggccagccccgaactgccggagtaggggtgggaaccaaactttttcctgccccgggacagacacgtttacccaaggtccagcctagcccctaggcaccatgtcggacagtgatctaggtgaggacgaaggcctcctctccctggcgggcaaaaggaagcgcagggggaacctgcccaaggagtcggtgaagatcctccgggactggctgtacttgcaccgctacaacgcctacccctcagagcaggagaagctgagcctttctggacagaccaacctgtcagtgctgcaaatatgtaactggttcatcaatgcccggcggcggcttctcccagacatgcttcggaaggatggcaaagaccctaatcagtttaccatttcccgccgcgggggtaaggcctcagatgtggccctcccccgtggcagcagcccctcagtgctggctgtgtctgtcccagcccccaccaatgtgctctccctgtctgtgtgctccatgccgcttcactcaggccagggggaaaagccagcagcccctttcccacgtggggagctggagtctcccaagcccctggtgacccctggtagcacacttactctgctgaccagggctgaggctggaagccccacaggtggactcttcaacacgccaccacccacacccccagagcaggacaaagaggacttcagcagcttccagctgctggtggaggtggcgctacagagggctgctgagatggagcttcagaagcagcaggacccatcactcccattactgcacactcccatccctttagtctctgaaaatccccagtaggcatctgccaagaagggtgctgaaggctccagccagctgtcctgggtttccgttttggttccctttcatacagagggttttctatggatcactgccaaacattgggatcatctcctctgtccagaggtcttcaacaggaagatgccagctggcaccactgcactgtgatgggggccctctcctctgctgactctgccgtttctccaggcctccgctcagtgatgagaccaagagatcggagacaagcatggtgctgctgcttctgctgcttctccagaaaatccctgggacacctttgttccagcctggtttcctgggctgggctcaggaaagctgccaaattcagtcctatgttgggtccaagctgcccctgtgctgtttctgtcaagccaggtgtggacattccaagttcatatgcgtgaacaaaagaaaagaggaacccagtggatgtaacagaaccgactccagttgaatgtttagatttttgctaaactgttttctttttcccttttttgctgtggtttgcattcacggcagtagttagcccaggtgtggggaacgagagtgcactgcatgatagcgttctggtgagctgggaaggacccaccactgccactgaggattgttttggaagaaaggaatatttttatcttggggaccagctaagtctctgcagtagtgtgaaattccaaatggttgttttatcattggtttggtttaccaaaaaaaaggcagggaaaaaaaaaaaaaacaaccgtatgagcgcattggcttgtctgccgcaggcacagaagggtagaaagccacagcagggggcagtccagcagactctgactcaactttctaggcacctagcagagaaagataagatcaaaaggtgtttggtttttcttttaatttttattgtagtttttttgggtgggtgggggaagtaaactagactgaagcgatggattttttttttcttttttttctttagtgtttttccctttgttcttgaacacttttgccctgcagcctcagttttgaattcttttagcaacttggattagaggggcccatatgtcagaagctcccagcacctcctacttgggagaaaagtgagccatctgctggtcaggaagtcctccagagaggcagcttttcccacaatggtggcaggaaactttggggaaagcaggaatggtgtccactgctgcggaggaactgccttcagagaaggtggggctggaaaagggttagaagcctcctagctgggattgtctttgtttcacctttctttaaattagaattacagaagcccctgcccagtgaacagataacgattggtcttatgctcctccctttcccccattttttcttttgctgttttgttttttgttttttgtttgtttgtttgtttttttgagacagagtcatgctctgtcacccgggctggagtgcagtggtgcgatctcagctcactgtaacctccgcctcccgggttcaagcaattatttgcctcagcctcccgagtagctgggattataggcacccgccaccatgtctggcttttagtagagacggggtttcaccatcttggccaggctggtcttggaactcctgacctcgtgagccaccacgcccagcctcttttgctgtttcattgctgacagtgttcaacaatatgccccatctttatatatcctaagaaacactaatcctaggttattgctagccaaaatatttttgtcctgagtagtgtcactgggccaaaagatagatcaggacgacagcctttagttttcctgaaatcaccaggtcaggcacaaggagaaaaggttcctggatactgactaacttgggtgggtggatctagccaggagaaagacagtaacatgtgttctgtactttctgggaagatccctgaagccatcacagaggctccccaacttctgagtcgcccatctgttgctgtgggagtgtgaacggatcgctgaaggagagggagctttgctctctctaggtgggcaagtttcctgggctctctgtgttgcctccctctggcttcttcctcccgtgccctctccccgtgtgccccagggggatcagggatcctcaccctcctgaggcccagtggggaagaatgaacatggcttcatccaggttaactgatgctgccatttgcccagcctcttccatcccagccctgtcagtgagcccaggtctggtgcaactgctgcaggatgcctgtagtagggaactctggaagtgtattgggctgaggtgggattttccctccccacagtgcactgagcaatggagggtggtgagggagccatgctgctgaattctggttggcatttccccattatgtaaaatggggtgttgggtagggcagactctgcttgggtttggttgtaagataaacctggaggagaagcacagttgtcccattgaattatttgagcaaaaactactgtaaataacttttttgtcttttgtcaaataaaatttttttttgtttttttaagc

SEQ ID NO: 190717 - DNA, 906 bp, Homo sapiens
  Payload ID: 17672
  Gene Name: TGFB-induced factor homeobox 2-like, X-linked
  Uniprot ID: Q8IUE1
  ENST ID: ENST00000283891
  CDS Start-End: 109-834
aagaaaggatgtgacgtcactgagataaccagctcggctgttagcaactctgttagcaacgctgtttgtctttctcggaaacaacagtaacgataagcctcttggaatatggaggccgctgcggacggcccggctgagacccaaagcccggtggaaaaagacagcccggcgaagacccaaagcccagcccaagacacctcaatcatgtcgagaaataacgcagatacaggcagagttcttgccttaccagagcacaagaagaagcgcaagggaaacttgccagccgagtccgttaagatcctccgcgactggatgtataagcatcggtttaaggcctacccttcagaagaagagaagcaaatgctgtcagagaagaccaatttgtctttgttgcagatttctaactggtttatcaatgctcgcagacgcattctcccggatatgcttcaacagcgtagaaacgaccccatcattggccacaaaacgggcaaagatgcccatgccacccacctgcagagcaccgaggcgtctgtgccggccaagtcagggcccagtggtccagacaatgtacaaagcctgcccctgtggcccttgccaaagggccagatgtcaagagagaagcaaccagatccggagtcggcccctagccagaagctcaccggaatagcccagccgaagaaaaaggtcaaggtttctgtcacatccccgtcttctccagaacttgtgtctccagaggagcacgccgacttcagcagcttcctgctgctagtcgatgcagcagtacaaagggctgccgagctggagctagagaagaagcaagagcctaatccatgattgatgatgttccaaaaacccaagtagtcagtcccttatgtactgtggtaaacctgtttatgttcaccccaa

SEQ ID NO: 190718 - DNA, 928 bp, Homo sapiens
  Payload ID: 17672
  Gene Name: TGFB-induced factor homeobox 2-like, X-linked
  Uniprot ID: Q8IUE1
  ENST ID: ENST00000561129
  CDS Start-End: 131-856
tcggaaacaacaggtgagaattccccttacagacctgcccatgctttctaaagtggctctcccaaacctacctttgtcctaactcagttgtctgtgattctcaatatagtaacgataagcctcttggaatatggaggccgctgcggacggcccggctgagacccaaagcccggtggaaaaagacagcccggcgaagacccaaagcccagcccaagacacctcaatcatgtcgagaaataacgcagatacaggcagagttcttgccttaccagagcacaagaagaagcgcaagggaaacttgccagccgagtccgttaagatcctccgcgactggatgtataagcatcggtttaaggcctacccttcagaagaagagaagcaaatgctgtcagagaagaccaatttgtctttgttgcagatttctaactggtttatcaatgctcgcagacgcattctcccggatatgcttcaacagcgtagaaacgaccccatcattggccacaaaacgggcaaagatgcccatgccacccacctgcagagcaccgaggcgtctgtgccggccaagtcagggcccagtggtccagacaatgtacaaagcctgcccctgtggcccttgccaaagggccagatgtcaagagagaagcaaccagatccggagtcggcccctagccagaagctcaccggaatagcccagccgaagaaaaaggtcaaggtttctgtcacatccccgtcttctccagaacttgtgtctccagaggagcacgccgacttcagcagcttcctgctgctagtcgatgcagcagtacaaagggctgccgagctggagctagagaagaagcaagagcctaatccatgattgatgatgttccaaaaacccaagtagtcagtcccttatgtactgtggtaaacctgtttatgttcaccccaa

SEQ ID NO: 190719 - DNA, 859 bp, Homo sapiens
  Payload ID: 17672
  Gene Name: TGFB-induced factor homeobox 2-like, X-linked
  ENST ID: ENST00000622167
  CDS Start-End: 65-622
caactctgttagcaacgctgtttgtctttctcggaaacaacagtaacgataagcctcttggaatatggaggccgctgcggacggcccggctgagacccaaagcccggtggaaaaagacagcccggcgaagacccaaagcccagcccaagacacctcaatcatgtcgagaaataacgcagatacaggcagagttcttgccttaccagagcacaagaagaagcgcaagggaaacttgccagccgagtccgttaagatcctccgcgactggatgtataagcatcggtttaaggcctacccttcagaagaagagaagcaaatgctgtcagagaagaccaatttgtctttgttgcagatttctaactggtttatcaatgctcgcagacgcattctcccggatatgcttcaacagcgtagaaacgaccccatcattggccacaaaacgggcaaagatgcccatgccacccacctgcagagcaccgaggcgtctgtgccggccaagtcagggccagtggtccagacaatgtacaaagcctgcccctgtggcccttgccaaagggccagatgtcaagagagaagcaaccagatccggagtcggcccctagccagaagctcaccggaatagcccagccgaagaaaaaggtcaaggtttctgtcacatccccgtcttctccagaacttgtgtctccagaggagcacgccgacttcagcagcttcctgctgctagtcgatgcagcagtacaaagggctgccgagctggagctagagaagaagcaagagcctaatccatgattgatgatgttccaaaaacccaagtagtcagtcccttatgtactgtggtaaacctgtttatgttcacccc

SEQ ID NO: 190720 - DNA, 905 bp, Homo sapiens
  Payload ID: 17673
  Gene Name: TGFB-induced factor homeobox 2-like, Y-linked
  Uniprot ID: Q8IUE0
  ENST ID: ENST00000321217
  CDS Start-End: 109-666
aagaaaggatgtgacgtcactgagataaccagctcggctgttagcaactctgttagcaaagctgtttgtctttctcggaaacaacagtaacgataagcctctttgaatatggaggccgctgcagacggcccggctgagacccaaagcccggtggaaaaagacagcccggcgaagacccaaagcccagcccaagacacctcaatcatgtcgagaaataacgcagatacaggcagagttcttgccttaccagagcacaagaagaagcgcaagggaaacttgccagccgagtccgttaagatcctccgcgactggatgtataagcatcggtttaaggcctacccttcagaagaagagaagcaaatgctgtcagagaagaccaatttgtctttgttgcggatttctaactggtttatcaatgctcgcagacgcattctcccggatatgcttcaacagcgtagaaacgaccccatcattggccacaaaacgggcaaagatgcccatgccacccacctgcagagcaccgaggcgtctgtgccggccaagtcagggccagtggtccagacaatgtacaaagcctgcccctgtggcccttgccaaagggccagatgtcaagagagaagcaaccagatccggagtcggcccctagccagaagctcaccggaatagcccagccaaagaaaaaggtcaagatttctatcacttccccgtcttctccagaacttgtgtctccagaggagtacgccgacttcagcagcttcctgctgctagtcgatgcagcagtacaaacggctgccgagctggagctagagaagaagcaagagcctaatccatgattgatgatgttccaaaaacccaagtagtcagtcccttgtgtactgtggtaaacctgtttatgttcaccccaa

SEQ ID NO: 190721 - DNA, 927 bp, Homo sapiens
  Payload ID: 17673
  Gene Name: TGFB-induced factor homeobox 2-like, Y-linked
  Uniprot ID: Q8IUE0
  ENST ID: ENST00000559055
  CDS Start-End: 131-688
tcggaaacaacaggtgagaattccccttacagacctgcccatgctttctaaagtggctctcccaaacctacctttgtcctaactcagttgtctgtgattctcaatatagtaacgataagcctctttgaatatggaggccgctgcagacggcccggctgagacccaaagcccggtggaaaaagacagcccggcgaagacccaaagcccagcccaagacacctcaatcatgtcgagaaataacgcagatacaggcagagttcttgccttaccagagcacaagaagaagcgcaagggaaacttgccagccgagtccgttaagatcctccgcgactggatgtataagcatcggtttaaggcctacccttcagaagaagagaagcaaatgctgtcagagaagaccaatttgtctttgttgcggatttctaactggtttatcaatgctcgcagacgcattctcccggatatgcttcaacagcgtagaaacgaccccatcattggccacaaaacgggcaaagatgcccatgccacccacctgcagagcaccgaggcgtctgtgccggccaagtcagggccagtggtccagacaatgtacaaagcctgcccctgtggcccttgccaaagggccagatgtcaagagagaagcaaccagatccggagtcggcccctagccagaagctcaccggaatagcccagccaaagaaaaaggtcaagatttctatcacttccccgtcttctccagaacttgtgtctccagaggagtacgccgacttcagcagcttcctgctgctagtcgatgcagcagtacaaacggctgccgagctggagctagagaagaagcaagagcctaatccatgattgatgatgttccaaaaacccaagtagtcagtcccttgtgtactgtggtaaacctgtttatgttcaccccaa

SEQ ID NO: 190722 - DNA, 918 bp, Homo sapiens
  Payload ID: 17674
  Gene Name: TGIF2-C20orf24 readthrough
  ENST ID: ENST00000558530
  CDS Start-End: 118-585
ccccgcgccccgaagagtcggccagccccgaactgccggagtaggggtgggaaccaaactttttcctgccccgggacagacacgtttacccaaggtccagcctagcccctaggcaccatgtcggacagtgatctaggtgaggacgaaggcctcctctccctggcgggcaaaaggaagcgcagggggaacctgcccaaggagtcggtgaagatcctccgggactggctgtacttgcaccgctacaacgcctacccctcagagcaggagaagctgagcctttctggacagaccaacctgtcagtgctgcaagatgaatttttagatgtgatctactggttccgacagatcattgctgtggtcctgggtgtcatttggggagttttgccattacgagggttcttgggaatagcaggattctgcctgatcaatgcaggagtcctgtacctctacttcagcaattacctacagattgatgaggaagaatatggtggcacgtgggagctcacgaaggaagggtttatgacctcttttgccttgttcatggtcatttggatcatcttttacactgccatccattatgactgatggtgtacagctcccaagtgctccctatccagtccaaaggaccctcttgattacagcacaggaacttgatcgttggggaaccccagccccttggaacttggaagacccgtgtttcctggaccgcgaatcagtgtgttgggcatcagtgttttctgcaagggttgtgacctgaaactttttaaaaaccacccacctttggggaagcatttctgaatttatccatcaccaaccatttcttcttggataccatcaagtaacagctattatttgccaagtggagctgtcatttaatttgatgcacctctggattcagatgaaacattaaattgtctt

SEQ ID NO: 190723 - DNA, 2399 bp, Homo sapiens
  Payload ID: 17675
  Gene Name: THAP domain containing 10
  Uniprot ID: Q9P2Z0
  ENST ID: ENST00000249861
  CDS Start-End: 514-1287
accatggaaacgaccatttccggtctggacctctcccgaatcgatagagccacacagtcgttgcagcttctagttgtattcgtgagagcccagtgcgtcaccacttcctcgttctattttcccagcctcataaaaacagagcgggagtattgggaggaggataagctggggaagaggctggccacactggttgctataaccaccaccacttccggtccgttcctctttacggcccacctcagcgctgcccgcgcgaaatttgtatccctctgcttgtgtccactggctcctggggagcagcgcagggaggaggaggaggaagatatcaaagagccctcccattgggggccccagatcgccacttccggtgaccagaggtagggaaggaaacaatcccgacccggagtggacaggtgaggaggggaggacttgcctcgccgaggccgctgcgaggagcgtgcccaagggcgaaggtccagggaacccggctcccgcgcaccgaagacggccgccatgccggcccgttgtgtggccgcccactgcggcaacaccaccaagtctgggaagtcgctgttccgctttcccaaggaccgggccgtgcggctgctctgggaccgcttcgtgcggggttgccgcgccgactggtacggaggcaatgaccgctcggtcatctgctctgaccactttgccccagcctgttttgacgtctcttcggttatccagaagaacctgcgcttctcccagcgcctgaggctggtggcaggcgccgtgcccaccctgcaccgggtgcccgccccggcacctaagaggggagaggagggagaccaagcaggccgcctggacacgcgaggagagctccaggcagccaggcattctgaggctgccccaggtccagtctcctgtacacgcccccgagctgggaagcaggctgcagcttcacagattacgtgtgaaaatgaacttgtgcaaacccaaccccatgctgataatccatctaatactgtcacttcagtacctactcactgtgaagaaggcccagtgcataaaagtacacaaatttctttgaaaaggccccgtcaccgtagtgtgggtattcaagccaaagtgaaagcgtttggaaaaagactgtgtaatgcaactactcagacagaggaattgtggtctagaacttcctctctctttgacatttactccagtgattcagaaacagatacagactgggatatcaagagtgaacagagtgatttgtcttatatggctgtacaggtgaaagaagaaacatgttaaaaactcaacatcaaatgctctgatgtgctatagattttcaaatctttactcacataattatctctttgctattgtaaatctttcacttcaagataatttgacagttgagtatcagcataatttgtttagctctaaggcaaaagtttgcttgcttgccaacacaatgaagataatacctacccacaaacatccctattctctactttcacctttttttttcttttaatccttttggtagaaatcaggttacaaagcaaaaccacaatatcagcaacacttcctaatcaaaattaagcattgaatatttgtttaagcttagttcagaagcaacgctcctacaggacttgacatttgctagttagaatatccctactcttctaaataatttgaaagtatagagcagtaacacagtaacagtgagcacagccaagcctgacactactaaatgatttggtagtgaagccaggacatctacccttgactattttttatgttatttatttattagtttgtccatttgtaacatgtatagatctgtcctgtgagcatttctgatgaatctatggttcttacagaaatttttcaaaggaatcaatttagagatagagttttcatatacttacattaacttattaatgaaatctgtttgcatcagtgcttactgcgacacattaattagcttgattaatttagattagaatcattaacatcatgaaaaataaaagtactacatttctaacgtattcccattgcaggtgttaggtattttttctgtcaacacctctcttttgaattctacatttgagaaataagcatggaaatattagctgccccgtctgccattcaccaggaaaaatttctatggcaattttgtaccatgaagtaaactgttacaatagtttctgagaagcatactataactctgatcttccattgagaataacaaaaataaatatcaattttacacctcatatgtcttcttagttctgaatgattagaagaacttgcatgtatttttatcctagaaggtttaaataatacatcaaagttattttcttccaaatgtaattttatgtctgctttaaggaaaataaaataaaatattaatagga

SEQ ID NO: 190724 - DNA, 537 bp, Homo sapiens
  Payload ID: 17675
  Gene Name: THAP domain containing 10
  ENST ID: ENST00000560604
  CDS Start-End: 1-383
aggtagggaaggaaacaatcccgacccggagtggacagattacgtgtgaaaatgaacttgtgcaaacccaaccccatgctgataatccatctaatactgtcacttcagtacctactcactgtgaagaaggcccagtgcataaaagtacacaaatttctttgaaaaggccccgtcaccgtagtgtgggtattcaagccaaagtgaaagcgtttggaaaaagactgtgtaatgcaactactcagacagaggaattgtggtctagaacttcctctctctttgacatttactccagtgattcagaaacagatacagactgggatatcaagagtgaacagagtgatttgtcttatatggctgtacaggtgaaagaagaaacatgttaaaaactcaacatcaaatgctctgatgtgctatagattttcaaatctttactcacataattatctctttgctattgtaaatctttcacttcaagataatttgacagttgagtatcagcataatttgtttagctctaaggcaaaagtttgcttgctt

SEQ ID NO: 190725 - DNA, 2114 bp, Homo sapiens
  Payload ID: 17676
  Gene Name: THAP domain containing 11
  Uniprot ID: Q96EK4
  ENST ID: ENST00000303596
  CDS Start-End: 474-1418
atcaggattcgggtcctcgtgaggagcagtccaggcgacagcgttccaacctaatacgcctctctcgcccgccggggacaagacgggctggggaaagaatctgctcttcggaggctatcgcagtgccttggaaggcggcaggaatccgcacacacccgccccggaagtgagccgcttctggcgcggggcattgtggggggcgtagtctctttctcaggcggtccttcgcggcgtccccggggcccactcccgagcgcaggcgggcagccaggcgggcggcgcggcgcgggccggcaggaagcgtattctgggcacggggcgccgggcgggccggctgcgccgagcggcagtggtgggataccacccaaggcctcgcgcggcgccgcccgtcgaggggcgggcggcggcgtagccactgggccgtcgaagagcgcaggaggccggtgggccgggccgggccgcgcggcgcagccatgcctggctttacgtgctgcgtgccaggctgctacaacaactcgcaccgggacaaggcgctgcacttctacacgtttccaaaggacgctgagttgcggcgcctctggctcaagaacgtgtcgcgtgccggcgtcagtgggtgcttctccaccttccagcccaccacaggccaccgtctctgcagcgttcacttccagggcggccgcaagacctacacggtacgcgtccccaccatcttcccgctgcgcggcgtcaatgagcgcaaagtagcgcgcagacccgctggggccgcggccgcccgccgcaggcagcagcagcaacagcagcagcagcagcaacagcagcaacagcagcagcagcagcaacagcagcagcagcagcagcagcagcagcagtcctcaccctctgcctccactgcccagactgcccagctgcagccgaacctggtatctgcttccgcggccgtgcttctcacccttcaggccactgtagacagcagtcaggctccgggatccgtacagccggcgcccatcactcccactggagaagacgtgaagcccatcgatctcacagtgcaagtggagtttgcagccgcagagggcgcagccgctgcggccgccgcgtcggagttacaggctgctaccgcagggctggaggctgccgagtgccctatgggcccccagttggtggtggtaggggaagagggcttccctgatactggctccgaccattcgtactccttgtcgtcaggcaccacggaggaggagctcctgcgcaagctgaatgagcagcgggacatcctggctctgatggaagtgaagatgaaagagatgaaaggcagcattcgccacctgcgtctcactgaggccaagctgcgcgaagaactgcgtgagaaggatcggctgcttgccatggctgtcatccgcaagaagcacggaatgtgaactggtgccccggcagcctgctggactcccagaccccatccagccaggggaccgcaggccattgttgaactcctctatactcctgggcactggttgacagtactgaggcttaaggcagctggactctcttgctggtgacctggcatcctcaattgtttcctcctgaagtggaagctggggccttagactctgccctggtgacaccagcaattatgactttgtctacccttcctccccagttattgttgcagattctggttaagcagaggcttcagaaccactgaacttgaaacttaccctctagggatgcaggtgggatgtccagggactataggtttgggaaaaccataccttaaggttggtcagcagtcagacaactctaatgtgtgtagtgataagagattcaagtaacatcagttctcctccttttcatgcttttccttcccaggtgcagcctgtgattctgatggggactggtaaatctgtgcctctgcctcctaggacttattttcccaggaggccatttacaaggggatctggatgacctgctgatggagatccagcttgccagggacttaggtttatcctgttttgtttgctactggttacaaattctattttctgtacaattagtcagactaaagttttcactgtgtttgtttggcaaaacaaattaaacaaaaagtaaggttttta

SEQ ID NO: 190726 - DNA, 833 bp, Homo sapiens
  Payload ID: 17677
  Gene Name: THAP domain containing 4
  ENST ID: ENST00000402545
  CDS Start-End: 76-654
aaacatttcccgtcaattggcagaaaacaaccttgaggaaccttgacgagtgtccggagtttagaaaacttagggatggagccccccaagatgaacccagtggtggagccactgtcctggatgctgggcacctggctgtcggacccacctggagccgggacctaccccacactgcagcccttccagtacctggaggaggttcacatctcccacgtgggccagcccatgctgaacttctcgttcaactccttccacccggacacgcgcaagccgatgcacagagagtgtggcttcattcgcctcaagcccgacaccaacaaggtggcctttgtcagcgcccagaacacaggcgtggtggaagtggaggagggcgaggtgaacgggcaggagctgtgcatcgcatcccactccatcgccaggatctccttcgccaaggagccccacgtagagcaggtgagcccagccctgctcccagcacgctcctgtcttctgtttgcagcggtctgtggagtcagcctcttcctcttccgtgagatcacccggaagttcaggctgaattctgaaggcaaacttgagcagacggtctccatggcaaccacgacacagccaatgactcagcatcttcacgtcacctacaagaaggtgaccccgtaaacctagagcttctggagccctcgggagggcctggctactgtgcctcaacggttcggctcctcaacagacagtccctgcggcagaagtgggtgtggccgtgagcctctgcaggctcaagagtgttgtccagatgtttctgtactggcatagaaaaaccaaataaaaggcctttattttta

SEQ ID NO: 190727 - DNA, 2367 bp, Homo sapiens
  Payload ID: 17677
  Gene Name: THAP domain containing 4
  Uniprot ID: Q8WY91
  ENST ID: ENST00000407315
  CDS Start-End: 433-2166
ggtggcgcttcctcctcttagaggacccaggagcagttgtcgaggcggcagaggcgagctctgtccccgtccgagcagccatcttgcggtacggacgtgctcggcgcgcccatgtcgcggtacggacttgccccgccggggcgactcccccgcccgtctgcccgcctgccgacggacgctgcgaggggcctgcggcgccccgctggtccgaagacgcccgaacccgcggctggcgaggacgcgggcgggggctggggcgggggcgggcccgctgcgggcgcctgcgcctccatcttgccgtacggcgcggacgccgcgggccggcccacgtcccgagccgtgtcgccgccgcgctccctccctcggggcggtccgcgggcgggcgggcggctagggccggggcctggctgcgcggctgggccaaggcccgcgatggtgatctgctgtgcggccgtgaactgctccaaccggcagggaaagggcgagaagcgcgccgtctccttccacaggttccccctaaaggactcaaaacgtctaatccaatggttaaaagctgttcagagggataactggactcccactaagtattcatttctctgtagtgagcatttcaccaaagacagcttctccaagaggctggaggaccagcatcgcctgctgaagcccacggccgtgccatccatcttccacctgaccgagaagaagaggggggctggaggccatggccgcacccggagaaaagatgccagcaaggccacagggggtgtgaggggacactcgagtgccgccaccagcagaggagctgcaggttggtcaccgtcctcgagtggaaacccgatggccaagccagagtcccgcaggttgaagcaagctgctctgcaaggtgaagccacacccagggcggcccaggaggccgccagccaggagcaggcccagcaagctctggaacggactccaggagatggactggccaccatggtggcaggcagtcagggaaaagcagaagcgtctgccacagatgctggcgatgagagcgccacttcctccatcgaagggggcgtgacagataagagtggcatttctatggatgactttacgcccccaggatctggggcgtgcaaatttatcggctcacttcattcgtacagtttctcctctaagcacacccgagaaaggccatctgtcccccgagagcccattgaccgcaagaggctgaagaaagatgtggaaccaagctgcagtgggagcagcctgggacccgacaagggcctggcccagagccctcccagctcatcacttaccgcgacaccgcagaagccttcccagagcccctctgcccctcctgccgacgtcaccccaaagccagccacggaagccgtgcagagcgagcacagcgacgccagccccatgtccatcaacgaggtcatcctgtcggcgtcaggggcctgcaagctcatcgactcactgcactcctactgcttctcctcccggcagaacaagagccaggtgtgctgcctgcgggagcaggtggagaagaagaacggcgagctgaagagcctgcggcagagggtcagccgctccgacagccaggtgcggaagctacaggagaagctggatgagctgaggagagtgagcgtcccctatccaagtagcctgctgtcgcccagccgcgagccccccaagatgaacccagtggtggagccactgtcctggatgctgggcacctggctgtcggacccacctggagccgggacctaccccacactgcagcccttccagtacctggaggaggttcacatctcccacgtgggccagcccatgctgaacttctcgttcaactccttccacccggacacgcgcaagccgatgcacagagagtgtggcttcattcgcctcaagcccgacaccaacaaggtggcctttgtcagcgcccagaacacaggcgtggtggaagtggaggagggcgaggtgaacgggcaggagctgtgcatcgcatcccactccatcgccaggatctccttcgccaaggagccccacgtagagcagatcacccggaagttcaggctgaattctgaaggcaaacttgagcagacggtctccatggcaaccacgacacagccaatgactcagcatcttcacgtcacctacaagaaggtgaccccgtaaacctagagcttctggagccctcgggagggcctggctactgtgcctcaacggttcggctcctcaacagacagtccctgcggcagaagtgggtgtggccgtgagcctctgcaggctcaagagtgttgtccagatgtttctgtactggcatagaaaaaccaaataaaaggcctttatttttatggctgaggattttgaatatta

SEQ ID NO: 190728 - DNA, 785 bp, Homo sapiens
  Payload ID: 17677
  Gene Name: THAP domain containing 4
  Uniprot ID: Q8WY91
  ENST ID: ENST00000402136
  CDS Start-End: 87-584
gagccaggtgcaaacatttcccgtcaattggcagaaaacaaccttgaggaaccttgacgagtgtccggagtttagaaaacttagggatggagccccccaagatgaacccagtggtggagccactgtcctggatgctgggcacctggctgtcggacccacctggagccgggacctaccccacactgcagcccttccagtacctggaggaggttcacatctcccacgtgggccagcccatgctgaacttctcgttcaactccttccacccggacacgcgcaagccgatgcacagagagtgtggcttcattcgcctcaagcccgacaccaacaaggtggcctttgtcagcgcccagaacacaggcgtggtggaagtggaggagggcgaggtgaacgggcaggagctgtgcatcgcatcccactccatcgccaggatctccttcgccaaggagccccacgtagagcagatcacccggaagttcaggctgaattctgaaggcaaacttgagcagacggtctccatggcaaccacgacacagccaatgactcagcatcttcacgtcacctacaagaaggtgaccccgtaaacctagagcttctggagccctcgggagggcctggctactgtgcctcaacggttcggctcctcaacagacagtccctgcggcagaagtgggtgtggccgtgagcctctgcaggctcaagagtgttgtccagatgtttctgtactggcatagaaaaaccaaataaaaggcctttatttttatggctgaggattttgaatatta

SEQ ID NO: 190729 - DNA, 969 bp, Homo sapiens
  Payload ID: 17677
  Gene Name: THAP domain containing 4
  ENST ID: ENST00000612200
  CDS Start-End: 184-693
gtggaaccaagctgcagtgggagcagcctgggacccgacaagggcctggcccagagccctcccagctcatcacttaccgcgacaccgcagaagccttcccagagcccctctgcccctcctgccgacgtcaccccaaagccagccacggaagccgtgcagagcgagcacagcgacgccagccccatgtccatcaacgaggtcatcctgtcggcgtcaggggcctgcaagctcatcgactcactgcactcctactgcttctcctcccggcagaacaagagccaggtgtgctgcctgcgggagcaggtggagaagaagaacggcgagctgaagagcctgcggcagagggtcagccgctccgacagccaggtgcggaagctacaggagaagctggatgagctgaggagagtgagcgtcccctatccaagtagcctgctgtcgcccagccgcgagccccccaagatgaacccagtggtggagccactgtcctggatgctgggcacctggctgtcggacccacctggagccgggacctaccccacactgcagcccttccagtacctggaggaggttcacatctcccacgtgggccagcccatgctgaacttctcgttcaactccttccacccggacacgcgcaagccgatgcacagagagtgtggcttcattcgcctcaagcccggaagttcaggctgaattctgaaggcaaacttgagcagacggtctccatggcaaccacgacacagccaatgactcagcatcttcacgtcacctacaagaaggtgaccccgtaaacctagagcttctggagccctcgggagggcctggctactgtgcctcaacggttcggctcctcaacagacagtccctgcggcagaagtgggtgtggccgtgagcctctgcaggctcaagagtgttgtccagatgtttctgtactggcatagaaaaaccaaataaaaggcctttattttt

SEQ ID NO: 190730 - DNA, 1568 bp, Homo sapiens
  Payload ID: 17678
  Gene Name: THAP domain containing 5
  Uniprot ID: Q7Z6K1
  ENST ID: ENST00000313516
  CDS Start-End: 402-1463
gtgaggccttggacctgtggcctttgggcttgggtgtctcctgtccgctctgccagtgagtcctcagctctccgtacgtggcccgtcgcccgcggcaagacggagggaaggcgctagttcagtttagctagcaatgcccttcttgcgcgaggactgctggctggtggcgaggcccaggagcctgtttgggtgttaacagttaaaacagtaaagtttgcgcgggcttctgtggttttcagtcttttccccacttcacgtgatctcatttcattgaacaacattaaccaccatttaagatacgtgaaacctgcgaagtggaaaggtgcacgcaaagttaatttacaccccccgcgagatttcctctacatgacaaagaaagactggaaaagtggttaaagaatatgaagcgagattcatgggttcccagtaaataccagtttctatgtagtgaccattttactcctgactctcttgacatcagatggggtattcgatatttaaaacaaactgcagttccaacaatattttctttgcctgaagacaatcagggaaaagacccttctaaaaaaaaatcccagaagaaaaacttggaagatgagaaagaagtatgcccaaaagccaagtcagaagaatcatttgtattaaatgagacaaagaaaaatatagttaacacagatgtgccccatcaacatccagaattacttcattcatcttccttggtaaagccaccagctcccaaaacaggaagtatacaaaataacatgttaactcttaatctagttaaacaacatactgggaaaccagaatctaccttggaaacatcagttaaccaagatacaggtagaggtggttttcacacatgttttgagaatctaaattctacaactattactttgacaacttcaaattcagaaagtattcatcaatctttggaaactcaagaagttcttgaagtaactaccagtcatcttgctaatccaaactttacaagtaattccatggaaataaagtcagcacaggaaaatccattcttattcagcacaattaatcaaacagttgaagaattaaacacaaataaagaatctgttattgccatttttgtacctgctgaaaattctaaaccctcagttaattcttttatatctgcacaaaaagaaaccacggaaatggaagacacagacattgaagactccttgtataaggatgtagactatgggacagaagttttacaaatcgaacattcttactgcagacaagatataaataaggaacatctttggcagaaagtctctaagctacattcaaagataactcttctagagttaaaagagcaacaaactctaggtagattgaagtctttggaagctcttataaggcagctaaagcaggaaaactggctatctgaagaaaacgtcaagattatagaaaaccattttacaacatatgaagtcactatgatatagaataactaggttttaaaactatggctgttaaataagctttttccagccaaaccaaactacatgtaaagtgaactgtttcctgtataaagttctcatcttaatgaa

SEQ ID NO: 190731 - DNA, 3306 bp, Homo sapiens
  Payload ID: 17678
  Gene Name: THAP domain containing 5
  Uniprot ID: Q7Z6K1
  ENST ID: ENST00000415914
  CDS Start-End: 155-1342
ggcggaagtgagtcgacagacgaggcggctttcccggcagaatgctagcgcaggcgcaggggctcgagaggcctggacctgtggcgcatcctcagtgaggagggccgccctgcatccgtcgccggccccggtctccaggggcctcacccgagtcatgccccgctattgcgcagcgatttgttgtaagaaccgccggggacgaaacaataaagaccggaagctgagtttttatccatttcctctacatgacaaagaaagactggaaaagtggttaaagaatatgaagcgagattcatgggttcccagtaaataccagtttctatgtagtgaccattttactcctgactctcttgacatcagatggggtattcgatatttaaaacaaactgcagttccaacaatattttctttgcctgaagacaatcagggaaaagacccttctaaaaaaaaatcccagaagaaaaacttggaagatgagaaagaagtatgcccaaaagccaagtcagaagaatcatttgtattaaatgagacaaagaaaaatatagttaacacagatgtgccccatcaacatccagaattacttcattcatcttccttggtaaagccaccagctcccaaaacaggaagtatacaaaataacatgttaactcttaatctagttaaacaacatactgggaaaccagaatctaccttggaaacatcagttaaccaagatacaggtagaggtggttttcacacatgttttgagaatctaaattctacaactattactttgacaacttcaaattcagaaagtattcatcaatctttggaaactcaagaagttcttgaagtaactaccagtcatcttgctaatccaaactttacaagtaattccatggaaataaagtcagcacaggaaaatccattcttattcagcacaattaatcaaacagttgaagaattaaacacaaataaagaatctgttattgccatttttgtacctgctgaaaattctaaaccctcagttaattcttttatatctgcacaaaaagaaaccacggaaatggaagacacagacattgaagactccttgtataaggatgtagactatgggacagaagttttacaaatcgaacattcttactgcagacaagatataaataaggaacatctttggcagaaagtctctaagctacattcaaagataactcttctagagttaaaagagcaacaaactctaggtagattgaagtctttggaagctcttataaggcagctaaagcaggaaaactggctatctgaagaaaacgtcaagattatagaaaaccattttacaacatatgaagtcactatgatatagaataactaggttttaaaactatggctgttaaataagctttttccagccaaaccaaactacatgtaaagtgaactgtttcctgtataaagttctcatcttaatgaacctatgagagtgttgtaaagttatgaactgtatcctattcttgtaatacttatttaagaaaaaccagagagttgggctggagagaaaagcagttttattacttgataattttccaaattaaaatttagcacatagaaggattcagttataacatgagaaaacaaagaagtgttcaaagagcacagactagaagtcaggttcaggaatcagtcctggttctaccactggcatatgacttgggcaagttacttatgattgtgcctcagtccctaatttgtaaaataagcacttactggatttgtaattggttatttatagtcccttccctttttattaagataattctattagaacacattttctgtaagataatatatacgtaatactagaagttggctagaatttgatgatattaaccatgtattattttcagtatttattgaattctgtggtctttgaccttttggctatagttacatattacagttatattatctgtaatagaaaggaagataaacttttttttttttttttttttttttttttttgagatggagtctcactctgtaacccaggctggagtgcagtggcctgatcttggctcactgcagcctctgcctcccgggttcaagtgattcttctgcctcagcttcccgagtagctgggattataggcacacaccaccacatccagcttatttttgtatttttagtagaaacggggtttcaccatgttggccgggctggcctcgaactcctgaccccaggtgatccacctaccttggcctcccaaagtgctgggattacaggcgtgagccaccgcgcctggccaagatagaacttttataattttattccagttgaactaaactaaggaaccacccattagcccagttcttaggagaggtacttcaaacttgaaagaatatgtatttcggtaacttatatgtggctaaccatcaaatacatagtcatctaagctaaactttctgtatttatacagttaaacttataaaccaaaaattttaatgaggttaattttaaatatattttagaaattacagtttgtatctgtttcttagtaggtgtggcctttaaaatatgtgcttattcattgttaaattccagaataatagagtaatacttaatactgtacattcccacttacgtatattttattaaaatttataagcaagaaattatacataagtggtcatgatcttagggagacaaagaatttctcttagaaaagagaagtaatggtaatgtaaataaaaatactgtttatattcacatgattttaagaaaactgtaaaagcaaagattttgtagtaatgacacaaatgtaacaaatagatgttttcttaaaattggcagtcagtataattatgtttctgcctatgatgttgaggaagttgtatcagtctgattcttagttttttcatctgttaagtagaacgtactattacttaccttaaagagtggctttgagaattttgtaaggaacaaacatgtttttggttctggaatataggaggtgctcaataaaagttgactctgactggcaaataatattgttttgtaaatgcatgatgattatttttggccatatttgacttagtttcattaggctaatattaattggtactatatgaaagtgagtcaactaattataaaagattagaaatgtcttaggtgacgatgggggaaaaacttaaaatttttgcataaattatggggagatgatagagttattacagtgttattaagtattcctatgttgcattttgcaaatacttaatttaatacagatgaaaataatcttgagtcacaataaagtaatgatatgttaagtttcaa

SEQ ID NO: 190732 - DNA, 868 bp, Homo sapiens
  Payload ID: 17678
  Gene Name: THAP domain containing 5
  ENST ID: ENST00000438865
  CDS Start-End: 182-349
cgaaaaggcggtgcttaaaccggaggaggcggaagtgagtcgacagacgaggcggctttcccggcagaatgctagcgcaggcgcaggggctcgagaggcctggacctgtggcgcatcctcagtgaggagggccgccctgcatccgtcgccggccccggtctccaggggcctcacccgagtcatgccccgctattgcgcagcgatttgttgtaagaaccgccggggacgaaacaataaagaccggaagctgagtttttatccatttcctctacatgacaaagaaagactggaaaagtggttaaagaatatgaagcgagattcatgggttcccaggaaaagacccttctaaaaaaaaatcccagaagaaaaacttggaagatgagaaagaagtatgcccaaaagccaagtcagaagaatcatttgtattaaatgagacaaagaaaaatatagttaacacagatgtgccccatcaacatccagaattacttcattcatcttccttggtaaagccaccagctcccaaaacaggaagtatacaaaataacatgttaactcttaatctagttaaacaacatactgggaaaccagaatctaccttggaaacatcagttaaccaagatacaggtagaggtggttttcacacatgttttgagaatctaaattctacaactattactttgacaacttcaaattcagaaagtattcatcaatctttggaaactcaagaagttcttgaagtaactaccagtcatcttgctaatccaaactttacaagtaattccatggaaataaagtcagcacaggaaaatccattcttattcagcacaattaatcaaacagttgaagaattaaacacaaataaagaatc

SEQ ID NO: 190733 - DNA, 3549 bp, Homo sapiens
  Payload ID: 17679
  Gene Name: THAP domain containing 6
  Uniprot ID: Q8TBB0
  ENST ID: ENST00000311638
  CDS Start-End: 69-737
agacgcagtctccgtcgttgacgttagtcgcagtcttcgctgctaacgttttgttatgagttgctaaaatggtgaaatgctgctccgccattggatgtgcttctcgctgcttgccaaattcgaagttaaaaggactgacatttcacgtattccccacagatgaaaacatcaaaaggaaatgggtattagcaatgaaaagacttgatgtgaatgcagccggcatttgggagcctaaaaaaggagatgtgttgtgttcgaggcactttaagaagacagattttgacagaagtgctccaaatattaaactgaaacctggagtcataccttctatctttgattctccatatcacctacaggggaaaagagaaaaacttcattgtagaaaaaacttcaccctcaaaaccgttccagccactaactacaatcaccatcttgttggtgcttcctcatgtattgaagaattccaatcccagttcatttttgaacatagctacagtgtaatggacagtccaaagaaacttaagcataaattagatcatgtgatcggcgagctagaggatacaaaggaaagtctacggaatgttttagaccgagaaaaacgttttcagaaatcattgaggaagacaatcagggaattaaaggatgaatgtctgatcagccaagaaacagcaaatagactggacactttctgttgggactgttgtcaggagagcatagaacaggactatatttcatgaaataatttcatgttacgttccacctaaaattgtcattggtacaaatttttataaaatctcatttaccatcactaaataatatccatcatttaaagtgctgctttggattctctggagcattatgcattatagttgttatccaaagacttttttgaaaatatgcagaaatttgtggtaattatgtatttgtgtcttgtgacaattatgttttatagacctacactagtgccaggtcactattgtaagatgttaaaatctcaagaaaatttcacagagctaaagaaatgatgtcaaattagtcacattaagctatagtagaaggaattggacacttctccagatatttggcttcaaaggagtacctttacttacatgtgctttatggtaagtacattgaattttactttaaatgcattttactacaaagcacaattcatttgtaatgcatatccatcttggattcaatccaaggtgctttagctatcagtagtaccaaaggatctttttacaaggcttcctgtggtattgactctgagaataacacatagtgaagatctgtgggcttttaaaattgttcacagccaatttaagaagacccctcatgaagtctcagttttcagtacagtacatcattcctcctcactaggagcactttgatgtaaaccagaatagctttaaaaagacaaaaaggatcgtagatctgatttttaaatggttggttgctctgacagatctgaacactttgcttcatgactatttcgtcataaaggtatatgtttaaaatctgaatggcagtactagctctatacttttaatactgctttgtattttatatgtaaagtagtattgctgacattttaaaaaaatacaaaatacaaaagaaaccattagaaattaataactgtggctcttccagttgaaataggaattggagagaaaggattagaatattttaattaggggagtagattattgtccaaaggcttttatttagagaaacgggtaattaaaacagcagctttagaatagcttcttactgaatatgcaaaagaataattccttgttatttcctaattgatccaagtctcataaatttagcttttgtcataattccttaccgaaaacaactgaaattgagagtcataaatactgtgggttagaataaaaaccatttgccaaagcaacactctacttagaagcacatgtacatacatggacctcattcagaagtccatgttgtagcagttagaatttgagtatcagccatttcattgtagtaacaaaaattgaattgcattttgtgctcagttgtttattgtaattttatttttgttacattaatattagttaagatatggtcacttgaattttttgtatttaagaattttctgttttaatgcatgttatacttttatgtaggattccaaaccttccctctaaatgggatttaacccacatctgcgagatcagcgttatgctaagaggaaatcactgaggccatatctttttacaatctgaaaaaaaagtagtaaaaaggtagttaaaaaaaaaaaaggccgggtggtggctcatacctgtaatcctagcactttgggaggccaaggcaggcagatcacttgaggtcaggggttcaaaaccagcctggccaagatggtgaaaccccatctctgctaaaaatacaaaaaaaaattagccgggcatggtggcacgtgcctgtaatcccagctacttgggagactgaggcaggagaattgcttgaacccgggaggcggagattgcagtgagccaagatcacgccgttgcactccagcctgagcaacagagcaagactccatctcaaaaaaacaaaactactttcattaattacccattatttattttagttacttaattttgagttcataaatggccaccctaatggaaagtttgggtatgatcttaggttttatggagatgttttcaatagagattatttttccctcaccctatttgtgaatatataaattaaagtaagacaatggagtaagtaagagggtagatccaaacacagtatgtctaaattctagcactctactggctgcttagaatacaccaaacctggaagacctttccaagagtaaaatcccagtctgccactatcaaaattgccacagtcacttttactacttgtgttcatagtagactcagcacttctttttcactggacctagtataactgagaaataaataactgtgtgcaaaatattggtatcattaaggacccagagctgcccattttctctttgttctaatagggaagcaattactgatagaaatgtgagattaaaaatagggtcctccctgctgctccaaacaaatgcctaaacacagtatgtatctcagtcctctgttcccagagattccaccctagcccaggaaagaactggcctgtgtaaagcaaaacccaagtcatccccctccagaaatttctctggcagccaagcctgaccctaagggttccactttgctttaaaagctaggagtggcctctagagccaggaacacattaatacaacagttcaacctcagcaccaagtcaggtacgaagcgcttgatacgtggaatttttctctatatcaagtttaaatttctggaaatagactttggttgctaatgacaattacagttataccatagtctgtaatttgagaaaaggtgaaatgtatttaatatatatttagttttaataaaaagataaaattattacagaaataattgagagagagaaaatctattataatttatttgaaaaataaaacattttatccagtaa

SEQ ID NO: 190734 - DNA, 3423 bp, Homo sapiens
  Payload ID: 17679
  Gene Name: THAP domain containing 6
  Uniprot ID: Q8TBB0
  ENST ID: ENST00000380837
  CDS Start-End: 69-611
agacgcagtctccgtcgttgacgttagtcgcagtcttcgctgctaacgttttgttatgagttgctaaaatggtgaaatgctgctccgccattggatgtgcttctcgctgcttgccaaattcgaagttaaaaggactgacatttcacgtattccccacagatgaaaacatcaaaaggaaatgggtattagcaatgaaaagacttgatgtgaatgcagccggcatttgggagcctaaaaaaggagatgtgttgtgttcgaggcactttaagaagacagattttgacagaagtgctccaaatattaaactgaaacctggagtcataccttctatctttgattctccatatcacctacaggaacatagctacagtgtaatggacagtccaaagaaacttaagcataaattagatcatgtgatcggcgagctagaggatacaaaggaaagtctacggaatgttttagaccgagaaaaacgttttcagaaatcattgaggaagacaatcagggaattaaaggatgaatgtctgatcagccaagaaacagcaaatagactggacactttctgttgggactgttgtcaggagagcatagaacaggactatatttcatgaaataatttcatgttacgttccacctaaaattgtcattggtacaaatttttataaaatctcatttaccatcactaaataatatccatcatttaaagtgctgctttggattctctggagcattatgcattatagttgttatccaaagacttttttgaaaatatgcagaaatttgtggtaattatgtatttgtgtcttgtgacaattatgttttatagacctacactagtgccaggtcactattgtaagatgttaaaatctcaagaaaatttcacagagctaaagaaatgatgtcaaattagtcacattaagctatagtagaaggaattggacacttctccagatatttggcttcaaaggagtacctttacttacatgtgctttatggtaagtacattgaattttactttaaatgcattttactacaaagcacaattcatttgtaatgcatatccatcttggattcaatccaaggtgctttagctatcagtagtaccaaaggatctttttacaaggcttcctgtggtattgactctgagaataacacatagtgaagatctgtgggcttttaaaattgttcacagccaatttaagaagacccctcatgaagtctcagttttcagtacagtacatcattcctcctcactaggagcactttgatgtaaaccagaatagctttaaaaagacaaaaaggatcgtagatctgatttttaaatggttggttgctctgacagatctgaacactttgcttcatgactatttcgtcataaaggtatatgtttaaaatctgaatggcagtactagctctatacttttaatactgctttgtattttatatgtaaagtagtattgctgacattttaaaaaaatacaaaatacaaaagaaaccattagaaattaataactgtggctcttccagttgaaataggaattggagagaaaggattagaatattttaattaggggagtagattattgtccaaaggcttttatttagagaaacgggtaattaaaacagcagctttagaatagcttcttactgaatatgcaaaagaataattccttgttatttcctaattgatccaagtctcataaatttagcttttgtcataattccttaccgaaaacaactgaaattgagagtcataaatactgtgggttagaataaaaaccatttgccaaagcaacactctacttagaagcacatgtacatacatggacctcattcagaagtccatgttgtagcagttagaatttgagtatcagccatttcattgtagtaacaaaaattgaattgcattttgtgctcagttgtttattgtaattttatttttgttacattaatattagttaagatatggtcacttgaattttttgtatttaagaattttctgttttaatgcatgttatacttttatgtaggattccaaaccttccctctaaatgggatttaacccacatctgcgagatcagcgttatgctaagaggaaatcactgaggccatatctttttacaatctgaaaaaaaagtagtaaaaaggtagttaaaaaaaaaaaaggccgggtggtggctcatacctgtaatcctagcactttgggaggccaaggcaggcagatcacttgaggtcaggggttcaaaaccagcctggccaagatggtgaaaccccatctctgctaaaaatacaaaaaaaaattagccgggcatggtggcacgtgcctgtaatcccagctacttgggagactgaggcaggagaattgcttgaacccgggaggcggagattgcagtgagccaagatcacgccgttgcactccagcctgagcaacagagcaagactccatctcaaaaaaacaaaactactttcattaattacccattatttattttagttacttaattttgagttcataaatggccaccctaatggaaagtttgggtatgatcttaggttttatggagatgttttcaatagagattatttttccctcaccctatttgtgaatatataaattaaagtaagacaatggagtaagtaagagggtagatccaaacacagtatgtctaaattctagcactctactggctgcttagaatacaccaaacctggaagacctttccaagagtaaaatcccagtctgccactatcaaaattgccacagtcacttttactacttgtgttcatagtagactcagcacttctttttcactggacctagtataactgagaaataaataactgtgtgcaaaatattggtatcattaaggacccagagctgcccattttctctttgttctaatagggaagcaattactgatagaaatgtgagattaaaaatagggtcctccctgctgctccaaacaaatgcctaaacacagtatgtatctcagtcctctgttcccagagattccaccctagcccaggaaagaactggcctgtgtaaagcaaaacccaagtcatccccctccagaaatttctctggcagccaagcctgaccctaagggttccactttgctttaaaagctaggagtggcctctagagccaggaacacattaatacaacagttcaacctcagcaccaagtcaggtacgaagcgcttgatacgtggaatttttctctatatcaagtttaaatttctggaaatagactttggttgctaatgacaattacagttataccatagtctgtaatttgagaaaaggtgaaatgtatttaatatatatttagttttaataaaaagataaaattattacagaaataattgagagagagaaaatctattataatttatttgaaaaataaaacattttatccagtaa

SEQ ID NO: 190735 - DNA, 313 bp, Homo sapiens
  Payload ID: 17679
  Gene Name: THAP domain containing 6
  ENST ID: ENST00000506261
  CDS Start-End: 74-313
cagagaccactgtgcaagcctaatcacttcccaagaagggttttgctttaaagttttgttatgagttgctaaaatggtgaaatgctgctccgccattggatgtgcttctcgctgcttgccaaattcgaagttaaaaggactgacatttcacgtattccccacagatgaaaacatcaaaaggaaatgggtattagcaatgaaaagacttgatgtgaatgcagccggcatttgggagcctaaaaaaggagatgtgttgtgttcgaggcactttaagaagacagattttgacagaagtgctccaaatattaaactg

SEQ ID NO: 190736 - DNA, 1161 bp, Homo sapiens
  Payload ID: 17679
  Gene Name: THAP domain containing 6
  Uniprot ID: Q8TBB0
  ENST ID: ENST00000514480
  CDS Start-End: 493-1161
ggtaataactcttaggttgcctgttttcccccaatcgctacccgcccaaatctcagggcgtagttcggcgcgaggttggcggcagcggcgcggagacgctggttggccccagaggaaaggacgctcactgggcgcatcgttacctgtgacgggtcctccctctctccctccggtggcggggagcctggagaaaggggcggagctcggcccgggccctgggctcagcgggtcccgcgcgctgctcttggacgccagggtgctcgctggcacctcgaagtgcttcttgcttcctccctttcccgtttacttgctgttctttcaaaatatgtactgacattcactattgccagtcaccagctaaaccgtgaggacaaaaagtaaggaaaaatagacacactccaccatgacctcatggaactaacaagactggtggaggaggaagacattaataagagcaatcactgcaataaatttttgttatgagttgctaaaatggtgaaatgctgctccgccattggatgtgcttctcgctgcttgccaaattcgaagttaaaaggactgacatttcacgtattccccacagatgaaaacatcaaaaggaaatgggtattagcaatgaaaagacttgatgtgaatgcagccggcatttgggagcctaaaaaaggagatgtgttgtgttcgaggcactttaagaagacagattttgacagaagtgctccaaatattaaactgaaacctggagtcataccttctatctttgattctccatatcacctacaggggaaaagagaaaaacttcattgtagaaaaaacttcaccctcaaaaccgttccagccactaactacaatcaccatcttgttggtgcttcctcatgtattgaagaattccaatcccagttcatttttgaacatagctacagtgtaatggacagtccaaagaaacttaagcataaattagatcatgtgatcggcgagctagaggatacaaaggaaagtctacggaatgttttagaccgagaaaaacgttttcagaaatcattgaggaagacaatcagggaattaaaggatgaatgtctgatcagccaagaaacagcaaatagactggacactttctgttgggactgttgtcaggagagcatagaacaggactatatttcatga

SEQ ID NO: 190737 - DNA, 896 bp, Homo sapiens
  Payload ID: 17679
  Gene Name: THAP domain containing 6
  ENST ID: ENST00000507885
  CDS Start-End: 92-451
agacgcagtctccgtcgttgacgttagtcgcagtcttcgctgctaacgattccccacagatgaaaacatcaaaaggaaatgggtattagcaatgaaaagacttgatgtgaatgcagccggcatttgggagcctaaaaaaggagatgtgttgtgttcgaggcactttaagaagacagattttgacagaagtgctccaaatattaaactgaaacctggagtcataccttctatctttgattctccatatcacctacaggggaaaagagaaaaacttcattgtagaaaaaacttcaccctcaaaaccgttccagccactaactacaatcaccatcttgttggtgcttcctcatgtattgaagaattccaatcccagttcatttttaaacacaggaaaaggaaacaagaacaggaagaagaacaaaaaccaagaagagagaaatgcatttcatagggaatggcaagtggacaggcaacagtggtcagatatccatgttcaagaggaaatgtttgttcaaggcaaaaaattatttctcagtaaccatcatagctaacatttataagagacagagtctcactccatcacccaggctggagtgcagtggcgcaatctcggctcatcactccgtcgcccaggctggaatgcagtggcgcaatctcggctcactacaacctctgcctcccaagttcaagtgattctcatgcttcagcctcctgatcagctgggactacaggagtgcaccaccatgcccagctaatttttgtattttttggtagagacggagtttcaccatgttggccaggctggtctcaaacttctggcttcaagtgataccccccaacctcggcctcccaaagtgctagaattacaggtgtgagtccccaccaccacatctggc

SEQ ID NO: 190738 - DNA, 542 bp, Homo sapiens
  Payload ID: 17679
  Gene Name: THAP domain containing 6
  ENST ID: ENST00000507557
  CDS Start-End: 121-390
tcccggggctacgaggcggaagcgaaggcagacgcagtctccgtcgttgacgttagtcgcagtcttcgctgctaacgattccccacagatgaaaacatcaaaaggaaatgggtattagcaatgaaaagacttgatgtgaatgcagccggcatttgggagcctaaaaaaggagatgtgttgtgttcgaggcactttaagaagacagattttgacagaagtgctccaaatattaaactgaaacctggagtcataccttctatctttgattctccatatcacctacagatatccatgttcaagaggaaatgtttgttcaaggcaaaaaattatttctcagtaaccatcatagctaacatttataaggtgccaatctttattcaaagcacttaaactttattaactcatttaacttcacaacaaccctataagagacagagtctcactccatcacccaggctggagtgcagtggcgcaatctcggctcatcactccgtcgcccaggctggaatgcagtggcgcaatctcggctcactacaacctct

SEQ ID NO: 190739 - DNA, 543 bp, Homo sapiens
  Payload ID: 17679
  Gene Name: THAP domain containing 6
  ENST ID: ENST00000504218
  CDS Start-End: 446-543
atagtgctcgcagccccgctgacctcgctcttgaccgctggcgccatcttcccgggccgtcgccgccatctcctccacctcccctcacattccaccgatccttcccccaggataaaaaccacgcccagagaagctgcgcctctctagcacacccctcccagccccagcggccactagcgacaatatggctcctaagcacgtgacccggggcagacggatttccggttcccggggctacgaggcggaagcgaaggcagacgcagtctccgtcgttgacgttagtcgcagtcttcgctgctaacgtcaccagctaaaccgtgaggacaaaaagtaaggaaaaatagacacactccaccatgacctcatggaactaacaagactggtggaggaggaagacattaataagagcaatcactgcaataaatttttgttatgagttgctaaaatggtgaaatgctgctccgccattggatgtgcttctcgctgcttgccaaattcgaagttaaaaggactgacatttcacgtattccccacagatgaaaa

SEQ ID NO: 190740 - DNA, 1004 bp, Homo sapiens
  Payload ID: 17679
  Gene Name: THAP domain containing 6
  ENST ID: ENST00000504190
  CDS Start-End: 92-325
agacgcagtctccgtcgttgacgttagtcgcagtcttcgctgctaacgattccccacagatgaaaacatcaaaaggaaatgggtattagcaatgaaaagacttgatgtgaatgcagccggcatttgggagcctaaaaaaggagatgtgttgtgttcgaggcactttaagaagacagattttgacagaagtgctccaaatattaaactgaaacctggagtcataccttctatctttgattctccatatcacctacagaaacacaggaaaaggaaacaagaacaggaagaagaacaaaaaccaagaagagagaaatgcatttcatagggaatggcaagtggacaggcaacagtggtcagatatccatgttcaagaggaaatgtttgttcaaggcaaaaaattatttctcagtaaccatcatagctaacatttataaggtgccaatctttattcaaagcacttaaactttattaactcatttaacttcacaacaaccctataaggtaggtactattattattattctcattttacagaagaggaaattaaacagagaaaagctaggtaatttgcccaaggtttcacagctggtataacgatgtcttcatatcattatatgaagtcacgttgttgtttgttctgatctacaatgcaagagccagagacttttgttttgttttgttttgtctttttttatttattctggagacccagagactttgattcactcattgttgaattgttgctgaacattcacaatgtcttaaaggccagacttcagtcactccatttggaagctccagttggggcatttagaggctgaaggataaaatgtgaactcatcttgtgtctgaagctgaggaaagcccatagttactcattaccacaatctggatctgtctgatgctactgccaagcataaacagggcagatgcacactcaggatgaagtcaccttaccacatacacaggcaaaacattcaaatatccacaggtctcaccagcaa

SEQ ID NO: 190741 - DNA, 582 bp, Homo sapiens
  Payload ID: 17679
  Gene Name: THAP domain containing 6
  ENST ID: ENST00000502620
  CDS Start-End: 86-382
agtctccgtcgttgacgttagtcgcagtcttcgctgctaacgattccccacagatgaaaacatcaaaaggaaatgggtattagcaatgaaaagacttgatgtgaatgcagccggcatttgggagcctaaaaaaggagatgtgttgtgttcgaggcactttaagaagacagattttgacagaagtgctccaaatattaaactgaaacctggagtcataccttctatctttgattctccatatcacctacagatatccatgttcaagaggaaatgtttgttcaaggcaaaaaattatttctcagtaaccatcatagctaacatttataagggtcttactctgtcacccaggctgatgtgcagtggtaccatcagctcactgtagcctcgacctcccaggctcaagtgatccttccacctcagcctcccaagtagctggaactacaggtgacttagatacagacactgaacagacaaaccaatgaataattccgtcttggttgacaattggttgggacaagttcacatgccaagatgtcactgaaccacaagatcctacagtcactgacaactatttcctaacat

SEQ ID NO: 190742 - DNA, 1103 bp, Homo sapiens
  Payload ID: 17679
  Gene Name: THAP domain containing 6
  ENST ID: ENST00000508105
  CDS Start-End: 92-427
agacgcagtctccgtcgttgacgttagtcgcagtcttcgctgctaacgattccccacagatgaaaacatcaaaaggaaatgggtattagcaatgaaaagacttgatgtgaatgcagccggcatttgggagcctaaaaaaggagatgtgttgtgttcgaggcactttaagaagacagattttgacagaagtgctccaaatattaaactgaaacctggagtcataccttctatctttgattctccatatcacctacaggggaaaagagaaaaacttcattgtagaaaaaacttcaccctcaaaaccgttccagccactaactacaatcaccatcttgttggtgcttcctcatgtattgaagaattccaatcccagttcatttttgtaagtaaattacttgctgagctcatgttaattcttttaagatgaatatgtcctctccattacaatcaaatttttcagaatcctagcaaaatctaggggttaatatgtaatatctacaaataatattgcttcctagagtcattgtaatttatatatatgcaacagcaaaatagaggtagttaatcctttggttacatatgtagttcactgaagaaggcttttgcaaggatatttctaccaaggaaataattcttccctctaactgctataatttccgtatgaaatatgtaataaaaaatagctatttaagttttctcagtcatacacatacagagtattcaagcttgcatttatttattcatctcattgcttattcatgttagaggcaggcatggaatctagatctcttttactatcttgattaatacaggtttataataattttttctatttttgtgggtacatagtaggtatgtatatttataggatacatgagatttatttaggtatacaatgcatgataatcacattagggtaaatagggtatccatcacattaagcatttatcttttatgttacaaaaaatccaattatacttttagttatttttaaatatacaataaattattgttggctatcgtcaccccattgtactatcaaatactagatcttagtctgtctaactatatttctgtacccattaaccatccccacctccccc

SEQ ID NO: 190743 - DNA, 1134 bp, Homo sapiens
  Payload ID: 17679
  Gene Name: THAP domain containing 6
  Uniprot ID: Q8TBB0
  ENST ID: ENST00000507556
  CDS Start-End: 69-551
agacgcagtctccgtcgttgacgttagtcgcagtcttcgctgctaacgttttgttatgagttgctaaaatggtgaaatgctgctccgccattggatgtgcttctcgctgcttgccaaattcgaagttaaaaggactgacatttcacgtattccccacagatgaaaacatcaaaaggaaatgggtattagcaatgaaaagacttgatgtgaatgcagccggcatttgggagcctaaaaaaggagatgtgttgtgttcgaggcactttaagaagacagattttgacagaagtgctccaaatattaaactgaaacctggagtcataccttctatctttgattctccatatcacctacaggggaaaagagaaaaacttcattgtagaaaaaacttcaccctcaaaaccgttccagccactaactacaatcaccatcttgttggtgcttcctcatgtattgaagaattccaatcccagttcatttttaaacacaggaaaaggaaacaagaacaggaagaagaacaaaaaccaagaagagagaaatgcatttcatagggaatggcaagtggacaggcaacagtggtcagatatccatgttcaagaggaaatgtttgttcaaggcaaaaaattatttctcagtaaccatcatagctaacatttataaggtgccaatctttattcaaagcacttaaactttattaactcatttaacttcacaacaaccctataaggtaggtactattattattattctcattttacagaagaggaaattaaacagagaaaagctaggtaatttgcccaaggtttcacagctggtataacgatgtcttcatatcattatatgaagtcacgttgttgtttgttctgatctacaatgcaagagccagagacttttgttttgttttgttttgtctttttttatttattctggagacccagagactttgattcactcattgttgaattgttgctgaacattcacaatgtcttaaaggccagacttcagtcactccatttggaagctccagttggggcatttagaggctgaaggataaaatgtgaactcatcttgtgtctgaagctgaggaaagcccatagttactcattaccacaatctggatctgtctgatgctac

SEQ ID NO: 190744 - DNA, 1213 bp, Homo sapiens
  Payload ID: 17680
  Gene Name: THAP domain containing 7
  Uniprot ID: Q9BT49
  ENST ID: ENST00000215742
  CDS Start-End: 176-1105
cgtgagtgccgctgacagaagtcaagagaatcggctgggacggggttggggcgacaacgggccgggggggacccgacaggccagagccccttggggaggagcggcggctggaggcgcgaggctcctccggatgcccggagagccgcttgcgacttaactcccgcctctttcccagatgccgcgtcactgctccgccgccggctgctgcacacgggacacgcgcgagacgcgcaaccgcggcatctccttccacagacttcccaagaaggacaacccgaggcgaggcttgtggctggccaactgccagcggctggaccccagcggccagggcctgtgggacccggcatccgagtacatctacttctgctccaaacactttgaggaggactgctttgagctggtgggaatcagtggatatcacaggctaaaggagggggcagtccccaccatatttgagtctttctccaagttgcgccggacaaccaagaccaaaggacacagttacccacctggccccgctgaagtcagccggctcagacgatgcaggaagcgctgctccgagggccgagggcccacaactccattttctccacctccacctgctgatgtcacctgctttcctgtggaagaggcctcagcacctgccactttgccggcctccccagctgggaggctggagcctggccttagcagccccttttcagacctactgggccccttgggtgcccaggcagatgaagcaggctgcagcgcccagccttcaccagagcggcagccctcccctctcgaaccacggccagtctccccctcagcgtatatgctgcgcctgcccccacccgccggagcctacatccagaatgaacacagctaccaggtgggcagcgccttactctggaagcggcgagccgaggcagcccttgatgcccttgacaaggcccagcgccagctgcaggcctgcaagcggcgggagcagcggctgcggttgagactgaccaagctgcagcaggagcgggcacgggagaagcgggcacaggcagatgcccgccagactctgaaggagcatgtgcaggactttgccatgcagctgagcagcagcatggcctgaggggctgctggactgaccgaggggctgcccagcaagactgcagcctcttcctccctcagatcccaccagacccaccaggtgccataataaagcggattctagacggag

SEQ ID NO: 190745 - DNA, 1144 bp, Homo sapiens
  Payload ID: 17680
  Gene Name: THAP domain containing 7
  Uniprot ID: Q9BT49
  ENST ID: ENST00000399133
  CDS Start-End: 112-1041
cccgccccgccccggtggcgggggcacctccggctctccagtctctatggtaccaacttccggcgcgcgctacccctcgcgagacttcggcggcgcagcaatggccagagcatgccgcgtcactgctccgccgccggctgctgcacacgggacacgcgcgagacgcgcaaccgcggcatctccttccacagacttcccaagaaggacaacccgaggcgaggcttgtggctggccaactgccagcggctggaccccagcggccagggcctgtgggacccggcatccgagtacatctacttctgctccaaacactttgaggaggactgctttgagctggtgggaatcagtggatatcacaggctaaaggagggggcagtccccaccatatttgagtctttctccaagttgcgccggacaaccaagaccaaaggacacagttacccacctggccccgctgaagtcagccggctcagacgatgcaggaagcgctgctccgagggccgagggcccacaactccattttctccacctccacctgctgatgtcacctgctttcctgtggaagaggcctcagcacctgccactttgccggcctccccagctgggaggctggagcctggccttagcagccccttttcagacctactgggccccttgggtgcccaggcagatgaagcaggctgcagcgcccagccttcaccagagcggcagccctcccctctcgaaccacggccagtctccccctcagcgtatatgctgcgcctgcccccacccgccggagcctacatccagaatgaacacagctaccaggtgggcagcgccttactctggaagcggcgagccgaggcagcccttgatgcccttgacaaggcccagcgccagctgcaggcctgcaagcggcgggagcagcggctgcggttgagactgaccaagctgcagcaggagcgggcacgggagaagcgggcacaggcagatgcccgccagactctgaaggagcatgtgcaggactttgccatgcagctgagcagcagcatggcctgaggggctgctggactgaccgaggggctgcccagcaagactgcagcctcttcctccctcagatcccaccagacccaccaggtgccataataaagcggattctaga

SEQ ID NO: 190746 - DNA, 1825 bp, Homo sapiens
  Payload ID: 17681
  Gene Name: THAP domain containing 8
  Uniprot ID: Q8NA92
  ENST ID: ENST00000292894
  CDS Start-End: 546-1370
cacagccagtgtactggatgcctgattaagcgtcatggggtctttcatccagactgcgttttcattattcgctgaaacatacaggttttaatttttacgaggctaaggccacggccgcctcacctcggtttttgccgccacctagaggaactatgtgcgccccaacggttgcccggatgtaggcgtagggtggagccgtaagagattgactagccagttgatttggttggcgcaggctcagaaacgccgtgacgccgcccttccccccaacacgtgatgaaagtcggggtgacgaagggccggctttgcgcaggtgcacagtactcgctatggcccattcgtcacgtgacgagggcgggactgtggcactgtggaggggcgcctagtaggcaggcgctctcagctctctccccggtacgtgacgagactccacggacgtcacgtgaggcaggcggcgagcgcgggtggggcggggttaggcggcgctccgcgagaaccaaagtgcagccgctgacccggcaaaactcagcgggggctggatagccatgcccaagtactgcagggcgccgaactgctccaacactgcgggccgcctgggtgcagacaaccgccctgtgagcttctacaagttcccactgaaggatggtccccggctgcaggcctggctgcagcacatgggctgtgagcactgggtgcccagctgccaccagcacttgtgcagcgagcacttcacaccctcctgcttccagtggcgctggggtgtgcgctacctgcggcctgatgcagtgccctccatcttctcccggggaccacctgccaagagtcagcggaggacccgaagcacccagaagccagtctcgccgccgcctcccctacagaagaatacacccctgccccagagccctgccatcccagtctctggcccagtgcgcctagtggtgctgggccccacatcggggagccccaagactgtggccaccatgctcctgacccccctggcccctgcgccaactcctgagcggtcacaacctgaagtccctgcccaacaggcccagaccgggctgggcccagtgctgggagcactgcaacgccgggtgcggaggctgcaacggtgccaggagcggcaccaggcgcagctgcaggccctggaacggctggcacagcagctacacggggagagcctgctggcacgggcacgccggggtctgcagcgcctgacaacagcccagacccttggacctgaggaatcccaaaccttcaccatcatctgtggagggcctgacatagccatggtccttgcccaggaccctgcacctgccacagtggatgccaagccggagctcctggacactcggatccccagtgcataaggatcaagacagacaatgtcgagggacaaaagatagaagatggaggaggaaagacattatacgtgggcttggcccagccccaccgcccacgcctgggtagtagcagtgcctccctcaagggcctgggttctaccaccccactcctagggatctcttgaaccttaggggtgacctgggcccaagtctctcatcagcccccaatcccctgggtaccaggcttctgccacccccggctcagatctttgcaaatcagtacgacagcctcagagcagagcaagggttgtttgggagaatcatacctggttctaaggagtcccacgctttttgccaagcctggtactgagttcatgataccatggtggacacagctgagaaaatccctgccctcatggtgctcattctacttgagtagacgatgaactagtaaacaaataaacaagaacactgcagacatg

SEQ ID NO: 190747 - DNA, 1084 bp, Homo sapiens
  Payload ID: 17681
  Gene Name: THAP domain containing 8
  ENST ID: ENST00000522483
  CDS Start-End: 161-358
gtaggcaggcgctctcagctctctccccggtacgtgacgagactccacggacgtcacgtgaggcaggcggcgagcgcgggtggggcggggttaggcggcgctccgcgagaaccaaagtgcagccgctgacccggcaaaactcagcgggggctggatagccatgcccaagtactgcagggcgccgaactgctccaacactgcgggccgcctgggtgcagacaaccgccctgtgagcttctacaaagtcagcggaggacccgaagcacccagaagccagtctcgccgccgcctcccctacagaagaatacacccctgccccagagccctgccatcccagtctctggcccagtgcgcctagtggtgctgggccccacatcggggagccccaagactgtggccaccatgctcctgacccccctggcccctgcgccaactcctgagcggtcacaacctgaagtccctgcccaacaggcccagaccgggctgggcccagtgctgggagcactgcaacgccgggtgcggaggctgcaacggtgccaggagcggcaccaggcgcagctgcaggccctggaacggctggcacagcagctacacggggagagcctgctggcacgggcacgccggggtctgcagcgcctgacaacagcccagacccttggacctgaggaatcccaaaccttcaccatcatctgtggagggcctgacatagccatggtccttgcccaggaccctgcacctgccacagtggatgccaagccggagctcctggacactcggatccccagtgcataaggatcaagacagacaatgtcgagggacaaaagatagaagatggaggaggaaagacattatacgtgggcttggcccagccccaccgcccacgcctgggtagtagcagtgcctccctcaagggcctgggttctaccaccccactcctagggatctcttgaaccttaggggtgacctgggcccaagtctctcatcagcccccaatcccctgggtaccaggcttctgccacccccggctcagatctttgcaaatcagtacgacagcctcagagcagagcaagggttgtttgggaga

SEQ ID NO: 190748 - DNA, 842 bp, Homo sapiens
  Payload ID: 17681
  Gene Name: THAP domain containing 8
  ENST ID: ENST00000607730
  CDS Start-End: 185-310
tgtggcactgtggaggggcgcctagtaggcaggcgctctcagctctctccccggtacgtgacgagactccacggacgtcacgtgaggcaggcggcgagcgcgggtggggcggggttaggcggcgctccgcgagaaccaaagtgcagccgctgacccggcaaaactcagcgggggctggatagccatgcccaagtactgcagggcgccgaactgctccaacactgcgggccgcctgggtgcagacaaccgccctgttcccactgaaggatggtccccggctgcaggcctggctgcagcacatgggctgtgagcactgggtgcccagctgccaccagcacttgtgcagcgagcacttcacaccctcctgcttccagtggcgctggggtgtgcgctacctgcggcctgatgcagtgccctccatcttctcccggggaccacctgccaagagtcagcggaggacccgaagcacccagaagccagtctcgccgccgcctcccctacagaagaatacacccctgccccagagccctgccatcccagtctctggcccagtgcgcctagtggtgctgggccccacatcggggagccccaagactgtggccaccatgctcctgacccccctggcccctgcgccaactcctgagcggtcacaacctgaagtccctgcccaacaggcccagaccgggctgggcccagtgctgggagcactgcaacgccgggtgcggaggctgcaacggtgccaggagcggcaccaggcgcagctgcaggccctggaacggctggcacagcagctacacggggagagcctgctggcacgggcacgccggggtctgcagcgcctg

SEQ ID NO: 190749 - DNA, 3808 bp, Homo sapiens
  Payload ID: 17682
  Gene Name: THAP domain containing 9
  Uniprot ID: Q9H5L6
  ENST ID: ENST00000302236
  CDS Start-End: 52-2763
gattcatgctgtcgcgggaaccccgaaggtggggccccacgtaacaagaagatgacccgaagttgctccgcagtgggctgcagcacccgtgacaccgtgctcagccgggagcgcggcctctccttccaccaatttccaactgataccatacagcgctcaaaatggatcagggctgttaatcgtgtggaccccagaagcaaaaagatttggattccaggaccaggtgctatactgtgttccaaacattttcaagaaagtgactttgagtcatatggcataagaagaaagctgaaaaaaggagctgtgccttctgtttctctatacaagattcctcaaggtgtacatcttaaaggtaaagcaagacaaaaaatcctaaaacaacctcttccagacaattctcaagaagttgctactgaggaccataactatagtttaaagacacctttgacgataggtgcagagaaactggctgaggtgcaacaaatgttacaagtgtccaaaaaaagacttatctccgtaaagaactacaggatgatcaagaagagaaagggtttacgattaattgatgcacttgtagaagagaaactactttctgaagaaacagagtgtctgctacgagctcaattttcagattttaagtgggagttatataattggagagaaacagatgagtactccgcagaaatgaaacaatttgcatgtacactctacttgtgcagtagcaaagtctatgattatgtaagaaagattcttaagctgcctcattcttccatcctcagaacgtggttatccaaatgccaacccagtccaggtttcaacagcaacattttttcttttcttcaacgaagagtagagaatggagatcagctctatcaatactgttcattgttaataaaaagtatgcctctcaagcaacagcttcagtgggatcctagcagtcacagtttgcaggggtttatggactttggtcttggaaaacttgatgctgatgaaacgccacttgcttcagaaactgttttgttaatggcagtgggtatttttggccattggagaacacctcttggttatttttttgtaaacagagcatctggatatttgcaggctcagctgcttcgtctgactattggtaaactgagtgacataggaatcacagttctggctgttacatctgatgccacagcacatagtgttcagatggcaaaagcattggggatacatattgatggagacgacatgaaatgtacatttcagcatccttcatcttctagtcaacagattgcatacttctttgactcttgccacttgctaagattaataagaaatgcatttcagaattttcaaagcattcagtttattaatggtatagcacattggcagcacctcgtggagttagtagcactggaggaacaggaattatcaaatatggaaagaataccaagtacacttgcaaatttgaaaaatcatgtactgaaagtgaatagtgccacccaactctttagtgagagtgtagccagtgcattagaatatttgttatccttagacctgccaccttttcaaaactgtattggtaccatccattttttacgtttaattaacaatctgtttgacatctttaatagtaggaactgttatggaaagggacttaaagggcctctgttgcctgaaacttacagtaaaataaaccacgtgttaattgaagccaagactatttttgttacattatctgacactagcaataatcaaataattaaaggtaagcaaaaactaggattcctgggatttttgctcaatgctgagagcttaaaatggctctaccaaaattatgttttcccaaaggtcatgccttttccttatcttctgacttacaaattcagtcatgatcatctggaattatttctaaagatgcttaggcaggtattagtaacaagttctagccctacctgcatggcattccagaaagcttactataatttggagaccagatacaaatttcaagatgaagtttttctaagcaaagtaagcatctttgacatttcaattgctcgaaggaaagacttggcgctttggacagttcaacgtcagtatggtgtcagcgttacaaagactgtctttcacgaagagggtatttgtcaagactggtctcattgttcactaagtgaggcattactagacctgtcagatcataggcgaaatctcatctgttatgctggttatgttgcaaacaagttatcagctcttttaacttgtgaggactgcatcactgcactgtatgcatcggatctcaaagcctctaaaattgggtcactattatttgttaaaaagaagaatggtttgcattttccttcagaaagtctgtgtcgggtcataaatatttgtgagcgagttgtaagaacccattcaagaatggcaatttttgaactagtttctaaacaaagggaattgtatcttcaacagaaaatattatgtgagctttctgggcatattaatctttttgtagatgtgaataagcatctctttgatggagaagtgtgtgccatcaatcactttgtcaagttgctaaaggatataataatctgtttcttaaatatcagagctaaaaatgttgcacagaatcctttaaaacatcattcagagagaactgatatgaaaactttatcaaggaaacactggtcatctgtacaggattataaatgttcaagttttgctaataccagtagtaaattcaggcatttgctaagtaacgatggatatccattcaaatgagagacctaaaatatattaacattttaattaagaatacttgatcaacattttttgaagttcaatttaccatattttataaattgcgcattctgcacagtggacaagtttgcaattctgacttattaaaatttcaaattctgcatatcacaaaatctccttatacttttggtatggcttgcagcatttatgagttttccaaaatatagaaagcagtaggtcagtaggagcaaactagccaacaggtactgtctttgaatttactactgtaagactaagcagtgttactggacacagttttaacttgttcaatctgcttcaaaaacaagaaaaacaacaactatgagttatcaaaatattgactccatttatgactagactacatttctgaaagatctttggtttatgattcttaagaatattgacaatacctataaaactttgaagataacttttacttaaatatgaaaattatagtttgaaaattaggctcaagcaaatatcaaatactgcaaaaatccccttgtcccaggataccctaaaatagaagtgcttaaactttgtcaggcagaaggtaaagtacatgagccatgagattcttccttgtgctgcagccacgctggggagtgcaatctggaaagaacatacctaatgtgtttttcaccatccattatctctgaactttgaaatattacttttgaataataggctggacacttagtttgacttgaaagagctcaatgctcatcggaaaacagggagaaacctaatctgaagatggaagcatactaaggacaattttctccactcacatccacatttgaaaagagggacagaaaaacataggtaactctactttcacaaatgaggatagtttaacggatagaagaaacaagcacattattcacctgtgttgtaaaacatctactcttttttgtcactgaataagtgttcccaaagtacagttaatcctaatatgaaaacttagaattgtaaaagattaatgataacgtaaaagtatattgattaaaattccccttacaaagta

SEQ ID NO: 190750 - DNA, 553 bp, Homo sapiens
  Payload ID: 17682
  Gene Name: THAP domain containing 9
  ENST ID: ENST00000514440
  CDS Start-End: 120-212
aaagcccgcctttcgtgacaaataaaggtcgtagccgcagagtcaacgggcggagctaaagtggtcgtgattcatgctgtcgcgggaaccccgaaggtggggccccacgtaacaagaagatgacccgaagttgctccgcagtgggctgcagcacccgtgacaccgtgctcagccgggagcgcggcctctccttccaccatgtttacctctgaatagccggttctcgcaccgcctaccgctttaaggagagttacgcgaaaggagtcctccattaattggatggtcttattatttgaaagacagggtttcaccatgttgtccaggctggtcttgaactcctgacctcaagtgatccgcccgcctcggcctcccaaagtgttgggattacaggcgtgagccaccacgcctggccgacaagtttctaaacataatttggcttggattgaaaaataaataaatgcaagatttccaactgataccatacagcgctcaaaatggatcagggctgttaatcgtgtggaccccagaagcaaaaagatttggattccaggac

SEQ ID NO: 190751 - DNA, 565 bp, Homo sapiens
  Payload ID: 17682
  Gene Name: THAP domain containing 9
  ENST ID: ENST00000506208
  CDS Start-End: 1-366
agtttaaagacacctttgacgataggtgcagagaaactggctgaggtgcaacaaatgttacaagtgtccaaaaaaagacttatctccgtaaagaactacaggatgatcaagaagagaaagggtttacgattaattgatgcacttgtagaagagaaactactttctgaagaaacagagtgtctgctacgagctcaattttcagattttaagtgggagttatataattggagagaaacagatgagtactccgcagaaatgaaacaatttgcatgtacactctacttgtgcagtagcaaagtctatgattatgtaagaaagattcttaagctgcctcattcttccatcctcagaacgagcggccagtgaggcaggaggaaaaccaggagattgtgatggcctggaagccaagtgtagaaagtatttcaaggagggagtagtccactatgtcaaatgctgctgggagatcaggtggttatccaaatgccaacccagtccaggtttcaacagcaacattttttcttttcttcaacgaagagtagagaatggagatcagctctatcaatac

SEQ ID NO: 190752 - DNA, 821 bp, Homo sapiens
  Payload ID: 17682
  Gene Name: THAP domain containing 9
  ENST ID: ENST00000514244
  CDS Start-End: 101-409
aaataaaggtcgtagccgcagagtcaacgggcggagctaaagtggtcgtgattcatgctgtcgcgggaaccccgaaggtggggccccacgtaacaagaagatgacccgaagttgctccgcagtgggctgcagcacccgtgacaccgtgctcagccgggagcgcggcctctccttccaccaatttccaactgataccatacagcgctcaaaatggatcagggctgttaatcgtgtggaccccagaagcaaaaagatttggattccaggaccaggtgctatactgtgttccaaacattttcaagaaagtgactttgagtcatatggcataagaagaaagctgaaaaaaggagctgtgccttctgtttctctatacaaggtatttaaatattcctcaaggtgtacatcttaaaggtaaagcaagacaaaaaatcctaaaacaacctcttccagacaattctcaagaagttgctactgaggaccataactatagtttaaagacacctttgacgataggtgcagagaaactggctgaggtgcaacaaatgttacaagtgtccaaaaaaagacttatctccgtaaagaactacaggatgatcaagaagagaaagggtttacgattaattgatgcacttgtagaagagaaactactttctgaagaaacagagtgtctgctacgagctcaattttcagattttaagtgggagttatataattggagagaaacagatgagtactccgcagaaatgaaacaatttgcatgtacactctacttgtgcagtagcaaagtctatgattatgtaagaaagattcttaagctgcct

SEQ ID NO: 190753 - DNA, 3348 bp, Homo sapiens
  Payload ID: 17682
  Gene Name: THAP domain containing 9
  ENST ID: ENST00000505901
  CDS Start-End: 35-343
gaaccccgaaggtggggccccacgtaacaagaagatgacccgaagttgctccgcagtgggctgcagcacccgtgacaccgtgctcagccgggagcgcggcctctccttccaccaatttccaactgataccatacagcgctcaaaatggatcagggctgttaatcgtgtggaccccagaagcaaaaagatttggattccaggaccaggtgctatactgtgttccaaacattttcaagaaagtgactttgagtcatatggcataagaagaaagctgaaaaaaggagctgtgccttctgtttctctatacaagatgaggacacaagggattgtagagcttatgtgacagctaattgagggagctaagattcaaacccagattcctcaaggtgtacatcttaaaggtaaagcaagacaaaaaatcctaaaacaacctcttccagacaattctcaagaagttgctactgaggaccataactatagtttaaagacacctttgacgataggtgcagagaaactggctgaggtgcaacaaatgttacaagtgtccaaaaaaagacttatctccgtaaagaactacaggatgatcaagaagagaaagggtttacgattaattgatgcacttgtagaagagaaactactttctgaagaaacagagtgtctgctacgagctcaattttcagattttaagtgggagttatataattggagagaaacagatgagtactccgcagaaatgaaacaatttgcatgtacactctacttgtgcagtagcaaagtctatgattatgtaagaaagattcttaagctgcctcattcttccatcctcagaacgtggttatccaaatgccaacccagtccaggtttcaacagcaacattttttcttttcttcaacgaagagtagagaatggagatcagctctatcaatactgttcattgttaataaaaagtatgcctctcaagcaacagcttcagtgggatcctagcagtcacagtttgcaggggtttatggactttggtcttggaaaacttgatgctgatgaaacgccacttgcttcagaaactgttttgttaatggcagtgggtatttttggccattggagaacacctcttggttatttttttgtaaacagagcatctggatatttgcaggctcagctgcttcgtctgactattggtaaactgagtgacataggaatcacagttctggctgttacatctgatgccacagcacatagtgttcagatggcaaaagcattggggatacatattgatggagacgacatgaaatgtacatttcagcatccttcatcttctagtcaacagattgcatacttctttgactcttgccacttgctaagattaataagaaatgcatttcagaattttcaaagcattcagtttattaatggtatagcacattggcagcacctcgtggagttagtagcactggaggaacaggaattatcaaatatggaaagaataccaagtacacttgcaaatttgaaaaatcatgtactgaaagtgaatagtgccacccaactctttagtgagagtgtagccagtgcattagaatatttgttatccttagacctgccaccttttcaaaactgtattggtaccatccattttttacgtttaattaacaatctgtttgacatctttaatagtaggaactgttatggaaagggacttaaagggcctctgttgcctgaaacttacagtaaaataaaccacgtgttaattgaagccaagactatttttgttacattatctgacactagcaataatcaaataattaaaggtaagcaaaaactaggattcctgggatttttgctcaatgctgagagcttaaaatggctctaccaaaattatgttttcccaaaggtcatgccttttccttatcttctgacttacaaattcagtcatgatcatctggaattatttctaaagatgcttaggcaggtattagtaacaagttctagccctacctgcatggcattccagaaagcttactataatttggagaccagatacaaatttcaagatgaagtttttctaagcaaagtaagcatctttgacatttcaattgctcgaaggaaagacttggcgctttggacagttcaacgtcagtatggtgtcagcgttacaaagactgtctttcacgaagagggtatttgtcaagactggtctcattgttcactaagtgaggcattactagacctgtcagatcataggcgaaatctcatctgttatgctggttatgttgcaaacaagttatcagctcttttaacttgtgaggactgcatcactgcactgtatgcatcggatctcaaagcctctaaaattgggtcactattatttgttaaaaagaagaatggtttgcattttccttcagaaagtctgtgtcgggtcataaatatttgtgagcgagttgtaagaacccattcaagaatggcaatttttgaactagtttctaaacaaagggaattgtatcttcaacagaaaatattatgtgagctttctgggcatattaatctttttgtagatgtgaataagcatctctttgatggagaagtgtgtgccatcaatcactttgtcaagttgctaaaggatataataatctgtttcttaaatatcagagctaaaaatgttgcacagaatcctttaaaacatcattcagagagaactgatatgaaaactttatcaaggaaacactggtcatctgtacaggattataaatgttcaagttttgctaataccagtagtaaattcaggcatttgctaagtaacgatggatatccattcaaatgagagacctaaaatatattaacattttaattaagaatacttgatcaacattttttgaagttcaatttaccatattttataaattgcgcattctgcacagtggacaagtttgcaattctgacttattaaaatttcaaattctgcatatcacaaaatctccttatacttttggtatggcttgcagcatttatgagttttccaaaatatagaaagcagtaggtcagtaggagcaaactagccaacaggtactgtctttgaatttactactgtaagactaagcagtgttactggacacagttttaacttgttcaatctgcttcaaaaacaagaaaaacaacaactatgagttatcaaaatattgactccatttatgactagactacatttctgaaagatctttggtttatgattcttaagaatattgacaatacctataaaactttgaagataacttttacttaaatatgaaaattatagtttgaaaattaggctcaagcaaatatcaaatactgcaaaaatccccttgtcccaggataccc

SEQ ID NO: 190754 - DNA, 700 bp, Homo sapiens
  Payload ID: 17682
  Gene Name: THAP domain containing 9
  ENST ID: ENST00000509353
  CDS Start-End: 38-367
cgggaaccccgaaggtggggccccacgtaacaagaagatgacccgaagttgctccgcagtgggctgcagcacccgtgacaccgtgctcagccgggagcgcggcctctccttccaccaatttccaactgataccatacagcgctcaaaatggatcagggctgttaatcgtgtggaccccagaagcaaaaagatttggattccaggaccaggtgctatactgtgttccaaacattttcaagaaagtgactttgagtcatatggcataagaagaaagctgaaaaaaggagctgtgccttctgtttctctatacaaggtatttaaatatgaggacacaagggattgtagagcttatgtgacagctaattgagggagctaagattcaaacccagattcctcaaggtgtacatcttaaaggtaaagcaagacaaaaaatcctaaaacaacctcttccagacaattctcaagaagttgctactgaggaccataactatagtttaaagacacctttgacgataggtgcagagaaactggctgaggtgcaacaaatgttacaagtgtccaaaaaaagacttatctccgtaaagaactacaggatgatcaagaagagaaagggtttacgattaattgatgcacttgtagaagagaaactactttctgaagaaacagagtgtctgctacgagctcaattttcagattttaa

SEQ ID NO: 190755 - DNA, 2161 bp, Homo sapiens
  Payload ID: 17683
  Gene Name: THAP domain containing, apoptosis associated protein 1
  Uniprot ID: Q9NVV9
  ENST ID: ENST00000254250
  CDS Start-End: 232-873
gaagctgcctccgccatcttggagatgggagacgggcgatggctgtggtccttctgctaatgcaaacaacaaaacgggcacactagtcacccccgagggaggccaccatcactgtaactgttggccaaagctacaaaagaagcgagggaatccaaccgagcgcagcgacactgagaacagcttcccctgccttctgcggcggcagaagtgaagtgcctgaggaccggaaggatggtgcagtcctgctccgcctacggctgcaagaaccgctacgacaaggacaagcccgtttctttccacaagtttcctcttactcgacccagtctttgtaaagaatgggaggcagctgtcagaagaaaaaactttaaacccaccaagtatagcagtatttgttcagagcactttactccagactgctttaagagagagtgcaacaacaagttactgaaagagaatgctgtgcccacaatatttctttgtactgagccacatgacaagaaagaagatcttctggagccacaggaacagcttcccccacctcctttaccgcctcctgtttcccaggttgatgctgctattggattactaatgccgcctcttcagacccctgttaatctctcagttttctgtgaccacaactatactgtggaggatacaatgcaccagcggaaaaggattcatcagctagaacagcaagttgaaaaactcagaaagaagctcaagaccgcacagcagcgatgcagaaggcaagaacggcagcttgaaaaattaaaggaggttgttcacttccagaaagagaaagacgacgtatcagaaagaggttatgtgattctaccaaatgactactttgaaatagttgaagtaccagcataaaaaaatgaaatgtgtattgatttctaatggggcaataccacatatcctcctctagcctgtaaaggagtttcatttaaaaaaataacatttgattacttatataaaaacagttcagaatatttttttaaaaaaaattctatatatactgtaaaattataaatttttttgtttgtaatttcaggttttttacattttaacaaaatattttaaaagttataaactaacctcagacctctaatgtaagttggtttcaagattggggattttggggtttttttttagtatttatagaaataatgtaaaaataaaaagtaaagagaatgagaacagtgtggtaaaagggtgatttcagtttaaaacttaaaattagtactgttttattgagagaatttagttatattttaaatcagaagtatgggtcagatcatgggacataacttcttagaatatatatatacatatgtacatattctcatatgtaaagtcacaaggttcatttatctttctgaatcagttatcaaagataaattggcaagtcagtacttaagaaaaaagatttgattatcatcacagcagaaaaaagtcattgcatatctgatcaataacttcagattctaagagtggattttttttttttacatgggctcctattttttcccctactgtcttgcattataaaattagaagtgtattttcagtggaagaaacatttttcaataaataaagtaaggcattgtcatcaatgaagtaattaaaactgggacctgatctatgatacgcttttttctttcattacaccctagctgaaggacatccagttccccagctgtagttatgtatctgccttcaagtctctgacaaatgtgctgtgttagtagagtttgatttgtatcatatgataatcttgcacttgactgagttgggacaaggcttcacataaaaaattatttcttcacttttaacacaagttagaaattatatcccatttagttaagtgcgtgatttatattcagaacaacctactatgtagcgtttattttactgaatgtggagatttaaacactgaggtttctgttcaaactgtgagttctgttctttgtgagaaattttacatatattggaagtgaaaatatgttctgagtaaacaaatattgctatgggagttatctttttagatttagaataactgttccaatgataattattacttttatatttcaaagtacactaagatcgttgaagagcaatagaacctttaagacagtattaaaggtgtgaaacaatggca

SEQ ID NO: 190756 - DNA, 1943 bp, Homo sapiens
  Payload ID: 17683
  Gene Name: THAP domain containing, apoptosis associated protein 1
  Uniprot ID: Q9NVV9
  ENST ID: ENST00000345117
  CDS Start-End: 212-373
ggagatgggagacgggcgatggctgtggtccttctgctaatgcaaacaacaaaacgggcacactagtcacccccgagggaggccaccatcactgtaactgttggccaaagctacaaaagaagcgagggaatccaaccgagcgcagcgacactgagaacagcttcccctgccttctgcggcggcagaagtgaagtgcctgaggaccggaaggatggtgcagtcctgctccgcctacggctgcaagaaccgctacgacaaggacaagcccgtttctttccacaaaaagaagatcttctggagccacaggaacagcttcccccacctcctttaccgcctcctgtttcccaggttgatgctgctattggattactaatgccgcctcttcagacccctgttaatctctcagttttctgtgaccacaactatactgtggaggatacaatgcaccagcggaaaaggattcatcagctagaacagcaagttgaaaaactcagaaagaagctcaagaccgcacagcagcgatgcagaaggcaagaacggcagcttgaaaaattaaaggaggttgttcacttccagaaagagaaagacgacgtatcagaaagaggttatgtgattctaccaaatgactactttgaaatagttgaagtaccagcataaaaaaatgaaatgtgtattgatttctaatggggcaataccacatatcctcctctagcctgtaaaggagtttcatttaaaaaaataacatttgattacttatataaaaacagttcagaatatttttttaaaaaaaattctatatatactgtaaaattataaatttttttgtttgtaatttcaggttttttacattttaacaaaatattttaaaagttataaactaacctcagacctctaatgtaagttggtttcaagattggggattttggggtttttttttagtatttatagaaataatgtaaaaataaaaagtaaagagaatgagaacagtgtggtaaaagggtgatttcagtttaaaacttaaaattagtactgttttattgagagaatttagttatattttaaatcagaagtatgggtcagatcatgggacataacttcttagaatatatatatacatatgtacatattctcatatgtaaagtcacaaggttcatttatctttctgaatcagttatcaaagataaattggcaagtcagtacttaagaaaaaagatttgattatcatcacagcagaaaaaagtcattgcatatctgatcaataacttcagattctaagagtggattttttttttttacatgggctcctattttttcccctactgtcttgcattataaaattagaagtgtattttcagtggaagaaacatttttcaataaataaagtaaggcattgtcatcaatgaagtaattaaaactgggacctgatctatgatacgcttttttctttcattacaccctagctgaaggacatccagttccccagctgtagttatgtatctgccttcaagtctctgacaaatgtgctgtgttagtagagtttgatttgtatcatatgataatcttgcacttgactgagttgggacaaggcttcacataaaaaattatttcttcacttttaacacaagttagaaattatatcccatttagttaagtgcgtgatttatattcagaacaacctactatgtagcgtttattttactgaatgtggagatttaaacactgaggtttctgttcaaactgtgagttctgttctttgtgagaaattttacatatattggaagtgaaaatatgttctgagtaaacaaatattgctatgggagttatctttttagatttagaataactgttccaatgataattattacttttatatttcaaagtacactaagatcgttgaagagcaatagaacctttaagacagtattaaaggtgtgaaacaatgg

SEQ ID NO: 190757 - DNA, 461 bp, Homo sapiens
  Payload ID: 17683
  Gene Name: THAP domain containing, apoptosis associated protein 1
  ENST ID: ENST00000529779
  CDS Start-End: 108-461
ccaaagctacaaaagaagcgagggaatccaaccgagcgcagcgacactgagaacagcttcccctgccttctgcggcggcagaagtgaagtgcctgaggaccggaaggatggtgcagtcctgctccgcctacggctgcaagaaccgctacgacaaggacaagcccgtttctttccacaagtttcctcttactcgacccagtctttgtaaagaatgggaggcagctgtcagaagaaaaaactttaaacccaccaagtatagcagtatttgttcagagcactttactccagactgctttaagagagagtgcaacaacaagttactgaaagagaatgctgtgcccacaatatttctttgtactgagccacatgacaagacccctgttaatctctcagttttctgtgaccacaactatactgtggaggatacaatgcaccagcggaaaaggattcatcagctagaa

SEQ ID NO: 190758 - DNA, 5719 bp, Homo sapiens
  Payload ID: 17684
  Gene Name: THAP domain containing, apoptosis associated protein 2
  Uniprot ID: Q9H0W7
  ENST ID: ENST00000308086
  CDS Start-End: 1502-2188
atacagctcttccgaggtggagagggctctcgccagctctgactgctgctgaacccggatcctgctcctcctcccagaggaggtctgcaccccggcttgcctcctcgctcacccactcctcgcccccgactccagcgactcccaccccggtaaggcctgcctcgaaagcggaaacggtccaaggcgaggtggctccgctcccagaaagacggccggggactgctttcggacagtgagctcgaaggcatccgtacagaaggcggatgagaccggaacggttctttgggtcggtagctgctgggtcccctgaggtggccccgctcagacgcgtgccgcgagcgtgagaaattcctcagctgctgctgagaagaggacgatgacgaggaagagccaccgcctccgccagatccaccgccccgggccgagtgaggaggccttcgccgcggatagggtaacagcccgccgccgctgctgctgctgctgctccgactccgtatctggctgttattatcgtcgtcactgatttccccatcttcaagctccccttcttccttcggcgagaggccactggaggccggggccggagtatctgcggtcgccatccggggagcagcgccttccacacaaccttagccctccgtccggggatccgcccgacaattgcctcgtttcccttctttcctaacggactgggtcggtgcggtcttaccctactcggacaccaagcggcctctgctccccaacttccccgcaccccagcaccccagctctctctcgccggaccgtcgcaacccagttccctttcctagcgcccccttgctcctcagcgatcggggttcttccgcctcgcgagaaagggactctggtagcggctgtacccgaaacgtcacttcctgcgacacgcaggaaacaaaggctcccagttcacgcgataataagaccaactcgatactcactaggatttgtagtctttcgtctttcttcgggtttactcttccggtcctagggtcacacccaccgcagggtctggcttggtacagttgggtgcatgcagaagtaggtggagctgctgttgcagccttgagagagttttattgtaaaactcttgtaatttatagtaatcggaggggaaaacacctcttccttttaattgctctgaggaccgctgccaaagaaacgcagtagatccgctccctcttgggggcggggagaaagaacgggttgtgtccgccatgttggtgaagtcaagcgaaggcgactagagctccaggagggccagttctgtgggctctagtcggccatattaataaagagaaagggaaggctgaccgtccttcgcctccgcccccacatacacaccccttcttcccactccgctctcacgactaagctctcacgattaaggcacgcctgcctcgattgtccagcctctgccagaagaaagcttagcagccagcgcctcagtagagacctaagggcgctgaatgagtgggaaagggaaatgccgaccaattgcgctgcggcgggctgtgccactacctacaacaagcacattaacatcagcttccacaggtttcctttggatcctaaaagaagaaaagaatgggttcgcctggttaggcgcaaaaattttgtgccaggaaaacacacttttctttgttcaaagcactttgaagcctcctgttttgacctaacaggacaaactcgacgacttaaaatggatgctgttccaaccatttttgatttttgtacccatataaagtctatgaaactcaagtcaaggaatcttttgaagaaaaacaacagttgttctccagctggaccatctaatttaaaatcaaacattagtagtcagcaagtactacttgaacacagctatgcctttaggaatcctatggaggcaaaaaagaggatcattaaactggaaaaagaaatagcaagcttaagaagaaaaatgaaaacttgcctacaaaaggaacgcagagcaactcgaagatggatcaaagccacgtgtttggtaaagaatttagaagcaaatagtgtattacctaaaggtacatcagaacacatgttaccaactgccttaagcagtcttcctttggaagattttaagatccttgaacaagatcaacaagataaaacactgctaagtctaaatctaaaacagaccaagagtaccttcatttaaatttagcttgcacagagcttgatgcctatccttcattcttttcagaagtaaagataattatggcacttatgccaaaattcattatttaataaagttttacttgaagtaacattactgaatttgtgaagacttgattacaaaagaataaaaaacttcatatggaaattttatttgaaaatgagtggaagtgccttacattagaattacggacttaaaaattttgctaataaattgtgtgtttgaaaggtgttttttgtttttgtctttttaaactactgttaaaagaacagcttatgataagtaatatgtttaacttagagaagaattttttcctgtaccaaagttggcatattgcattctaaataagatgctaaataagagttaaccaacattcaacatgaccttaaaactgctgggttttgtattaattaaattataattggcactgtgatttgaaaaatttatagaaaaaaaggtacagggcaagtttttaaattaaaactttctatattttgttttaccagtaaaagtgagcttatcatggcctctctcataagaatgattttaaaataggttgtaaaatattttgaaaatatttgaatgtgaagtaccattgagtcatccaaactaggtaaggcctcaagtactttaaactagtaaaatctagtagctgataatattcacctaagtaagtgttgtaaaataattcagagttcaggacctagcttagataaatgtatactactctttttctcataataaaaatcttacatttccaacttcaaaattggtgcttccatatttgttgataaccaaaactcctaaggttttttgttttctttttaactactttccaaatgcatactatacctcagaaatagtgtatcaatatagtgggctttttttttcctcttcataaacccacagtaaaatttaatcacaggaaactacttatatcttcacactttgtattgataacttaaaatggcatcagtttatcttagacatcagcttgctttttatctccttttttagtgagtgaaatagagcaactagcatgcctgtgttcccagctacttgggaggctaaggtgggaagatcaattgaacctaggaggttgaggctatagtgagctgtgattgcacgactgcactccagcctgggcaatggagtgagactcctgtctctaaaacagcaacaacaaaaataaagcaaccatagtgcataagggaaattaaatgttccctatagaaatatgtgtatgtctgtgatagtggtatgcaaatgctaattattttataaaataaaagttcagaactattcttatcattgccacttgaacaattaaagggtttgctttatttcactaatgtttaataggaaccctttgcttcaaacagctttgttgaaatcatgtaaaaatttgttaatagagaatcaagttatttaactcaacttatttaattcaagcttgtgatactaacatacaaaggtagcataaaccaagtcataaattgctgtaatctttcctgtaaagtaatagctacttcatgatttttttaaaaatttcatttttttgctatttaggattgcatttgcttggctcctagtaacaattcttttacagtattagcactctctttactaaggaatgcctcccaaggaaatgcaaaggtaggaaaagtctcttagaatgcccatgaggtatttaaaacagatatttatgaaaatctttttgtgaatgttataaatcttgctagttattttatctttatcttaagtattagatgtagttccttggaattgtcattacatatttatttttttctagtatggtttcaaataactttttgccaacatataatcatcatcaaacattcactgaccatatctattttataactcaaaataagttggacaaataatcattttaataaaaactattttttccaagtataaccactgtcatgtggttcacccttcaccccagatacaaaacacttatttgtgtagcccagttcccatctacagtaataccttgaaaccttaataaattttaaaaatcataaaaataaaatattgtaaaatacaacaaattttggacaaggttacttcatcttcattcattattacctgacagtattaaactactactcaataattttagagtaaacttttctgtgttttctccgtgattttcattgtgctgtcctgacaacatgctccaaactctttgcatcaaattgttttattaacatacatttgtctaccttaaaactagctttattcacagagaaaaacctaaaaggagtctattaaaatgctgctttcagtttgatagttttttttttaatcactctgaccataaactaactgaaattataatggattttttttcctctcccggtcacaacacagatcttctgttcatttgttctctgtctactgggcaccaacctctacaaagaaccagccaaaggctaggtacttgatataaaaaggaatattacattattttctgccctcaagttgctctatctcctgaaagaaacaagtaatatttataatacaatatgataaatgctacaaaagaaatagctgtaaagtcctttggtaaatgctgttgaattggaattcagtaagaactataaactgtagacctttttataatcaaatgcttttgtcttgaaacaaaacagattcctccttatattgacttagcaaaggaggtacaaggacattggcatttgacctgaattatggtgttttattgaatgagctataagacaacatttttaccctttaaaatgaacactgaacaaatgtgttaatggtatctttgttaaaaggaaaacatagctataaataaaatactacatcgaaatccagcactggagttcatttgaaatttgatattttgtgtaaaataacaaacctattaacacagatttttaaaataactcagaatcgtataaagcactttggtacttatttgttctcttttcccttacattctgtgtggtaggtggtattatctctgatttacacatgaagacatccttgttaatgcaatttatttattcattcgggcatttactgtgtgccaacttgcaaaaggaatagaaatgtctgtgatctagatagttctagattgaacatagattttctgccaacaaatcctctctgctgttcacattatcctttgtttaacgtatgaaccaggttactaaaataggataaatcatgtgtcttaaaatatgaaaatagtaaagtctttgaggtcacttgatcttctctaagtagactttataatattgtgttttatctcatttctcaatattagaatacgggtagattttaattttgctataatataggaaatggttcatctttgtaccaaaatattgcattcttctgatatttagacagttggaaactttctaaaattgaggattttgtagtgtatactaaataattgcatattcaaaaaaatgtattctgagtatggtgatattaaacatttttccccaa

SEQ ID NO: 190759 - DNA, 577 bp, Homo sapiens
  Payload ID: 17684
  Gene Name: THAP domain containing, apoptosis associated protein 2
  ENST ID: ENST00000551238
  CDS Start-End: 274-577
tactaccaagtctagtttcaagctatcaatatgacatcactgattatggagttggaaagagatgtgcagtttcacactattttagtatttccaccatacagatacaacagacaaccttaagagtaaaggtttcctttggatcctaaaagaagaaaagaatgggttcgcctggttaggcgcaaaaattttgtgccaggaaaacacacttttctttgttcaaagcactttgaagcctcctgttttgacctaacaggacaaactcgacgacttaaaatggatgctgttccaaccatttttgatttttgtacccatataaagtctatgaaactcaagtcaaggaatcttttgaagaaaaacaacagttgttctccagctggaccatctaatttaaaatcaaacattagtagtcagcaagtactacttgaacacagctatgcctttaggaatcctatggaggcaaaaaagaggatcattaaactggaaaaagaaatagcaagcttaagaagaaaaatgaaaacttgcctacaaaaggaacgcagagcaactcgaagatggatcaaagccacgtgtttggtaa

SEQ ID NO: 190760 - DNA, 584 bp, Homo sapiens
  Payload ID: 17684
  Gene Name: THAP domain containing, apoptosis associated protein 2
  ENST ID: ENST00000551488
  CDS Start-End: 254-584
attcagagacctaacttagtcttggaaagtcaaagaacactttttcaaaggatgtgacatttcaaatgagaccaaaggatgacagattgggtcctgtgtgctacttaagtttcctttggatcctaaaagaagaaaagaatgggttcgcctggttaggcgcaaaaattttgtgccaggaaaacacacttttctttgttcaaagcactttgaagcctcctgttttgacctaacaggacaaactcgacgacttaaaatggatgctgttccaaccatttttgatttttgtacccatataaagtctatgaaactcaagtcaaggaatcttttgaagaaaaacaacagttgttctccagctggaccatctaatttaaaatcaaacattagtagtcagcaagtactacttgaacacagctatgcctttaggaatcctatggaggcaaaaaagaggatcattaaactggaaaaagaaatagcaagcttaagaagaaaaatgaaaacttgcctacaaaaggaacgcagagcaactcgaagatggatcaaagccacgtgtttggtaaagaatttagaagcaaatagtgtattac

SEQ ID NO: 190761 - DNA, 672 bp, Homo sapiens
  Payload ID: 17684
  Gene Name: THAP domain containing, apoptosis associated protein 2
  ENST ID: ENST00000547843
  CDS Start-End: 30-188
taagggcgctgaatgagtgggaaagggaaatgccgaccaattgcgctgcggcgggctgtgccactacctacaacaagcacattaacatcagcttccacagaccgggccttgacatgaatgacgccgtaagggagaaagagatcttcccaatcagcaatcaccgtaaaagcctgctgtgttcccgttaaaattaggaaattctcactagatgaattgacatgggaggcatttagatttctaatagtcacatagtaattctgcggaggaattgagtcatctttgatagccatggaattaagcgatgttaattaaagtgcaaaagataacctttctgttcttactagaatagagtaataaaaagaacctaggttttcttttgtttgctggaagaaaaatcaaaattctttagttctgtcaaaccagaactcttgaaagcactttgaacaatgcctggaaaataacaggtactctgtaaatgtttaccttctctgcaagtgcctgccacgtgcccgaagaaaagacacattaaaaagttaagtgacaccagtcctgattttatatattttatatacctaacaacgtatatgttagtatgtagaaattatatccttgacctttttccctacctattacgaactgtacttttattaaaagctgccacttaaaaaaaat

SEQ ID NO: 190762 - DNA, 1366 bp, Homo sapiens
  Payload ID: 17685
  Gene Name: THAP domain containing, apoptosis associated protein 3
  Uniprot ID: Q8WTV1
  ENST ID: ENST00000054650
  CDS Start-End: 159-878
ttccagttgtccaagcctgtgagtggctatgcgtcctggttgggtgctcaaagcaaggaggtgaaaggcgaccagcattggcgaatggggtccctcccctctccgcaggccccgccgccgccgccatctttgttgggggcagccaggcctggctcgagatgccgaagtcgtgcgcggcccggcagtgctgcaaccgctacagcagccgcaggaagcagctcaccttccaccggtttccgttcagccgcccggagctgctgaaggaatgggtgctgaacatcggccggggcaacttcaagcccaagcagcacacggtcatctgctccgagcacttccggccagagtgcttcagcgcctttggaaaccgcaagaacctaaagcacaatgccgtgcccacggtgttcgcctttcaggaccccacacagcaggtgagggagaacacagaccctgccagtgagagaggaaatgccagctcttctcagaaagaaaaggtcctccctgaggcgggggccggagaggacagtcctgggagaaacatggacactgcacttgaagagcttcagttgcccccaaatgccgaaggccacgtaaaacaggtctcgccacggaggccgcaagcaacagaggctgttggccggccgactggccctgcaggcctgagaaggacccccaacaagcagccatctgatcacagctatgcccttttggacttagattccctgaagaaaaaactcttcctcactctgaaggaaaatgaaaagctccggaagcgcttgcaggcccagaggctggtgatgcgaaggatgtccagccgcctccgtgcttgcaaagggcaccagggactccaggccagacttgggccagagcagcagagctgagccccacaggctccggacgcagaggtggcagtggcaccagggccggcagagctttggagctctggctgtggacatttttgtctgctgtggacactgagaaagttggccatgaggcctgcttggccggggatcgagacagtagccaagctccccggcgagagccccaatgccgtctgggggacgtttagaggcgtggcactaggagtgcacatctgtgagcatgacaagcttatcctcccatggtaacagaagtccaggctgaggctgattctggacgctgtcctttcagcacacgcagagcaaagatcgttggaagccccagtgtgggagatgctcctcagggaggaagccatgtgagggggctggctctgtggcgggtgagtggtcccctcctccatcagcctggacagccgctcggggttctaaggagtgactcctgtcccggcctggtgtgagtgggcagtgtaataaagtgtctttctatacgg

SEQ ID NO: 190763 - DNA, 1046 bp, Homo sapiens
  Payload ID: 17685
  Gene Name: THAP domain containing, apoptosis associated protein 3
  Uniprot ID: Q8WTV1
  ENST ID: ENST00000307896
  CDS Start-End: 39-755
ccgccatctttgttgggggcagccaggcctggctcgagatgccgaagtcgtgcgcggcccggcagtgctgcaaccgctacagcagccgcaggaagcagctcaccttccaccggtttccgttcagccgcccggagctgctgaaggaatgggtgctgaacatcggccggggcaacttcaagcccaagcagcacacggtcatctgctccgagcacttccggccagagtgcttcagcgcctttggaaaccgcaagaacctaaagcacaatgccgtgcccacggtgttcgcctttcaggaccccacacaggtgagggagaacacagaccctgccagtgagagaggaaatgccagctcttctcagaaagaaaaggtcctccctgaggcgggggccggagaggacagtcctgggagaaacatggacactgcacttgaagagcttcagttgcccccaaatgccgaaggccacgtaaaacaggtctcgccacggaggccgcaagcaacagaggctgttggccggccgactggccctgcaggcctgagaaggacccccaacaagcagccatctgatcacagctatgcccttttggacttagattccctgaagaaaaaactcttcctcactctgaaggaaaatgaaaagctccggaagcgcttgcaggcccagaggctggtgatgcgaaggatgtccagccgcctccgtgcttgcaaagggcaccagggactccaggccagacttgggccagagcagcagagctgagccccacaggctccggacgcagaggtggcagtggcaccagggccggcagagctttggagctctggctgtggacatttttgtctgctgtggacactgagaaagttggccatgaggcctgcttggccggggatcgagacagtagccaagctccccggcgagagccccaatgccgtctgggggacgtttagaggcgtggcactaggagtgcacatctgtgagcatgacaagcttatcctcccatggtaacagaagtccaggctgaggctgattctggacgctgtcctttcagca

SEQ ID NO: 190764 - DNA, 2053 bp, Homo sapiens
  Payload ID: 17685
  Gene Name: THAP domain containing, apoptosis associated protein 3
  Uniprot ID: Q8WTV1
  ENST ID: ENST00000377627
  CDS Start-End: 28-555
gttgggggcagccaggcctggctcgagatgccgaagtcgtgcgcggcccggcagtgctgcaaccgctacagcagccgcaggaagcagctcaccttccaccggtttccgttcagccgcccggagctgctgaaggaatgggtgctgaacatcggccggggcaacttcaagcccaagcagcacacggtcatctgctccgagcacttccggccagagtgcttcagcgcctttggaaaccgcaagaacctaaagcacaatgccgtgcccacggtgttcgcctttcaggaccccacacagcaggtgagggagaacacagaccctgccagtgagagaggaaatgccagctcttctcagaaagaaaagacttcaccctgccgttcccaggtcctccctgaggcgggggccggagaggacagtcctgggagaaacatggacactgcacttgaagagcttcagttgcccccaaatgccgaaggccacgtaaaacaggcaatgttgtttaatgtagaaaatggaaccccagcttcacgtgaagccttgtggttgagtgaggagtgaaggatggggaggaggcctctggggaaggggttccctccctcctgaagatgaacacacaatacacggaagagcgccagcctctgctttcaggaaaggtttattgtggtgagtgccttctgtacagtcgactgcaaatgaaacgcagaggatgggtgcccagaagcacctgcggcagaggcgcacgggaagcccggggcccaggctcatgcaacacgacgctcaccgcggctcgggccgtggggccgtcagagaaacctttttaaaaaatggagatgaatgttacagaattggacaacccgaactgcttttcaaaaccagaggaaggaggttcttagccgttactcagataccagtgctggggagggaggcctgacttcagcaacagctgtgggtgggctggaggccggcgcagcttggggccccccgcgccagctgtctcagccaccacctgtgcggcgcttgctccgaggggtcagcaagagcaactgatggctgccacttccaggccccgagagacaggcctcacgtaactttactgcagccgaggtccaggccgtggagggggtcctagctccgctgcattctgcatcccaagtgggcacgtggaggaagggtctgaaggaaggctccggagcacaggccctggtgttcctgtgaggacgctggacctgcaggagcggggagctgcagtgccacctgctgggtaccacgggccgggcctggggtccacgcctttgggttgggtgtgtctgatgtcttgccaagcgcctggtcctgtcctcttgagctgcccttgcccagcactgcactctggaggtgggtggtgcaggcggtggagggacacaggccagctcaagcccgctggtggcagggcgttttcccaccgggatacgggaagccacctgtgtcagggctaggccctgggatcgggagttacactaccctgtcccaagccgagggggccggtggaatgacttgagcagctctgggagtggggaaaaaagacgactaatttccaaacccgtttgttctcagataaaaagcagttttataaacccgcaatctgctccagattcaagcagtaatatttcagcaagaggaggtggtcatgggaagccagcacagcagaggctccctgaccgggaggcctgcctgcttttcaggttgtttcccatgttcagcgtggactgcagaagtggctcacgctcctgtggtgagggcagggtgctccacagacacctccagacccagccaagaactacagggcggcgggctgcggtcagcacgtgtgctcgggacacagcggagtcagggccagagcccttccctccaggaactgatccttgggaaaacagccatgggccaggctgcagtctggttcccagtggggctgcctcagtcctacccccagcaccctcaaaagctggggtgtctgcatgtcccttcacataattgataatggtaccaccttctataataataatataaaataaaaaca

SEQ ID NO: 190765 - DNA, 840 bp, Homo sapiens
  Payload ID: 17685
  Gene Name: THAP domain containing, apoptosis associated protein 3
  ENST ID: ENST00000487819
  CDS Start-End: 1-375
aagtcgtgcgcggcccggcagtgctgcaaccgctacagcagccgcaggaagcagctcaccttccaccggtttccgttcagccgcccggagctgctgaaggaatgggtgctgaacatcggccggggcaacttcaagcccaagcagcacacggtcatctgctccgagcacttccggccagagtgcttcagcgcctttggaaaccgcaagaacctaaagcacaatgccgtgcccacggtgttcgcctttcaggaccccacacagaatctccatgagggcaggggctgccttccctgcttcaggccccacacccaggacgctgcctggcacagcccaggtgctcgggcaggtgagggagaacacagaccctgccagtgagagaggaaatgccagctcttctcagaaagaaaaggtcctccctgaggcgggggccggagaggacagtcctgggagaaacatggacactgcacttgaagagcttcagttgcccccaaatgccgaaggccacgtaaaacaggtctcgccacggaggccgcaagcaacagaggctgttggccggccgactggccctgcaggcctgagaaggacccccaacaagcagccatctgatcacagctatgcccttttggacttagattccctgaagaaaaaactcttcctcactctgaaggaaaatgaaaagctccggaagcgcttgcaggcccagaggctggtgatgcgaaggatgtccagccgcctccgtgcttgcaaagggcaccagggactccaggccagacttgggccagagcagcagagctgagccccacaggctccggacgcagaggtggcagtggcaccagggcc

SEQ ID NO: 190766 - DNA, 983 bp, Homo sapiens
  Payload ID: 17685
  Gene Name: THAP domain containing, apoptosis associated protein 3
  ENST ID: ENST00000472925
  CDS Start-End: 1-694
gtgcgcggcccggcagtgctgcaaccgctacagcagccgcaggaagcagctcaccttccaccggtttccgttcagccgcccggagctgctgaaggaatgggtgctgaacatcggccggggcaacttcaagcccaagcagcacacggtcatctgctccgagcacttccggccagagtgcttcagcgcctttggaaaccgcaagaacctaaagcacaatgccgtgcccacggtgttcgcctttcaggaccccacacagcaggtgagggagaacacagaccctgccagtgagagaggaaatgccagctcttctcagaaagaaaaggtcctccctgaggcgggggccggagaggacagtcctgggagaaacatggacactgcacttgaagagcttcagttgcccccaaatgccgaaggccacgtaaaacaggtaagactgagtgcaaaggtggtctgtggttggacacaagatgacttgctccaaacaaaatggaaaccagtgagcacccaccatgagacctgtgtggccgaggcagggtgtgcagcctgggtttcagagctccccagtcaaattctccaccatggtgtgggcacatctggattttgggggagcagcccggagtgtctagctgccctggggttgtgctgtgtgcgtgtctggtggcctgctcaccatggcccgccttcctgctggtgatgcagctctaggctctcactcccctgtcctcaggtctcgccacggaggccgcaagcaacagaggctgttggccggccgactggccctgcaggcctgagaaggacccccaacaagcagccatctgatcacagctatgcccttttggacttagattccctgaagaaaaaactcttcctcactctgaaggaaaatgaaaagctccggaagcgcttgcaggcccagaggctggtgatgcgaaggatgtccagccgcctccgtgcttgcaaagggcaccagggactccaggcca

SEQ ID NO: 190767 - DNA, 1211 bp, Homo sapiens
  Payload ID: 17686
  Gene Name: theg spermatid protein
  Uniprot ID: Q9P2T0
  ENST ID: ENST00000346878
  CDS Start-End: 1-1068
atgggggacagcaggcgaaggtcactcgggaaccagcccagctctgaggctgcgggcaggtcggaaagggagcaggacggcgacccccgtggcctccagagctctgtgtacgagagccggcgggtcacagaccccgaacgccaggacctggacaatgcagagctgggaccagaagacccagaagaggagcttccccccgaggaggtggccggggaggagttcccggagaccctggatcccaaagaggcactttctgagttggagagagtcctggacaaggacttggaagaggacattcctgaaatcagccggctgtccatcagccagaagctccccagcaccaccatgaccaaagcaaggaagaggaggaggcggaggaggctcatggagctggcagagcccaagataaactggcaagtcctgaaagacaggccctctgtgtactggaccgagcggttccttgaggacaccaccctcaccatcacagtgcccgcggtgtcccgccgcgtggaggaactgtctcggcccaagagattctacctggaatattacaacaacaacaggacgactcctgtctggcccattcctcggtcctccctggaatacagagcgtcgagtcgcctgaaggaactggccgccccgaagattcgtgataacttctggagcatgcccatgtctgaggtgtcccaggtatccagggcagcccaaatggcagtccccagctcgcggatcctccagttgtcaaagccgaaggccccagccaccctcttggaagagtgggaccccgtgccaaaacccaagccacatgtgtcagaccataaccgcctccttcacttggccaggcccaaagctcagtcggacaagtgcgttcctgaccgagatcctcgctgggaggtgctggatgtcaccaagaaggtggtggccagcccccggatcatctccctggccaagcccaaagtgcgcaagggcctcaacgagggatacgacaggcgtcccctcgcctctatgagcttgccacccccaaaagcatcaccagaaaagtgtgatcaacccaggcctggcctctaagacctccgctcccagtaaacaccctcaggcaccctaaccctgtgtatgtgattattctgagctttttggcctggagaagggagggcgggctagaaggccaaaagaaggatgaggaggacaataatatttatttttgcatccaa

SEQ ID NO: 190768 - DNA, 1877 bp, Homo sapiens
  Payload ID: 17686
  Gene Name: theg spermatid protein
  Uniprot ID: Q9P2T0
  ENST ID: ENST00000342640
  CDS Start-End: 701-1840
tcagctcctttggcgacgtacgaggaattcctgaaggcagcagcctggggaatactccagttataaccattattttgttgtgagggttggaacagcctattttgaagttatttctcatgagaggttggggctggaagcgtctgtatcacctagggtgcagttttagctgctaggaattggaaaccaagccaaaacgacttagtactaaggaaacttactgtttcaagtaacaagaagcctggacacagagtggattccaaggctgctaagttcagaggctcgacagccacatcaaaggcccacctttcagttcatctgccctcagatggcaggcctcatggtcacaagaaggctgcctgggctctggacattaccgacgggccccacagggacaggaacaggagacgcggtctcttccttgtgtctccttttgagagagggaatccatagctagatgcccctgcaggttcccgtcaggtctccttcctaaaccaatcctgggaggtcctgagtgagccgtgaccaccaggactgagtcctgatcccagcgcaagcccaggtgaccagcattggagacggcgcacgggttagaatgtggaccgtggggaatgtgacggacgctctcctgttgccgcggccaccacagacacatttgggtgccgggagagtgaggccgcgggggctgggaagggaccggtgtatgggggacagcaggcgaaggtcactcgggaaccagcccagctctgaggctgcgggcaggtcggaaagggagcaggacggcgacccccgtggcctccagagctctgtgtacgagagccggcgggtcacagaccccgaacgccaggacctggacaatgcagagctgggaccagaagacccagaagaggagcttccccccgaggaggtggccggggaggagttcccggagaccctggatcccaaagaggcactttctgagttggagagagtcctggacaaggacttggaagaggacattcctgaaatcagccggctgtccatcagccagaagctccccagcaccaccatgaccaaagcaaggaagaggaggaggcggaggaggctcatggagctggcagagcccaagataaactggcaagtcctgaaagacaggaagggacgctgtggtaaggggtatgcctggatctccccatgtaagatgagcttgcacttctgtctctgctggccctctgtgtactggaccgagcggttccttgaggacaccaccctcaccatcacagtgcccgcggtgtcccgccgcgtggaggaactgtctcggcccaagagattctacctggaatattacaacaacaacaggacgactcctgtctggcccattcctcggtcctccctggaatacagagcgtcgagtcgcctgaaggaactggccgccccgaagattcgtgataacttctggagcatgcccatgtctgaggtgtcccaggtatccagggcagcccaaatggcagtccccagctcgcggatcctccagttgtcaaagccgaaggccccagccaccctcttggaagagtgggaccccgtgccaaaacccaagccacatgtgtcagaccataaccgcctccttcacttggccaggcccaaagctcagtcggacaagtgcgttcctgaccgagatcctcgctgggaggtgctggatgtcaccaagaaggtggtggccagcccccggatcatctccctggccaagcccaaagtgcgcaagggcctcaacgagggatacgacaggcgtcccctcgcctctatgagcttgccacccccaaaagcatcaccagaaaagtgtgatcaacccaggcctggcctctaagacctccgctcccagtaaacaccctcaggcaccctaa

SEQ ID NO: 190769 - DNA, 1162 bp, Homo sapiens
  Payload ID: 17686
  Gene Name: theg spermatid protein
  ENST ID: ENST00000530711
  CDS Start-End: 237-650
gcgagcagtggagctgcggttggtccaggccttcgtggtgccaaagtcctccctcagagacccctcgagggaaaggagaggcgggtgggcagggtgagtgcagacaaaaggcgcttgagcaagacccacgcttctctgggctcccaaacgcatcggggcgggaaagcagctccaacttcaacgtggaattctcccaaagccggctgtccatcagccagaagctccccagcaccaccatgaccaaagcaaggaagaggaggaggcggaggaggctcatggagctggcagagcccaagataaactggcaagtcctgaaagacaggtgtcccaggtatccagggcagcccaaatggcagtccccagctcgcggatcctccagttgtcaaagccgaaggccccagccaccctcttggaagagtgggaccccgtgccaaaacccaagccacatgtgtcagaccataaccgcctccttcacttggccaggcccaaagctcagtcggacaagtgcgttcctgaccgagatcctcgctgggaggtgctggatgtcaccaagaaggtggtggccagcccccggatcatctccctggccaagcccaaagtgcgcaagggcctcaacgagggatacgacaggcgtcccctcgcctctatgagcttgccacccccaaaagcatcaccagaaaagtgtgatcaacccaggcctggcctctaagacctccgctcccagtaaacaccctcaggcaccctaaccctgtgtatgtgattattctgagctttttggcctggagaagggagggcgggctagaaggccaaaagaaggatgaggaggacaataatatttatttttgcatccaacctgcgacttgtccagctgtttattttccgagtcactttcattgaccatctcgagcgccttctgaatctcttcagtccagacttattcgtccattcctgagggcccacgggaccgtcggagtcggaacgacagccacagtcaaaccagccgacgctcctgctgaggggccacgggaccgtcggagtcggaacgacagccacagtcaaaccagccgacgctcctgctgaggggccacgggaccgtcggagtcggaacgacagccacagtcaaagcagccgacgctcctgctgagggcccacgggaccgtcg

SEQ ID NO: 190770 - DNA, 1650 bp, Homo sapiens
  Payload ID: 17687
  Gene Name: theg spermatid protein-like
  Uniprot ID: P0DJG4
  ENST ID: ENST00000512175
  CDS Start-End: 69-1466
gagcaaactgcgcctgggcaaccagtcgggagggtgagtcccgcgcgcgacagaagcttctggcgcgaatggagaaccaagagtttctaagttcatctgcgccgtccgaggtgaccgatgggcaggtctcaacagaaatatccacttgctccgaagtcttccagaagcccattgtgctcaggattctcgacactcacagagagcttgaggagtccgaggatcccgagaaacacgagaatcccgaggaacccgaggaggtcagggagcaagaccagagagacgagtccgaggaatgtgatgagcctcatgagtcctatgagccccacgctccctatgcgccccacaagccccgggactcctatgcaccttacgaactccatgggccccatgcagcccccaaactcctcaaggcccgtgaaccccgccagctccgccacacccgtgagccccgcaagtcccgcgaggccaaggaaaccgagttgcttcccagcgccgcagtaatgatctccccctctctgatcaccagagccccgccacggcctcagctgtctttcctgggtgcaaatcctgtttcctgtgactttgtaaggaaatgtttttcttctaggaagagaaccccaaatctttcaaagcctaaaaagcaatggggaactccagacagaaaactgttttggggaaatcaagatcctattcgccctgtttcccagggtgctttgaaggctcagctgaccaaaagacttgagaaccttgcccagcccaaggaagtttcctgccactatgtacctaacagggctcaatactaccacagctgtggaagagagtctgtaatttgggagatcactcctcctgcattgtttagacaaccctccaaaaggatccagaggctgtcacagcccaatggattcaaaagacagtgtctactaaatagacccttcagtgataactcagcaagagattctcttcgaatctctgatccttctccccggatattacaactctcagtagccaaaggcacagacccaaactatcatccttcaaaaaaaatgcaaaccaagatttcactttctaccctgagtgcgattgcaactccaagaattatagagcttgcccacccaaggatcaagttagagggtctgtgctatgaaagacaaagaagtgaactgcccatccgtcctgtacctcctgctgccatgatagctaaacctagcccccgaacaatagctctagcgaagtccaagtctgttcatcaagattatctacctgaccgtgatgcccattggccagtatcttatgctactactcattccaaagcatcacctaggattcaggaactagctaatccaaataagagggctcctgtgcgtattgtgtattatgatccagatgtctttaaaaccaagccagctgctttgaaagcacagtgttctcaaaggatctgggagttgtcacaacctcttacacgttaaatacagaaagccacaacagtcagaccctggttatgtatctagaacacatattagatgacttagttccctgttgcggtactgtcagtttacattcaccccttgcttcccctcccacaaaatgagacctttagggaaaaccaccatgatcattaaatagcagttgttgctgttaacctgtcgctga

SEQ ID NO: 190771 - DNA, 2439 bp, Homo sapiens
  Payload ID: 17688
  Gene Name: thiamin pyrophosphokinase 1
  Uniprot ID: Q9H3S4
  ENST ID: ENST00000360057
  CDS Start-End: 104-835
aaggctcctcagccgagcgccgagcggtcgatcgccgtagctcccgcagcctgcgatctccagtctgtggctcctaccagccattgtaggccaataatccgttatggagcatgcctttaccccgttggagcccctgctttccactgggaatttgaagtactgccttgtaattcttaatcagcctttggacaactattttcgtcatctttggaacaaagctcttttaagagcctgtgccgatggaggtgccaaccgcttatatgatatcaccgaaggagagagagaaagctttttgcctgaattcatcaatggagactttgattctattaggcctgaagtcagagaatactatgctactaagggatgtgagctcatttcaactcctgatcaagaccacactgactttactaagtgccttaaaatgctccaaaagaagatagaagaaaaagacttaaaggttgatgtgatcgtgacactgggaggccttgctgggcgttttgaccagattatggcatctgtgaataccttgttccaagcgactcacatcactccttttccaattataataatccaagaggaatcgctgatctacctgctccaaccaggaaagcacaggttgcatgtagacactggaatggagggtgattggtgtggccttattcctgttggacagccttgtatgcaggttacaaccacaggcctcaagtggaacctcacaaatgatgtgcttgcttttggaacattggtcagtacttccaatacctacgacgggtctggtgttgtgactgtggaaactgaccacccactcctctggaccatggccatcaaaagctaacctgttgactggcatccataagtgtgcctctgccttatctcatttctcaacagttcattgctcaacaagaacgattcacctgggtttgcaagaatctaaacctctctaggggaagcccactgggtttaaagatgttagtgtttagataatacaggtaacattataaatgacagatctcaattttatagtagtgggaaagatacatgctaagaaagcaaataagctctattatattcggttggaacctaatgggaatcattccactatacaattcagtactgattattcttcttacattattaatcattccatttatcctagaaaattgtttttaatttgaatcagagaaaactgttgaggttcctcttggagtctagaacatccttaaatgtctaacaacaagggctacctctgagtaccttttagtattagttttctgtatatgatatatattatcttatactgaaaaaaaattcctttcagattggggtgttagaagtgcaccaggtcactctgaccttattactgtctttggtattgtcttaaataaatcaagaatcattgacctaattgttaaatttaaaaataggtagttagcaataggtggaaagagaaatgatgtgaaagataaatgatgattcgtggagccctactcacacattaacccccaaattcaaaagtaagaatgcaaaagtctagagggggtaacagtctgcatcatcatcacaacctaaatggagaaagctgtgcagaggaaacttaagcataaaaattgaattcgtttctgacataccttagactgaaaaactgttggttcatccagaagtgtattcatattaccagaaaatgagtttgtctatggggatacatgaacttcatatactaaggagcctaactccaaagcctgcgttctcatcccagtctgatattcacctaagtttccggacccttttccttagctgtaaaatggaagcggttggactgatggtgtctgaggttctttcccacactgaaattctaaatattgacacttagcagtcatagggctgataatacacacagttactgacttagcctaaacaacctggtgcatcgaaatgtattcacctttcttttgtaaagagaccatcttctatcttctttccacctttctctgttttatgaaaccaactgttgacatacaaaccatgattgaaggagaacctgtccaacatgttttatgtacacaaatccctatgttgctataagaaaagtgaaagtaactgttttcttcttggtgctatgacagtgtgagactcaggttgtctgtagagaatgaaaggagcagtggcccgcgtgattgtggcatttaaggagcagtggcccatgtgactgtggcattttcggcacttttcattactttctgcttgaccggaagttgaggcttagctatgtttccatcttcagtttctgaagactagttatatattccttactagaaatatattcataatatataaaagaaatatatctgtgattttaaaattttgctaccaaagaatgcatgttctgtgtgccctgaaaatgttaccagtgttaataaatggatacttatcaaaaaagaa

SEQ ID NO: 190772 - DNA, 1920 bp, Homo sapiens
  Payload ID: 17688
  Gene Name: thiamin pyrophosphokinase 1
  ENST ID: ENST00000378098
  CDS Start-End: 104-469
aaggctcctcagccgagcgccgagcggtcgatcgccgtagctcccgcagcctgcgatctccagtctgtggctcctaccagccattgtaggccaataatccgttatggagcatgcctttaccccgttggagcccctgctttccactgggaatttgaagtactgccttgtaattcttaatcagcctttggacaactattttcgtcatctttggaacaaagctcttttaagagcctgtgccgatggaggtgccaaccgcttatatgatatcaccgaaggagagagagaaagctttttgcctgaattcatcaatggagactttgattctattaggcctgaagtcagagaatactatgctactaagggatgtgagctcatttcaactcctgatcaagaccacactgactttactaagtgccttaaaatgctccaaaagaagatagaagaaaaagacttaaagaagaaacagtgaaaggaatactgttcaattccaacatcagctgtgtaaccgaggcatcgtaatacttttatgacaagtttcactacctttttgcctgtgccagtgtacctcaaagggatatggttgatgtgatcgtgacactgggaggccttgctgggcgttttgaccagattatggcatctgtgaataccttgttccaagcgactcacatcactccttttccaattataataatccaagaggaatcgctgatctacctgctccaaccaggaaagcacaggttgcatgtagacactggaatggagggtgattggtgtggccttattcctgttggacagccttgtatgcaggttacaaccacaggcctcaagtggaacctcacaaatgatgtgcttgcttttggaacattggtcagtacttccaatacctacgacgggtctggtgttgtgactgtggaaactgaccacccactcctctggaccatggccatcaaaagctaacctgttgactggcatccataagtgtgcctctgccttatctcatttctcaacagttcattgctcaacaagaacgattcacctgggtttgcaagaatctaaacctctctaggggaagcccactgggtttaaagatgttagtgtttagataatacaggtaacattataaatgacagatctcaattttatagtagtgggaaagatacatgctaagaaagcaaataagctctattatattcggttggaacctaatgggaatcattccactatacaattcagtactgattattcttcttacattattaatcattccatttatcctagaaaattgtttttaatttgaatcagagaaaactgttgaggttcctcttggagtctagaacatccttaaatgtctaacaacaagggctacctctgagtaccttttagtattagttttctgtatatgatatatattatcttatactgaaaaaaaattcctttcagattggggtgttagaagtgcaccaggtcactctgaccttattactgtctttggtattgtcttaaataaatcaagaatcattgacctaattgttaaatttaaaaataggtagttagcaataggtggaaagagaaatgatgtgaaagataaatgatgattcgtggagccctactcacacattaacccccaaattcaaaagtaagaatgcaaaagtctagagggggtaacagtctgcatcatcatcacaacctaaatggagaaagctgtgcagaggaaacttaagcataaaaattgaattcgtttctgacataccttagactgaaaaactgttggttcatccagaagtgtattcatattaccagaaaatgagtttgtctatggggatacatgaacttcatatactaaggagcctaactccaaagcctgcgttctcatcccagtctgatattcacctaagtttccggacccttttccttagctgt

SEQ ID NO: 190773 - DNA, 2283 bp, Homo sapiens
  Payload ID: 17688
  Gene Name: thiamin pyrophosphokinase 1
  ENST ID: ENST00000378099
  CDS Start-End: 104-688
aaggctcctcagccgagcgccgagcggtcgatcgccgtagctcccgcagcctgcgatctccagtctgtggctcctaccagccattgtaggccaataatccgttatggagcatgcctttaccccgttggagcccctgctttccactgggaatttgaagtactgccttgtaattcttaatcagcctttggacaactattttcgtcatctttggaacaaagctcttttaagagcctgtgccgatggaggtgccaaccgcttatatgatatcaccgaaggagagagagaaagctttttgcctgaattcatcaatggagactttgattctattaggcctgaagtcagagaatactatgctactaagggatgtgagctcatttcaactcctgatcaagaccacactgactttactaagtgccttaaaatgctccaaaagaagatagaagaaaaagacttaaagggaaagcacaggttgcatgtagacactggaatggagggtgattggtgtggccttattcctgttggacagccttgtatgcaggttacaaccacaggcctcaagtggaacctcacaaatgatgtgcttgcttttggaacattggtcagtacttccaatacctacgacgggtctggtgttgtgactgtggaaactgaccacccactcctctggaccatggccatcaaaagctaacctgttgactggcatccataagtgtgcctctgccttatctcatttctcaacagttcattgctcaacaagaacgattcacctgggtttgcaagaatctaaacctctctaggggaagcccactgggtttaaagatgttagtgtttagataatacaggtaacattataaatgacagatctcaattttatagtagtgggaaagatacatgctaagaaagcaaataagctctattatattcggttggaacctaatgggaatcattccactatacaattcagtactgattattcttcttacattattaatcattccatttatcctagaaaattgtttttaatttgaatcagagaaaactgttgaggttcctcttggagtctagaacatccttaaatgtctaacaacaagggctacctctgagtaccttttagtattagttttctgtatatgatatatattatcttatactgaaaaaaaattcctttcagattggggtgttagaagtgcaccaggtcactctgaccttattactgtctttggtattgtcttaaataaatcaagaatcattgacctaattgttaaatttaaaaataggtagttagcaataggtggaaagagaaatgatgtgaaagataaatgatgattcgtggagccctactcacacattaacccccaaattcaaaagtaagaatgcaaaagtctagagggggtaacagtctgcatcatcatcacaacctaaatggagaaagctgtgcagaggaaacttaagcataaaaattgaattcgtttctgacataccttagactgaaaaactgttggttcatccagaagtgtattcatattaccagaaaatgagtttgtctatggggatacatgaacttcatatactaaggagcctaactccaaagcctgcgttctcatcccagtctgatattcacctaagtttccggacccttttccttagctgtaaaatggaagcggttggactgatggtgtctgaggttctttcccacactgaaattctaaatattgacacttagcagtcatagggctgataatacacacagttactgacttagcctaaacaacctggtgcatcgaaatgtattcacctttcttttgtaaagagaccatcttctatcttctttccacctttctctgttttatgaaaccaactgttgacatacaaaccatgattgaaggagaacctgtccaacatgttttatgtacacaaatccctatgttgctataagaaaagtgaaagtaactgttttcttcttggtgctatgacagtgtgagactcaggttgtctgtagagaatgaaaggagcagtggcccgcgtgattgtggcatttaaggagcagtggcccatgtgactgtggcattttcggcacttttcattactttctgcttgaccggaagttgaggcttagctatgtttccatcttcagtttctgaagactagttatatattccttactagaaatatattcataatatataaaagaaatatatctgtgattttaaaattttgctaccaaagaatgcatgttctgtgtgccctgaaaatgttaccagtgttaataaatggatacttatc

SEQ ID NO: 190774 - DNA, 2243 bp, Homo sapiens
  Payload ID: 17688
  Gene Name: thiamin pyrophosphokinase 1
  ENST ID: ENST00000538212
  CDS Start-End: 72-641
aaagtactgtgcattttatgtactgcttgactacaacatcgtttgctttgctcttttaagagcctgtgccgatggaggtgccaaccgcttatatgatatcaccgaaggagagagagaaagcctccaacttgaaactctcctcgaggcccccagccaccagtcatctcatcaggacaccgaaagacacccattactgtggagcttccaagggtcttggcaactcttttatcggaaacgagagctttttgcctgaattcatcaatggagactttgattctattaggcctgaagtcagagaatactatgctactaagggatgtgagctcatttcaactcctgatcaagaccacactgactttactaagtgccttaaaatgctccaaaagaagatagaagaaaaagacttaaagggaaagcacaggttgcatgtagacactggaatggagggtgattggtgtggccttattcctgttggacagccttgtatgcaggttacaaccacaggcctcaagtggaacctcacaaatgatgtgcttgcttttggaacattggtcagtacttccaatacctacgacgggtctggtgttgtgactgtggaaactgaccacccactcctctggaccatggccatcaaaagctaacctgttgactggcatccataagtgtgcctctgccttatctcatttctcaacagttcattgctcaacaagaacgattcacctgggtttgcaagaatctaaacctctctaggggaagcccactgggtttaaagatgttagtgtttagataatacaggtaacattataaatgacagatctcaattttatagtagtgggaaagatacatgctaagaaagcaaataagctctattatattcggttggaacctaatgggaatcattccactatacaattcagtactgattattcttcttacattattaatcattccatttatcctagaaaattgtttttaatttgaatcagagaaaactgttgaggttcctcttggagtctagaacatccttaaatgtctaacaacaagggctacctctgagtaccttttagtattagttttctgtatatgatatatattatcttatactgaaaaaaaattcctttcagattggggtgttagaagtgcaccaggtcactctgaccttattactgtctttggtattgtcttaaataaatcaagaatcattgacctaattgttaaatttaaaaataggtagttagcaataggtggaaagagaaatgatgtgaaagataaatgatgattcgtggagccctactcacacattaacccccaaattcaaaagtaagaatgcaaaagtctagagggggtaacagtctgcatcatcatcacaacctaaatggagaaagctgtgcagaggaaacttaagcataaaaattgaattcgtttctgacataccttagactgaaaaactgttggttcatccagaagtgtattcatattaccagaaaatgagtttgtctatggggatacatgaacttcatatactaaggagcctaactccaaagcctgcgttctcatcccagtctgatattcacctaagtttccggacccttttccttagctgtaaaatggaagcggttggactgatggtgtctgaggttctttcccacactgaaattctaaatattgacacttagcagtcatagggctgataatacacacagttactgacttagcctaaacaacctggtgcatcgaaatgtattcacctttcttttgtaaagagaccatcttctatcttctttccacctttctctgttttatgaaaccaactgttgacatacaaaccatgattgaaggagaacctgtccaacatgttttatgtacacaaatccctatgttgctataagaaaagtgaaagtaactgttttcttcttggtgctatgacagtgtgagactcaggttgtctgtagagaatgaaaggagcagtggcccgcgtgattgtggcatttaaggagcagtggcccatgtgactgtggcattttcggcacttttcattactttctgcttgaccggaagttgaggcttagctatgtttccatcttcagtttctgaagactagttatatattccttactagaaatatattcataatatataaaagaaatatatctgtgattttaaaattttgctaccaaagaatgcatgttctgtgtgccctgaaaatgttaccagtgttaataaatggatacttatcaaaaaag

SEQ ID NO: 190775 - DNA, 581 bp, Homo sapiens
  Payload ID: 17688
  Gene Name: thiamin pyrophosphokinase 1
  ENST ID: ENST00000552881
  CDS Start-End: 82-581
aaagcttttaacccgacggctcagggaggacaccggtagcaggactagaagcagcacagtggaaaaggccaataatccgttatggagcatgcctttaccccgttggagcccctgctttccactgggaatttgaagtactgccttgtaattcttaatcagcctttggacaactattttcgtcatctttggaacaaagctcttttaagagcctgtgccgatggaggtgccaaccgcttatatgatatcaccgaaggagagagagaaagctttttgcctgaattcatcaatggagactttgattctattaggcctgaagtcagagaatactatgctactaagggatgtgagctcatttcaactcctgatcaagaccacactgactttactaagtgccttaaaatgctccaaaagaagatagaagaaaaagacttaaaggttgatgtgatcgtgacactgggaggccttgctgggcgttttgaccagattatggcatctgtgaataccttgttccaagcgactcacatcactccttttccaattataataatccaagaggaatcgctgatctacctgctccaacc

SEQ ID NO: 190776 - DNA, 2815 bp, Homo sapiens
  Payload ID: 17688
  Gene Name: thiamin pyrophosphokinase 1
  ENST ID: ENST00000482940
  CDS Start-End: 209-448
ggcagttaactgccaccaagtggtggttgtatgccatagctctgtaacatgaacagtgtttccaataaactgtccaccgcaaaacccgttaaaaaatgagtgagctccatgagctgaggagctagcagattgccgggattacaaagacaacgagacaggaccctttccttagcaggatttacaatctctcttttaagagcctgtgccgatggaggtgccaaccgcttatatgatatcaccgaaggagagagagaaagattcctctgacagtatcctccaagacctgacatggacaatgtgtgaaaaagcgctcaacctccaacttgaaactctcctcgaggcccccagccaccagtcatctcatcaggacaccgaaagacacccattactgtggagcttccaagggtcttggcaactcttttatcggaaacgagagctttttgcctgaattcatcaatggagactttgattctattaggcctgaagtcagagaatactatgctactaagggatgtgagctcatttcaactcctgatcaagaccacactgactttactaagtgccttaaaatgctccaaaagaagatagaagaaaaagacttaaagaagaaacagtgaaaggaatactgttcaattccaacatcagctgtgtaaccgaggcatcgtaatacttttatgacaagtttcactacctttttgcctgtgccagtgtacctcaaagggatatggttgatgtgatcgtgacactgggaggccttgctgggcgttttgaccagattatggcatctgtgaataccttgttccaagcgactcacatcactccttttccaattataataatccaagaggaatcgctgatctacctgctccaaccaggaaagcacaggttgcatgtagacactggaatggagggtgattggtgtggccttattcctgttggacagccttgtatgcaggttacaaccacaggcctcaagtggaacctcagaacttgtgactacactaggaccacctggatagccaaggataatcccgtcccaagactaatcagattaatcagacttaatcacatctgtaaagttcctcttgccatcaaatgatgtgcttgcttttggaacattggtcagtacttccaatacctacgacgggtctggtgttgtgactgtggaaactgaccacccactcctctggaccatggccatcaaaagctaacctgttgactggcatccataagtgtgcctctgccttatctcatttctcaacagttcattgctcaacaagaacgattcacctgggtttgcaagaatctaaacctctctaggggaagcccactgggtttaaagatgttagtgtttagataatacaggtaacattataaatgacagatctcaattttatagtagtgggaaagatacatgctaagaaagcaaataagctctattatattcggttggaacctaatgggaatcattccactatacaattcagtactgattattcttcttacattattaatcattccatttatcctagaaaattgtttttaatttgaatcagagaaaactgttgaggttcctcttggagtctagaacatccttaaatgtctaacaacaagggctacctctgagtaccttttagtattagttttctgtatatgatatatattatcttatactgaaaaaaaattcctttcagattggggtgttagaagtgcaccaggtcactctgaccttattactgtctttggtattgtcttaaataaatcaagaatcattgacctaattgttaaatttaaaaataggtagttagcaataggtggaaagagaaatgatgtgaaagataaatgatgattcgtggagccctactcacacattaacccccaaattcaaaagtaagaatgcaaaagtctagagggggtaacagtctgcatcatcatcacaacctaaatggagaaagctgtgcagaggaaacttaagcataaaaattgaattcgtttctgacataccttagactgaaaaactgttggttcatccagaagtgtattcatattaccagaaaatgagtttgtctatggggatacatgaacttcatatactaaggagcctaactccaaagcctgcgttctcatcccagtctgatattcacctaagtttccggacccttttccttagctgtaaaatggaagcggttggactgatggtgtctgaggttctttcccacactgaaattctaaatattgacacttagcagtcatagggctgataatacacacagttactgacttagcctaaacaacctggtgcatcgaaatgtattcacctttcttttgtaaagagaccatcttctatcttctttccacctttctctgttttatgaaaccaactgttgacatacaaaccatgattgaaggagaacctgtccaacatgttttatgtacacaaatccctatgttgctataagaaaagtgaaagtaactgttttcttcttggtgctatgacagtgtgagactcaggttgtctgtagagaatgaaaggagcagtggcccgcgtgattgtggcatttaaggagcagtggcccatgtgactgtggcattttcggcacttttcattactttctgcttgaccggaagttgaggcttagctatgtttccatcttcagtttctgaagactagttatatattccttactagaaatatattcataatatataaaagaaatatatctgtgattttaaaattttgctaccaaagaatgcatgttctgtgtgccctgaaaatgttaccagtgttaataaatggatacttatcaaaaaagaa

SEQ ID NO: 190777 - DNA, 440 bp, Homo sapiens
  Payload ID: 17688
  Gene Name: thiamin pyrophosphokinase 1
  ENST ID: ENST00000489798
  CDS Start-End: 211-339
ttggcagttaactgccaccaagtggtggttgtatgccatagctctgtaacatgaacagtgtttccaataaactgtccaccgcaaaacccgttaaaaaatgagtgagctccatgagctgaggagctagcagattgccgggattacaaagacaacgagacaggaccctttccttagcaggatttacaatctctcttttaagagcctgtgccgatggaggtgccaaccgcttatatgatatcaccgaaggagagagagaaagctttttgcctgaattcatcaatggagactttgattctattaggcctgaagtcagagaatactatgctactaaggtgttaattttctcaatattgggcacatctttcaaagaagagaaggaacctttctcaggaaggagggaagagaaaaagtcttagaagaacatagcatcaagaatattg

SEQ ID NO: 190778 - DNA, 2860 bp, Homo sapiens
  Payload ID: 17689
  Gene Name: thiamine triphosphatase
  Uniprot ID: Q9BU02
  ENST ID: ENST00000288014
  CDS Start-End: 737-1429
gcctcaggcatgagacctgtaccagcccccgggagccgtgcggggccaacaatgaggagcagaatgcaaggggcggcctcgctcccctggccaccgcgggggtcgcggcctcccattacatagcgcgtgtctcgagccctggcctgctctcggcaccgccacaacgggcgtaatatggccgctggtgccgggacctgccgggcgcgcggagggtcgggccgaggtccgggatccggaactgctcccggcattcctcgcgagtgtatggcgtgggctcccttccccctctgtgggtcccgcgaggagactctcgggctttgaggtgagacctgaagttccgctggccggtagtgtagcaggaaagggcaggtcctcccgggtcgtgagccagtagcctcctggggtggcaaggtgtagagaggggggcgttgaaaggacacccgctacccggcctgctttctaggggtctctttggattgaggacatcagcagcagtggaagggattttactggagacctgtcactgtcagagccttaaaatatcaccgacggggccttaatgtcaccgaggtagagagaaaagggcagtagccctagagactattgcgacacagtgtgcccctcataagtttttccagggaggggttctgtactgagttgacgccccaggagctgagcaccaggctttgcatccttgggaactcagcaaacgtttgttcagccaattgcaggtagcatggcccagggcttgattgaggtggagcgaaagttccttccagggcctggcacagaggagcggctgcaggagttggggggcaccctggagtaccgggtcaccttccgagacacctactatgacacccctgagctgagcctcatgcaggctgaccactggctgcgacgacgagaggatagtggatgggagctcaaatgtcctggagcagcaggtgtcttaggaccccacacggagtataaggaactcacagcggaacctacaattgtggcccaactctgtaaggtgctgcgggctgacggcctgggggctggagatgtggctgctgtgctgggcccactggggctgcaggaagtagctagttttgtgactaagcggagtgcctggaagctggtgctcttgggagctgatgaagaggagccacagctcagggtggacttggatacagccgactttggctacgctgtgggtgaggtagaggccctggtgcatgaggaggctgaagtaccaactgccctagagaagatccacaggctcagcagcatgcttggtgtgcctgcacaggagacagcaccagccaagctgattgtgtatctacagcgtttccggcctcaagactatcagcgcctgctagaagtgaacagctccagagagaggccacaggagactgaagatcctgaccactgcctgggctaggggtgtcacttcctagaaggggaagggaactctgggtctaacggagtccactcctgggcccactgtgcctctcccctcagtgtcccttctgacagtgactcctctctctccagcgctgcctgtttcttccccctcctctaagctactcttccttgagccctccctggctgcttcctctcgctcatccgtcagatgcaatctgtgggccgcccctctcccctggccgctaagcagcctccattgatttccgctcgtgtttataggatttccacttagccgtgatcagtagttaagcacaggaaaatcccttgccaccccccctcccttggtcgatgccattgattctgccagcggctcctaaaccgccttacagctgagttagaagatgaggagaggcagcagggatttccctgccttgggatgtgggaaacagaagaaaagttgaggaaatggttgggaatcgctgttagaactctagaaattctaatctgactttgccactgtgcccagctctggcccagagggtagagtgcctcctgtggaagtttaggggcaaatttgttccctgacctggagagggttagaaagaaccaacagctgccccctccccgcccccgtgttgagacaggttctcaaggctcaggggaagatgcatacctcctatgtaagaatgctcttcccttgctgttattcatacacactttccacttcaaatatacccaaatatggctttcctcacttctcaggctttattgggctttatttgtgggagaagggggctggtccccagtttttgcagtgcaaagccagagcgccacctgctggtagccctcaggtgtaggttcgaagctgctggggccccctggggtttgggacacaggagaatttcaggctgtgagtggagacagttactgccacgattccacaggcaagttgttcacctcaaagatctcctgcaccgactggtgaaagtggtcgtaggtgaggcgcagctttagccgcaggggggcctaggaataggagagcagggaccagggttagcacccacggcttcttctatccctgggtcttgtcttgggggaactcctgaagctcaccttgttaggattgaggattctgaagagctgggtgataggaaggccaccccgagctggaactgtgttcccactgggggcctgcagctgcagctggagactctgaacacaggagtttaacagagcacagtatggcagtaggtagggctcaggcagcccctctatactcagtggctccacacccttttcctgtaactccccaagtgctgatctccagatgactcaatcccatctcacactgtctcccacccacctcctccacttagtggccttttctcctggagtccccaggccacctctgaactctgatctttacaaaccttgggcacagcagcct

SEQ ID NO: 190779 - DNA, 1779 bp, Homo sapiens
  Payload ID: 17689
  Gene Name: thiamine triphosphatase
  Uniprot ID: Q9BU02
  ENST ID: ENST00000404535
  CDS Start-End: 353-1045
ggggtgcctggctcagcctcaggcatgagacctgtaccagcccccgggagccgtgcggggccaacaatgaggagcagaatgcaaggggcggcctcgctcccctggccaccgcgggggtcgcggcctcccattacatagcgcgtgtctcgagccctggcctgctctcggcaccgccacaacgggcgtaatatggccgctggtgccgggacctgccgggcgcgcggagggtcgggccgaggtccgggatccggaactgctcccggcattcctcgcgagtgtatggcgtgggctcccttccccctctgtgggtcccgcgaggagactctcgggctttgagccaattgcaggtagcatggcccagggcttgattgaggtggagcgaaagttccttccagggcctggcacagaggagcggctgcaggagttggggggcaccctggagtaccgggtcaccttccgagacacctactatgacacccctgagctgagcctcatgcaggctgaccactggctgcgacgacgagaggatagtggatgggagctcaaatgtcctggagcagcaggtgtcttaggaccccacacggagtataaggaactcacagcggaacctacaattgtggcccaactctgtaaggtgctgcgggctgacggcctgggggctggagatgtggctgctgtgctgggcccactggggctgcaggaagtagctagttttgtgactaagcggagtgcctggaagctggtgctcttgggagctgatgaagaggagccacagctcagggtggacttggatacagccgactttggctacgctgtgggtgaggtagaggccctggtgcatgaggaggctgaagtaccaactgccctagagaagatccacaggctcagcagcatgcttggtgtgcctgcacaggagacagcaccagccaagctgattgtgtatctacagcgtttccggcctcaagactatcagcgcctgctagaagtgaacagctccagagagaggccacaggagactgaagatcctgaccactgcctgggctaggggtgtcacttcctagaaggggaagggaactctgggtctaacggagtccactcctgggcccactgtgcctctcccctcagtgtcccttctgacagtgactcctctctctccagcgctgcctgtttcttccccctcctctaagctactcttccttgagccctccctggctgcttcctctcgctcatccgtcagatgcaatctgtgggccgcccctctcccctggccgctaagcagcctccattgatttccgctcgtgtttataggatttccacttagccgtgatcagtagttaagcacaggaaaatcccttgccaccccccctcccttggtcgatgccattgattctgccagcggctcctaaaccgccttacagctgagttagaagatgaggagaggcagcagggatttccctgccttgggatgtgggaaacagaagaaaagttgaggaaatggttgggaatcgctgttagaactctagaaattctaatctgactttgccactgtgcccagctctggcccagagggtagagtgcctcctgtggaagtttaggggcaaatttgttccctgacctggagagggttagaaagaaccaacagctgccccctccccgcccccgtgttgagacaggttctcaaggctcaggggaagatgcatacctcctatgtaagaatgctcttcccttgctgttattcatacacactttccacttcaaatatacccaaatatggctttc

SEQ ID NO: 190780 - DNA, 1595 bp, Homo sapiens
  Payload ID: 17689
  Gene Name: thiamine triphosphatase
  Uniprot ID: Q9BU02
  ENST ID: ENST00000554789
  CDS Start-End: 465-782
ggctcccttccccctctgtgggtcccgcgaggagactctcgggctttgaggtgagacctgaagttccgctggccggtagtgtagcaggaaagggcaggtcctcccgggtcgtgagccagtagcctcctggggtggcaaggtgtagagaggggggcgttgaaaggacacccgctacccggcctgctttctaggggtctctttggattgaggacatcagcagcagtggaagggattttactggagacctgtcactgtcagagccttaaaatatcaccgacggggccttaatgtcaccgaggtagagagaaaagggcagtagccctagagactattgcgacacagtgtgcccctcataagtttttccagggaggggttctgtactgagttgacgccccaggagctgagcaccaggctttgcatccttgggaactcagcaaacgtttgttcagccaattgcaggtagcatggcccagggcttgattgaggtggagcgaaagttccttccagggcctggcacagaggagcggctgcaggagttggggggcaccctggagtaccgggtcaccttccgagacacctactatgacacccctgagctgagcctcatgcaggctgaccactggctgcgacgacgagaggatagtggatgggagctcaaatgtcctggagcagcaggtgtcttaggaccccacacggagtataaggaactcacagcggaacctacaattgtggcccaactctgtaaggtgtgcctgcacaggagacagcaccagccaagctgattgtgtatctacagcgtttccggcctcaagactatcagcgcctgctagaagtgaacagctccagagagaggccacaggagactgaagatcctgaccactgcctgggctaggggtgtcacttcctagaaggggaagggaactctgggtctaacggagtccactcctgggcccactgtgcctctcccctcagtgtcccttctgacagtgactcctctctctccagcgctgcctgtttcttccccctcctctaagctactcttccttgagccctccctggctgcttcctctcgctcatccgtcagatgcaatctgtgggccgcccctctcccctggccgctaagcagcctccattgatttccgctcgtgtttataggatttccacttagccgtgatcagtagttaagcacaggaaaatcccttgccaccccccctcccttggtcgatgccattgattctgccagcggctcctaaaccgccttacagctgagttagaagatgaggagaggcagcagggatttccctgccttgggatgtgggaaacagaagaaaagttgaggaaatggttgggaatcgctgttagaactctagaaattctaatctgactttgccactgtgcccagctctggcccagagggtagagtgcctcctgtggaagtttaggggcaaatttgttccctgacctggagagggttagaaagaaccaacagctgccccctccccgcccccgtgttgagacaggttctcaaggctcaggggaagatgcatacctcctatgtaagaatgctcttcccttgctgttattcatacacactt

SEQ ID NO: 190781 - DNA, 535 bp, Homo sapiens
  Payload ID: 17689
  Gene Name: thiamine triphosphatase
  Uniprot ID: Q9BU02
  ENST ID: ENST00000556015
  CDS Start-End: 89-406
attcctcgcgagtgtatggcgtgggctcccttccccctctgtgggtcccgcgaggagactctcgggctttgagccaattgcaggtagcatggcccagggcttgattgaggtggagcgaaagttccttccagggcctggcacagaggagcggctgcaggagttggggggcaccctggagtaccgggtcaccttccgagacacctactatgacacccctgagctgagcctcatgcaggctgaccactggctgcgacgacgagaggatagtggatgggagctcaaatgtcctggagcagcaggtgtcttaggaccccacacggagtataaggaactcacagcggaacctacaattgtggcccaactctgtaaggtgtgcctgcacaggagacagcaccagccaagctgattgtgtatctacagcgtttccggcctcaagactatcagcgcctgctagaagtgaacagctccagagagaggccacaggagactgaagatcctgaccactgcctgggctaggggtgtcacttcctagaag

SEQ ID NO: 190782 - DNA, 339 bp, Homo sapiens
  Payload ID: 17689
  Gene Name: thiamine triphosphatase
  ENST ID: ENST00000556545
  CDS Start-End: 1-182
aactcacagcggaacctacaattgtggcccaactctgtgtgcctgcacaggagacagcaccagccaagctgattgtgtatctacagcgtttccggcctcaagactatcagcgcctgctagaagtgaacagctccagagagaggccacaggagactgaagatcctgaccactgcctgggctaggggtgtcacttcctagaaggggaagggaactctgggtctaacggagtccactcctgggcccactgtgcctctcccctcagtgtcccttctgacagtgactcctctctctccagcgctgcctgtttcttccccctcctctaagctactcttccttgag

SEQ ID NO: 190783 - DNA, 581 bp, Homo sapiens
  Payload ID: 17689
  Gene Name: thiamine triphosphatase
  ENST ID: ENST00000557630
  CDS Start-End: 214-581
attacatagcgcgtgtctcgagccctggcctgctctcggcaccgccacaacgggcgtaatatggccgctggtgccgggacctgccgggcgcgcggagggtcgggccgaggtccgggatccggaactgctcccggcattcctcgcgagtgtatggcgtgggctcccttccccctctgtgggtcccgcgaggagactctcgggctttgaggtagcatggcccagggcttgattgaggtggagcgaaagttccttccagggcctggcacagaggagcggctgcaggagttggggggcaccctggagtaccgggtcaccttccgagacacctactatgacacccctgagctgagcctcatgcaggctgaccactggctgcgacgacgagaggatagtggatgggagctcaaatgtcctggagcagcaggtgtcttaggaccccacacggagtataaggaactcacagcggaacctacaattgtggcccaactctgtaaggtgctgcgggctgacggcctgggggctggagatgtggctgctgtgctgggcccactggggctgcaggaagtagctagttttgtgac

SEQ ID NO: 190784 - DNA, 569 bp, Homo sapiens
  Payload ID: 17689
  Gene Name: thiamine triphosphatase
  ENST ID: ENST00000554970
  CDS Start-End: 89-511
attcctcgcgagtgtatggcgtgggctcccttccccctctgtgggtcccgcgaggagactctcgggctttgagccaattgcaggtagcatggcccagggcttgattgaggtggagcgaaagttccttccagggcctggcacagaggagcggctgcaggagttggggggcaccctggagtaccgggtcaccttccgagacacctactatgacacccctgagctgagcctcatgcaggctgaccactggctgcgacgacgagaggatagtggatgggagctcaaatgtcctggagcagcaggtgtcttaggaccccacacggagtataaggaactcacagcggaacctacaattgtggcccaactctgtgtgcctgcacaggagacagcaccagccaagctgattgtgtatctacagcgtttccggcctcaagactatcagcgcctgctagaagtgaacagctccagagagaggccacaggagactgaagatcctgaccactgcctgggctaggggtgtcacttcctagaaggggaagggaactctgggtctaacggagtccactcctggg

SEQ ID NO: 190785 - DNA, 4804 bp, Homo sapiens
  Payload ID: 17690
  Gene Name: thimet oligopeptidase 1
  Uniprot ID: P52888
  ENST ID: ENST00000307741
  CDS Start-End: 204-2273
caggggcgcgtgcgtcctgccctccctgtgcgcgcgccgccccagcatgccccgggagcgcgggcggcgggccccttggtcctcaggcggccgtggcggcggtggcggcggttgggccgaggcaggcggcctcagtggccgaggtggctggacgcgtagcaggtggaaggagggagggagccgcaggcgcagacccacccgccatgaagccccccgcagcctgtgcaggagacatggcggacgcagcatctccgtgctctgtggtaaacgacctgcggtgggacctgagtgcccagcagatagaggagcgcaccagggagctcatcgagcagaccaagcgcgtgtatgaccaggttggcacccaggagtttgaggacgtgtcctacgagagcacgctcaaggcgctggccgatgtggaggtcacctacacagttcagaggaatatccttgacttcccccagcatgtttccccctccaaggacatccggacagccagcacagaggccgacaagaagctctctgagttcgacgtggagatgagcatgagggaggacgtgtaccagaggatcgtgtggctccaggagaaagttcagaaggactcactgaggcccgaggctgcgcggtacctggagcggctaatcaagctgggccggagaaatgggcttcacctccccagagagactcaggaaaacatcaaacgcatcaagaagaagctgagccttctgtgcatcgacttcaacaagaacctgaacgaggacacgaccttcctgcccttcacgctccaggagctaggagggctccccgaggactttctgaactccctggagaagatggaggacggcaagttgaaggtcaccctcaagtacccccattacttccccctcctgaagaaatgccacgtgcctgagaccaggaggaaagtggaggaggccttcaactgccggtgcaaggaggagaactgcgctatcctcaaggagctggtgacgctgcgggcccagaagtcccgcctgctggggttccacacgcacgccgactatgtcctggagatgaacatggccaagaccagccagaccgtggccaccttcctagatgagctggcgcagaagctgaagcccctgggggagcaggagcgtgcggtgattctggagctgaagcgtgcggagtgcgagcgccggggcctgcccttcgacggccgcatccgtgcctgggacatgcgctactacatgaaccaggtggaggagacgcgctactgcgtggaccagaacctgctcaaggagtacttccccgtgcaggtggtcacgcacgggctgctgggcatctaccaggagctcctggggctggccttccaccacgaggagggcgccagtgcctggcatgaggacgtgcggctctacaccgcgagggacgcggcctcgggggaggtggtcggcaagttctacctggacctgtacccgcgggaaggaaagtacgggcacgcggcctgctttggcctgcagcccggctgcctgcggcaggatgggagccgccagatcgccatcgcggccatggtggccaacttcaccaagcccacagccgacgcgccctcgctgctgcagcatgacgaggtggagacctacttccatgagtttggccacgtgatgcaccagctctgctcccaggcggagttcgccatgttcagcgggacccacgtggagcgggactttgtggaggcgccgtcgcagatgctggagaactgggtgtgggagcaggagccgctgctgcggatgtcgcggcactaccgcacaggcagcgccgtgccccgggagctcctggagaagctcattgagtcccggcaggccaacacaggcctcttcaacctgcgccagatcgtcctcgccaaggtggaccaggccctgcacacgcagacggacgcagaccccgccgaggagtatgcgcggctctgccaggagatcctcggggtcccggccacgccaggaaccaacatgcctgcaaccttcggccatctggcaggtggctacgacgcccagtactacgggtacctgtggagcgaggtgtattccatggacatgttccacacgcgcttcaagcaggagggtgtcctgaacagcaaggttggcatggattacagaagctgcatcctgagacccggcggttccgaggatgccagcgccatgctgaggcgcttcctgggccgtgaccccaagcaggacgccttcctcctgagcaaggggctgcaggtcgggggctgcgagcccgagccgcaggtctgctgaggcctggcactgcgactgcccagtctggcctgcgctcccgccgccctggtgccttagcccccggcacaggatggggcaggctctggcacagtgcctgggactggcagggtggctgagcggctgtcttgcctcttgtcattgtctgtccccacccggtcgtggcccacccggctagagacggcgtcctcaaggcatctggagggctttcgtggctgccagggcctggtctttgttgcactaacacgtctcctctctgggaaacgtcccttgtcaggagacggctcttctttgaaatgaggtcattaaaaggaaacagaaaaagagagaggctccctggcctggtcactggctcctgcgcttttttggtccgaggacggtgggacggcgggtcagggtccagccctcgggctgttgccacaccaggccctggattggggctcaggtccttgtgggggcggggggtgggggagtaaagggctgggaaccagttctgccagccaggccggcctggggggtctgagagacttcggcttcctgcatgcttctcacctgttgtcattctggaacattccccccgccctgctcagctctggccatcaaggaccaggctccactggtcagagagtctggaaagtcagggcaggccctgtgcgcacaggcagccggggcggggctgggggtcagcagctgcccaccctctcatccacaggggaaggccgggctcactccagcttcctaggcagagtctctgggggttcctgttggacacaagtgaaccaggtgaaccagggcagctgctggaagctcggccatggccctcatcctcatggccttggggactgcctgtgcctgccctccctggcggccccactcccctggctgtgggcaacatggcaaagtcttgatcgggggtgcagggtcgggggggcgcttcctggaccctccaacagtgctcagagatgcctcagggatagctgtcggctgtgtccccacctcccgagcaagacaagtggatgctccccgtctcttcagtcccagtgctctgatgttttctcccgcgactgtgagtttctcaggagcccccctcgtgccctgggagcgtccctccccagtcttagtcctccacgaaggacgctggtcagcagaacctgtgaccctgcttcccgaggcctatgggtggccagacatccgcctcgtcctcacctccatttggacaggactccgagggctgtgccatctgcttcagcccctcctgtcccattcccacccagcccaggtcagtgtggctgtggccactgccatggggcctgctttgcaccttacgcacgcctggctctgctccatgcacctgcttctgtgtctttccaactctgggggctaaggggtgagtcttgtctttgcagagctggacggcacagcctgtggccaggagggttatgccagcgaggcgggaatccataagtgggaacaccacagtggtcacgtttcagatactcacagctcagagcgggtcccatagcttgcacctgaagccccaactactcaggaggctgaggcggaaggattgcttgagcccaggagggcaaggccagcctgggcaacgtggcaagaccccatctctaaaaaaaataagttcggtgggtgtggggccagtgcctgtggtctgttttttgggaggctgaggcaggaggatcgcttgagcctaggaggtcaaggctgcagtaagccgtgatcccaccactgcactgcagcctgggcaacagagcaagactgtctctaaaataacaataataataaaatacctggggttcagaaaagaaaagctggaaggcaaagccgaccgcactgggcagaggtggagatggcaagtctgggggctccctcatcttcccctgccccgagccctcaggtggcctccacctggtccccagcgaagtcccagttgtgcaagagcaccccagctgggccctgggccatcacagccttgtcacacacacagcctggcccatcacagcagagctggggtcacagccttgggctgctgggccgtgggcggatggcctggaccatccacaccccactcccctggaagtcaccaactgggcttagttgccggataccccaggcagccccccgcggtgcttcgcaagttgggccgcctcccccagcatgtcccctgctctgtggacacccagggatgtggaggtagtagcacagagtctcggtccagggccctgttccccagggagctgggcgtcctcagagccttcccaaatgcccacaccgggggcacccgggtttccccaaacactccaggacagagcgggggctttgatcacagggagggggctgcagagctgctgtgtctcctggctcctctgccccatgctccccactcagggctccagcagtgggctcagaggacagtgtggcattagcatcccctgcccgtccaggttgtcactctccttggccccttgctgctccccagtggaaaaaaaagggggaaataaagaatcgtaaaaaataca

SEQ ID NO: 190786 - DNA, 1877 bp, Homo sapiens
  Payload ID: 17690
  Gene Name: thimet oligopeptidase 1
  Uniprot ID: P52888
  ENST ID: ENST00000395212
  CDS Start-End: 779-1555
cttagtaggcgagtttgaaaacacggagtccaggaatgaggatcgaccgtgtgtccacctttcctggcttccctgccacactgtttgcacagcactcgtagccagcacacgcgtgtgcacatccacacaggtgctcacacaggtgcccacgcacgtgcctgcaggcctgctttgcatgctgctttctgcgtgtccctggcgcctggcacggcgagtcccttggtgcattccgtcgggacaaggagtgtggctgcgtggtccttggaacagaaaagcctcggtgttgcagagaggaccttgaggatcacccaggagttccctcgccgttggctgcctgccatggttccagcgggactcagtcaagggctgtgcttttagggaaggttccacacacacacgagcagggagatgcagcatgcctcacagcgtccccacccggacctggccgtccccaggtcccaacccctcggggtgcggagctttcagggagcagcagctctgtggctagaggagaagcgtgggtggcctccagggacggggtcatgtggccggcatcttcaggtgtgtcctgctgccaccggcagccagcagcagcccaggggcctccgggtcccggtcgttttccagttttggggtgggagggccgggcccagcgcatcacctgtgcactcgccctgtttgcactgtggcagctgacacgggccaggccggcgggaacgggctaggcaggacctgggcactctgaggctctgccccatccctgcaggcggagttcgccatgttcagcgggacccacgtggagcgggactttgtggaggcgccgtcgcagatgctggagaactgggtgtgggagcaggagccgctgctgcggatgtcgcggcactaccgcacaggcagcgccgtgccccgggagctcctggagaagctcattgagtcccggcaggccaacacaggcctcttcaacctgcgccagatcgtcctcgccaaggtggaccaggccctgcacacgcagacggacgcagaccccgccgaggagtatgcgcggctctgccaggagatcctcggggtcccggccacgccaggaaccaacatgcctgcaaccttcggccatctggcaggtggctacgacgcccagtactacgggtacctgtggagcgaggtgtattccatggacatgttccacacgcgcttcaagcaggagggtgtcctgaacagcaagtttcctcactatgaagtgcggccgttacgccatgtgagcctgtgcctcccgctgacttggtgtgacccaggctcgggacagccgccagagtccctcacaaggaacaggtggctaccagctttgagggccggccctgccctgcctgggtgcaacattgcactgggcagcctgcaggttggcatggattacagaagctgcatcctgagacccggcggttccgaggatgccagcgccatgctgaggcgcttcctgggccgtgaccccaagcaggacgccttcctcctgagcaaggggctgcaggtcgggggctgcgagcccgagccgcaggtctgctgaggcctggcactgcgactgcccagtctggcctgcgctcccgccgccctggtgccttagcccccggcacaggatggggcaggctctggcacagtgcctgggactggcagggtggctgagcggctgtcttgcctcttgtcattgtctgtccccacccggtcgtggcccacccggctagagacggcgtcctcaaggcatctggagggctttcgtggctgccagggcctggtctttgttgcactaacacgtctcctctctgggaaacgtcccttgtcaggagacggctcttctttgaaatgaggtcattaaaaggaaacagaaaaag

SEQ ID NO: 190787 - DNA, 671 bp, Homo sapiens
  Payload ID: 17690
  Gene Name: thimet oligopeptidase 1
  ENST ID: ENST00000587468
  CDS Start-End: 164-671
gtcgttttccagttttggggtgggagggccgggcccagcgcatcacctgtgcactcgccctgtttgcactgtggcagctgacacgggccaggccggcgggaacgggctaggcaggacctgggcactctgaggctctgccccatccctgcaggcggagttcgccatgttcagcgggacccacgtggagcgggactttgtggaggcgccgtcgcagatgctggagaactgggtgtgggagcaggagccgctgctgcggatgtcgcggcactaccgcacaggcagcgccgtgccccgggagctcctggagaagctcattgagtcccggcaggccaacacaggcctcttcaacctgcgccagatcgtcctcgccaaggtggaccaggccctgcacacgcagacggacgcagaccccgccgaggagtatgcgcggctctgccaggagatcctcggggtcccggccacgccaggaaccaacatgcctgcaaccttcggccatctggcaggtggctacgacgcccagtactacgggtacctgtggagcgaggtgtattccatggacatgttccacacgcgcttcaagcaggagggtgtcctgaacagcaaggttggcatggattacagaagctgcatcctgagacccggcggttccgaggatgccagcgccatgctga

SEQ ID NO: 190788 - DNA, 761 bp, Homo sapiens
  Payload ID: 17690
  Gene Name: thimet oligopeptidase 1
  ENST ID: ENST00000585338
  CDS Start-End: 232-761
ggccgtggcggcggtggcggcggttgggccgaggcaggcggcctcagtggccgaggtggctggacgcgtagcaggtggaaggagggagggagccgcaggcgcagacccacccgccatgaagccccccgcagtagagacggtgctagccaggatgatctccatctcctgacctcgtgatccacccgcctcggcctcccaaagtgctgggattacaggccctgtgcaggagacatggcggacgcagcatctccgtgctctgtggtaaacgacctgcggtgggacctgagtgcccagcagatagaggagcgcaccagggagctcatcgagcagaccaagcgcgtgtatgaccaggttggcacccaggagtttgaggacgtgtcctacgagagcacgctcaaggcgctggccgatgtggaggtcacctacacagttcagaggaatatccttgacttcccccagcatgtttccccctccaaggacatccggacagccagcacagaggccgacaagaagctctctgagttcgacgtggagatgagcatgagggaggacgtgtaccagaggatcgtgtggctccaggagaaagttcagaaggactcactgaggcccgaggctgcgcggtacctggagcggctaatcaagctgggccggagaaatgggcttcacctccccagagagactcaggaaaacatcaaacgcatcaagaagaagctgagccttctgtgcatcgacttcaacaagaacctgaacgaggacacgac

SEQ ID NO: 190789 - DNA, 1104 bp, Homo sapiens
  Payload ID: 17690
  Gene Name: thimet oligopeptidase 1
  ENST ID: ENST00000590970
  CDS Start-End: 1-781
ggaaggaaagtacgggcacgcggcctgctttggcctgcagcccggctgcctgcggcaggatgggagccgccagatcgccatcgcggccatggtggccaacttcaccaagcccacagccgacgcgccctcgctgctgcagcatgacgaggtggagacctacttccatgagtttggccacgtgatgcaccagctctgctcccaggcggagttcgccatgttcagcgggacccacgtggagcgggactttgtggaggcgccgtcgcagatgctggagaactgggtgtgggagcaggagccgctgctgcggatgtcgcggcactaccgcacaggcagcgccgtgccccgggagctcctggagaagctcattgagtcccggcaggccaacacaggcctcttcaacctgcgccagatcgtcctcgccaaggtggaccaggccctgcacacgcagacggacgcagaccccgccgaggagtatgcgcggctctgccaggagatcctcggggtcccggccacgccaggtggctacgacgcccagtactacgggtacctgtggagcgaggtgtattccatggacatgttccacacgcgcttcaagcaggagggtgtcctgaacagcaaggttggcatggattacagaagctgcatcctgagacccggcggttccgaggatgccagcgccatgctgaggcgcttcctgggccgtgaccccaagcaggacgccttcctcctgagcaaggggctgcaggtcgggggctgcgagcccgagccgcaggtctgctgaggcctggcactgcgactgcccagtctggcctgcgctcccgccgccctggtgccttagcccccggcacaggatggggcaggctctggcacagtgcctgggactggcagggtggctgagcggctgtcttgcctcttgtcattgtctgtccccacccggtcgtggcccacccggctagagacggcgtcctcaaggcatctggagggctttcgtggctgccagggcctggtctttgttgcactaacacgtctcctctctgggaaacgtcccttgtcaggagacggctcttctttgaaatgaggtcattaaaaggaaacagaaaaaga

SEQ ID NO: 190790 - DNA, 702 bp, Homo sapiens
  Payload ID: 17690
  Gene Name: thimet oligopeptidase 1
  ENST ID: ENST00000587401
  CDS Start-End: 1-651
gccgacgcgccctcgctgctgcagcatgacgaggtggagacctacttccatgagtttggccacgtgatgcaccagctctgctcccaggcggagttcgccatgttcagcgggacccacgtggagcgggactttgtggaggcgccgtcgcagatgctggagaactgggtgtgggagcaggagccgctgctgcggatgtcgcggcactaccgcacaggcagcgccgtgccccgggagctcctggagaagctcattgagtcccggcaggccaacacaggcctcttcaacctgcgccagatcgtcctcgccaaggtggaccaggccctgcacacgcagacggacgcagaccccgccgaggagtatgcgcggctctgccaggagatcctcggggtcccggccacgccaggaaccaacatgcctgcaaccttcggccatctggcaggtggctacgacgcccagtactacgggtacctgtggagcgaggtgtattccatggacatgttccacacgcgcttcaagcaggagggtgtcctgaacagcaaggaagctccacactggcccctcaggcctcgggctgtgagtgctgggagctccgtgtcttcccatacgagtccttccgggatctgcgtgatcggcctcagagccatgggctgagacagacccttctctggagaaggcttggcgtttgccattcatttgctcctc

SEQ ID NO: 190791 - DNA, 639 bp, Homo sapiens
  Payload ID: 17690
  Gene Name: thimet oligopeptidase 1
  ENST ID: ENST00000591363
  CDS Start-End: 1-613
ggggctggccttccaccacgaggagggcgccagtgcctggcatgaggacgtgcggctctacaccgcgagggacgcggcctcgggggaggtggtcggcaagttctacctggacctgtacccgcgggaaggaaagtacgggcacgcggcctgctttggcctgcagcccggctgcctgcggcaggatgggagccgccagatcgccatcgcggccatggtggccaacttcaccaagcccacagccgacgcgccctcgctgctgcagcatgacgaggtggagacctacttccatgagtttggccacgtgatgcaccagctctgctcccaggcggagttcgccatgttcagcgggacccacgtggagcgggactttgtggaggcgccgtcgcagatgctggagaactgggtgtgggagcaggagccgctgctgcggatgtcgcggcactaccgcacaggcagcgccgtgccccgggagctcctggagaagctcattgagtcccggcaggccaacacaggcctcttcaacctgcgccagatcggcctggtctttgttgcactaacacgtctcctctctgggaaacgtcccttgtcaggagacggctcttctttgaaatgaggtcattaaaaggaaacagaaaaaga

SEQ ID NO: 190792 - DNA, 1872 bp, Homo sapiens
  Payload ID: 17690
  Gene Name: thimet oligopeptidase 1
  ENST ID: ENST00000586677
  CDS Start-End: 60-1766
aagaaactgccaaactgctctttggagcggctgcactggcccacgtcctacatgctttgatgtttttattccaggagaaagttcagaaggactcactgaggcccgaggctgcgcggtacctggagcggctaatcaagctgggccggagaaatgggcttcacctccccagagagactcaggaaaacatcaaacgcatcaagaagaagctgagccttctgtgcatcgacttcaacaagaacctgaacgaggacacgaccttcctgcccttcacgctccaggagctaggagggctccccgaggactttctgaactccctggagaagatggaggacggcaagttgaaggtcaccctcaagtacccccattacttccccctcctgaagaaatgccacgtgcctgagaccaggaggaaagtggaggaggccttcaactgccggtgcaaggaggagaactgcgctatcctcaaggagctggtgacgctgcgggcccagaagtcccgcctgctggggttccacacgcacgccgactatgtcctggagatgaacatggccaagaccagccagaccgtggccaccttcctagatgagctggcgcagaagctgaagcccctgggggagcaggagcgtgcggtgattctggagctgaagcgtgcggagtgcgagcgccggggcctgcccttcgacggccgcatccgtgcctgggacatgcgctactacatgaaccaggtggaggagacgcgctactgcgtggaccagaacctgctcaaggagtacttccccgtgcaggtggtcacgcacgggctgctgggcatctaccaggagctcctggggctggccttccaccacgaggagggcgccagtgcctggcatgaggacgtgcggctctacaccgcgagggacgcggcctcgggggaggtggtcggcaagttctacctggacctgtacccgcgggaaggaaagtacgggcacgcggcctgctttggcctgcagcccggctgcctgcggcaggatgggagccgccagatcgccatcgcggccatggtggccaacttcaccaagcccacagccgacgcgccctcgctgctgcagcatgacgaggtggagacctacttccatgagtttggccacgtgatgcaccagctctgctcccaggcggagttcgccatgttcagcgggacccacgtggagcgggactttgtggaggcgccgtcgcagatgctggagaactgggtgtgggagcaggagccgctgctgcggatgtcgcggcactaccgcacaggcagcgccgtgccccgggagctcctggagaagctcattgagtcccggcaggccaacacaggcctcttcaacctgcgccagatcgtcctcgccaaggtggaccaggccctgcacacgcagacggacgcagaccccgccgaggagtatgcgcggctctgccaggagatcctcggggtcccggccacgccaggaaccaacatgcctgcaaccttcggccatctggcaggtggctacgacgcccagtactacgggtacctgtggagcgaggtgtattccatggacatgttccacacgcgcttcaagcaggagggtgtcctgaacagcaaggttggcatggattacagaagctgcatcctgagacccggcggttccgaggatgccagcgccatgctgaggcgcttcctgggccgtgaccccaagcaggacgccttcctcctgagcaaggggctgcaggtcgggggctgcgagcccgagccgcaggtctgctgaggcctggcactgcgactgcccagtctggcctgcgctcccgccgccctggtgccttagcccccggcacaggatggggcaggctctggcacagtgcctgggactggca

SEQ ID NO: 190793 - DNA, 2377 bp, Homo sapiens
  Payload ID: 17691
  Gene Name: thioesterase superfamily member 4
  Uniprot ID: Q5T1C6
  ENST ID: ENST00000368814
  CDS Start-End: 351-1073
gcgcgggttccggggctgaggggctgaggggcccaaggcgataaccgggatccgctccggccgcgctcctcttgcctttgagaagccccggaagtggcccggctgttggccgcagcgggaggtcttcggaaagaaaaggccggaaccagaagatagactcaacagcgatgccctacccggaccccgccggcctcacaccccggccagccagccgccagtagtgcgcaccgcctcctccccaagccccgccctgcgtccaccccaggggttaactcgcacgcgcgctcttgtggcggaggtagagtgcgccgtccagggctagagcaagcgcggccccgcggcccggagccatgctgaggagctgcgccgcgcgcctccgcacgctgggggctctgtgcctgccgccagtaggccggcgcctgccgggaagcgagccgcgacccgagctgaggtcattttcttctgaggaagtcattcttaaggactgttctgtccccaaccccagctggaacaaggacctaagactgctctttgaccagtttatgaagaaatgtgaagacggctcctggaaacgtttgccttcatataaacgtacacctactgaatggattcaagacttcaaaacccattttcttgacccaaagcttatgaaagaagaacaaatgtcacaggcccagctcttcaccagaagctttgatgatggcctgggctttgaatacgtgatgttctacaatgacattgagaaaaggatggtttgcttatttcaaggaggcccttacctggaaggaccacctggattcattcatggaggtgccattgcaaccatgattgatgctactgttggtatgtgtgcaatgatggctgggggaatcgtcatgactgccaatctcaacatcaattataaaagacctatccctctttgttctgttgttatgataaatagccaacttgataaagttgaaggaaggaaattttttgtttcctgtaatgttcagagtgttgatgagaagaccctatactcagaggcgacaagcttatttataaagctgaatcctgctaaaagtctgacataaagagctgctggtgaactccatctcattctcgcccctccagaagaagcagttgtcccccaaatactctgctccctcactgctgaatccctgtagggagaagcctgccaacagtgaccttccgaaacagccttctgaatacaaagaggattcagtttccatcttctcaactttttaacacagaaatacttcctgcgagcatatcgacaactctcgggccaggcgctgtggctcacacctataatcccagcactttaggaggccgaggcaggcggattgcctgagctcaggagttcaagatcagtctgggcaacacgatgaaactccgtctctactaaaatacaaaaaattatccaggcatggtggcgtacgcctgtagtcccagctactcaggaggctgaggcaggagaattgcttgaacccaggaggaagaggttgcagtgagccaagatcatgccacatcactccaacctgggcaacagaacaagaacccatctcaaacaaacaaacaaacaaaaaaaaaaaactcttgtctccttaggatatgttacctgctccactgcagactagagaaataaatgtgtattgaaccttttactgcaaacttgaaaatgctagaaaaccaagcatgaagaataaatacatggtgggaaacacacaggcatgtgcatatgcatatacattgtaagttagtaagttagaaagctagctttgttgtatctgaacacatgaatcttttttggtcagtgtaggaagcacagccagatcctataggaatgaatacctcaaatctgttgtctgagattctagagattaaaccactgtgccatttttaacccaggctgtactgttgtttcttaccaacagcataggttttcatcactggaaggagcctgtgttcatttcctagggctgctgtagcaaagtagtacaaactggattgtttaaaccaacaaaaactcattgtctctcagttctggaggccagaagttcaaaatcaaggtgttgaccaaggccattctcctgaaagtgctagggaaggagctgtccacgcctccctcctggcttctgggagcctcaggtgttccttggcttctagatgcatcattccagtcctccatcttcacatggcattccctctgtgtgtctccacagtgtcttccctctgtgcagatctatctctgtgtccaagtctcctctttttataaggaaaccagtcataatggacccacctgaatgacctcattttaacttgattacctctgtaaaaaatgtatttccaaataaagtgaccttatgaggtattg

SEQ ID NO: 190794 - DNA, 1832 bp, Homo sapiens
  Payload ID: 17691
  Gene Name: thioesterase superfamily member 4
  ENST ID: ENST00000471464
  CDS Start-End: 45-368
cgccgtccagggctagagcaagcgcggccccgcggcccggagccatgctgaggagctgcgccgcgcgcctccgcacgctgggggctctgtgcctgccgccagtaggccggcgcctgccgggaagcgagccgcgacccgagctgaggtcattttcttctgaggaagtcattcttaaggactgttctgtccccaaccccagctggaacaaggacctaagactgctctttgaccagtttatgaagaaatgtgaagacggctcctggaaacgtttgccttcatataaacgtacacctactgaatggattcaagacttcaaaacccattttcttgcctggttaatggccgggcgctgtggctcacgcctataatcccagcactttgggaggccaaggcaggcggatccctgagttcgggagttcaagaccagcctgaccaacacggagaaaccccgtctctactaaaaatacagaattagtcaggcgtggtggtgggcgcctgtaatcccagctactcaggaggctgaggcaggagaatcgcttgaacccgggaggcggaggttgcgacccaaagcttatgaaagaagaacaaatgtcacaggcccagctcttcaccagaagctttgatgatggcctgggctttgaatacgtgatgttctacaatgacattgagaaaaggatggtttgcttatttcaaggaggcccttacctggaaggaccacctggattcattcatggaggtgccattgcaaccatgattgatgctactgttggtatgtgtgcaatgatggctgggggaatcgtcatgactgccaatctcaacatcaattataaaagacctatccctctttgttctgttgttatgataaatagccaacttgataaagttgaaggaaggaaattttttgtttcctgtaatgttcagagtgttgatgagaagaccctatactcagaggcgacaagcttatttataaagctgaatcctgctaaaagtctgacataaagagctgctggtgaactccatctcattctcgcccctccagaagaagcagttgtcccccaaatactctgctccctcactgctgaatccctgtagggagaagcctgccaacagtgaccttccgaaacagccttctgaatacaaagaggattcagtttccatcttctcaactttttaacacagaaatacttcctgcgagcatatcgacaactctcgggccaggcgctgtggctcacacctataatcccagcactttaggaggccgaggcaggcggattgcctgagctcaggagttcaagatcagtctgggcaacacgatgaaactccgtctctactaaaatacaaaaaattatccaggcatggtggcgtacgcctgtagtcccagctactcaggaggctgaggcaggagaattgcttgaacccaggaggaagaggttgcagtgagccaagatcatgccacatcactccaacctgggcaacagaacaagaacccatctcaaacaaacaaacaaacaaaaaaaaaaaactcttgtctccttaggatatgttacctgctccactgcagactagagaaataaatgtgtattgaaccttttactgcaaacttgaaaatgctagaaaaccaagcatgaagaataaatacatggtgggaaacacacaggcatgtgcatatgcatatacattgtaagttagtaagttagaaagctagctttgttgtatctgaacacatgaatcttttttggtcagtgtaggaagcacagccagatcctataggaatgaatacctcaaatctgttgtctgagattctagagattaaaccactgtgccatttttaa

SEQ ID NO: 190795 - DNA, 643 bp, Homo sapiens
  Payload ID: 17691
  Gene Name: thioesterase superfamily member 4
  ENST ID: ENST00000489410
  CDS Start-End: 180-512
cctacccggaccccgccggcctcacaccccggccagccagccgccagtagtgcgcaccgcctcctccccaagccccgccctgcgtccaccccaggggttaactcgcacgcgcgctcttgtggcggaggtagagtgcgccgtccagggctagagcaagcgcggccccgcggcccggagccatgctgaggagctgcgccgcgcgcctccgcacgctgggggctctgtgcctgccgccagtaggccggcgcctgccgggaagcgagccgcgacccgagctgaggtcattttcttctgaggaagtcattcttaaggactgttctgtccccaaccccagctggaacaaggacctaagactgctctttgaccagtttatgaagaaatgtgaagacggctcctggaaacgtttgccttcatataaacgtacacctactgaatggattcaagacttcaaaacccattttcttggtagaaacagccactttcccattaatatatctgagcatcaaatataaagctaagaacagattgaagtactagttactacctgaaaaaaagaaagaatataatgcaggattatggttctatagtcaccaattttatagaccagaaatcacaataaattttgcagattggagagcataaa

SEQ ID NO: 190796 - DNA, 984 bp, Homo sapiens
  Payload ID: 17692
  Gene Name: thioesterase superfamily member 5
  Uniprot ID: Q8N1Q8
  ENST ID: ENST00000368817
  CDS Start-End: 133-876
agcctcgcctagctctctgaaagaaagcctgcaacagaagggagagaagcggccccaagtgcagctgaaagcactccttgggagtcagccaagaccctccatccaagcagggctggatccttgcacttggccatgataaggagatgcttccaggtggcagcaagacttggccaccacagaggccttcttgaggccccccgtatcctgcccagactcaaccctgcctcagcatttggatcctccacagactccatgttctcaagattcttgccagagaagacagacttgaaggattatgctcttcccaatgccagctggtgttcggacatgctgagcctgtaccaagaatttctggagaagactaagtctagcggctggatcaagctgccctccttcaagtccaacagagaccacatccggggactcaagctcccatctggactggcagtttcctcagacaaaggtgactgtcgcatcttcaccaggtgcatccaagtggaaggacaaggctttgagtatgtcatctttttccagccaacccagaagaagtcggtctgtcttttccaaccaggctcctacctggaggggcccccagggtttgctcacggcgggtccctggcagccatgatggacgagaccttttctaaaactgccttcctggctggagaggggctgttcacactaagtctcaacatcaggttcaaaaacttgatccccgtggactctctggttgtaatggacgtagaactggacaagattgaggaccagaagctttacatgtcctgcatcgcccacagcagagaccagcagacagtttatgccaagtcctcaggtgttttccttcagctgcagttggaagaagagtctccccagtaacagtcactgtgcctgcaggagagccactgcctcccctgcctgcctcctgcctcctgcctcccctgcctgcctcctgcctcctgcctcccctgcctgcctcctgcctcc

SEQ ID NO: 190797 - DNA, 355 bp, Homo sapiens
  Payload ID: 17692
  Gene Name: thioesterase superfamily member 5
  ENST ID: ENST00000453881
  CDS Start-End: 1-355
gtgcatccaagtggaaggacaaggctttgagtatgtcatctttttccagccaacccagaagaagtcggtctgtcttttccaaccaggctcctacctggaggggcccccagggtttgctcacggcgggtccctggcagccatgatggacgagaccttttctaaaactgccttcctggctggagaggggctgttcacactaagtctcaacatcaggttcaaaaagtgttttccttcagctgcagttggaagaagagtctccccagtaacagtcactgtgcctgcaggagagccactgcctcccctgcctgcctcctgcctcctgcctcccctgcctgcctcctgcctcctgcctccc

SEQ ID NO: 190798 - DNA, 2259 bp, Homo sapiens
  Payload ID: 17693
  Gene Name: thioesterase superfamily member 6
  Uniprot ID: Q8WUY1
  ENST ID: ENST00000336138
  CDS Start-End: 145-771
ctcggccgccctcgcgctgtggttcgctccgggcgcgctgcgctcgtgagttcccaggaggcctggcgggcaccgtaaccagcgccgcggacaccggcaccggcgccacggactccgcaggaccccgcgcccgccgccgccgctatgctggggctgctggtggcgttgctggccctggggctcgctgtctttgcgctgctggacgtctggtacctggtgcgccttccgtgcgccgtgctgcgcgcgcgcctgctgcagccgcgcgtccgtgacctgctagctgagcagcgcttcccgggccgcgtgctgccctcggacttggacctgctgctgcacatgaacaacgcgcgctacctgcgcgaggccgactttgcgcgcgtcgcgcacctgacccgctgcggggtgctcggggcgctgagggagttgcgggcgcacacggtgctggcggcctcgtgcgcgcgccaccgccgctcgctgcgcctgctggagcccttcgaggtgcgcacccgcctgctgggctgggacgaccgcgcgttctacctggaggcgcgctttgtcagcctgcgggacggcttcgtgtgcgcgctgctgcgcttccggcagcacctgctgggcacctcacccgagcgcgtcgtgcagcacctgtgccagcgcagggtggagccccctgagctgcccgctgatctgcagcactggatctcctacaacgaggccagcagccagctgctccgcatggagagtgggctcagtgatgtcaccaaggaccagtgaccgccaccttcacaccgtctgccctggccaccatcctgggcctgggggctgcccacagatgggcagtctcagccatactctgttccagctggagtagcctcctgaccagcctggcccaccctgctccacccactgggcccccccagttattgatacccctctgtgctgggctccacgctaggcagaaggaggagtggcattggcatcctgacccagctctgccctcaaggtggggatggatgggcaaaggagagtcctgcctggccctacgatgaggccactcatgtgggcctaggtaggggaggatggtgcctggagcagagggacccacaagtgcctcccgagcctagatcctggctcggaccactgcaagggccgaggcagggccagaccagagcatcctgggtacaggcctgggctctccagggcctgggcctgattcaggtgcagtgggcactcctgaagggtcagagcggcatctgccaggcagcccctctggcttccgctgaggtggttgcaggcctggggcagagcctgggtggtcagaggccggggctagaggcagatggaagggaggcatttgctgacagaggacggggcacccgggctccccactgcagtcggccttgcctcctcctcctcctctacctccagtcaggctggacgggagggtagccttgtggctgagaggggtcagactaggtggcacaggggctcctggaaagacagcaggcttcctgctgggcgttcccttgttggagggaatagagtgggggtgggactctgcaggggtgtccttgtccactcgcacccctcgccgcccaccagggccatgctctgtgacttgggctgatccccaccctttctgggcctacagcaccacaggccgctgtacccccttagagctgcccctctctggcctggccggcaggcgtcttcttaactcctctgtcctctatattcagcatgttccttgtcagctgctgggccggccctgccttgcgctagcagagcctctcctggcagcttctcaggtctccctaatggagacaccaggctactaggacactggctggggccaccccctcctgcctaatgcctcaccttacagctggggaaactgaggcctggaatggcccagagtcaccaaggcaaagttggggctggtcccagcctgaggctccagctgatgccctcagctcccagagagggggtgccccatctagctgggtgcaggggtcactgcttgtcagctcagggccctgtgcccgcttgcctgttcccctacatctgtgcctgcacatccagaactgcctccttgccgctgcctccaggaagcccaccttgagccagagtcaagggctgcagcactgcccgatagaacacgcccgccctcactgctgttcttgccttacagccaccatgggaaagctgcaacctttctgttttatttaaagaaagcccaacattaaagggttttcattgcaa

SEQ ID NO: 190799 - DNA, 551 bp, Homo sapiens
  Payload ID: 17693
  Gene Name: thioesterase superfamily member 6
  ENST ID: ENST00000520217
  CDS Start-End: 1-251
gggacgaccgcgcgttctacctggaggcgcgctttgtcagcctgcgggacggcttcgtgtgcgcgctgctgcgcttccggcagcacctgctgggcacctcacccgagcgcgtcgtgcagcacctgtgccagcgcagggtggagccccctgagctgcccgctgatctgcagcactggatctcctacaacgaggccagcagccagctgctccgcatggagagtgggctcagtgatgtcaccaaggaccagtgaccgccaccttcacaccgtctgccctggccaccatcctgggcctgggggctgcccacagatgggcagtctcagccatactctgttccagctggagtagcctcctgaccagcctggcccaccctgctccacccactgggcccccccagttattgatacccctctgtgctgggctccacgctaggcagaaggaggagtggcattggcatcctgacccagctctgccctcaagccaccatgggaaagctgcaacctttctgttttatttaaagaaagcccaacattaaagggttttcattgcaa

SEQ ID NO: 190800 - DNA, 3181 bp, Homo sapiens
  Payload ID: 17694
  Gene Name: thiopurine S-methyltransferase
  Uniprot ID: P51580
  ENST ID: ENST00000309983
  CDS Start-End: 87-824
attggtggcggaggcaatggccggcaaccagctgtaagcgaggcacggaagacatatgcttgtgagacaaaggtgtctctgaaactatggatggtacaagaacttcacttgacattgaagagtactcggatactgaggtacagaaaaaccaagtactaactctggaagaatggcaagacaagtgggtgaacggcaagactgcttttcatcaggaacaaggacatcagctattaaagaagcatttagatactttccttaaaggcaagagtggactgagggtattttttcctctttgcggaaaagcggttgagatgaaatggtttgcagaccggggacacagtgtagttggtgtggaaatcagtgaacttgggatacaagaattttttacagagcagaatctttcttactcagaagaaccaatcaccgaaattcctggaaccaaagtatttaagagttcttcggggaacatttcattgtactgttgcagtatttttgatcttcccaggacaaatattggcaaatttgacatgatttgggatagaggagcattagttgccatcaatccaggtgatcgcaaatgctatgcagatacaatgttttccctcctgggaaagaagtttcagtatctcctgtgtgttctttcttatgatccaactaaacatccaggtccaccattttatgttccacatgctgaaattgaaaggttgtttggtaaaatatgcaatatacgttgtcttgagaaggttgatgcttttgaagaacgacataaaagttggggaattgactgtctttttgaaaagttatatctacttacagaaaagtaaatgagacatagataaaataaaatcacactgacatgtttttgaggaattgaaaattatgctaaagcctgaaaatgtaatggatgaatttttaaaattgtttataaatcatatgatagatctttactaaaaatggctttttagtaaagccatttactttttctaaaaaagttttagaagaaaaagatgtaactaaacttttaaagtagctcctttggagaggagattatgatgtgaaagattatgcctatgtgtcttgcagattgcaagatattttaccaatcagcatgtgttacctgtacaattaaaaaaatatttcaaaatgcaatgcatattaaatataatacacacagaaaaactggcatttattttgttttatttttttgagatggagtttcgttcttgttgcccaacctggagtgcaatggtgcaatctcagctcactgcaacctctgcctcccaggttcaggtgattctcctgcctcagcctcctgagtagctgggattacaggtgtgcgccaccacgcccagctaattttttgtatttttagtagagacagggtttcaccatgttggtcaggctgatctcgagctcctgacctcaggtgatctacccacctcggcctcccaaagtgctgggattacaggcgtgagccactgcacctggcctgacattctttatgaaatttagaattgttgaagaactataacatttcagtagggttcaaggtggtcccaaaagttatataaaagattagtttttactataaacccttgtcttttactcagatcctagcatcccttttcacatggtttctccatgtatataacagaatcaagaaacaaattttaattaaacaatctgtaacagaatcaagaaacaaatacattttaattaaacaatctatatggaacaaacattcccaaattctaagaataaatttttctttaagttttctctgagtttggcaattgttgttttttataatttaatctgtttaaatcatcaggtcttataaaatataatgtacttagagctggattcatggctgtttattatgaaaggttagatttctcagttcttctttaaccacattttgttatatcagacagtcctctataactctgtactacccaacaactaaatggtttagattgtttagctcatgttaataggatggttgtgtattataaaaaacgagttacgtgtgtgtgtgcacgcatgcacgcacatgtgctggcttaaaggttgttaatgcaaggtttggggtcccctttaacactggtgaaagctacggtactctccccagagatatgtcttgtcagcctctctagttccccttggcctgcatgtacaaacttctaccctagaagctctctgccatcgatgtattctaatagatttgtaaggctattaatttgaagcaactccttgctcacagtgattcttgcttctctgagacctgctcccagtcgatactgtgggcttcagaagccatgactccccaactctgcctgtatcaccggttgaatggacaactaacccgagctggaccaacacaattctctccagagacttttgattttacttttatgtagagacagggtctcactttgttgcccacgctgatgttgaacttgacgtgaggcctcaagcagtcctcctgtcttggccacccaaagtgctaggattacaggtatgagccattgcgctggccctcttcataggcttttggacttgggaatagaaaagcaaccccgtctctactaaaaatacaaaaaaattagccaggcgtggtggcacgtgcctgtaatcccagctacttgggaggctgaggcaggagaatcacttgaacctaggaggcggaggttgcagtgagctgagatcatgccactgcacgcaagcctgggcaacagagcaagactctgtctcaaaagaaagaaaaagaaaagaaaaaaaagaaaggcaagttgactgctgaaaggggaatctgtgtacgcctgggagctgtggggcagccacattccagcacatggatctgagaaacagaacgctgatctgcagaaagagatgagaaccaaagagaggccacctgcgtcctgggtccattttcatcctccctgaagcccagctgcccagggtggggagaaacaccctgtgtccatgggatagagtcctttccgcttgcagttgtgcccaaagaatcttaaatacaaatgagatatccttaggtagttgatcatttatgtaatatgtgtcttcactggggaatactgacttcctaaaatctcaagatggaagatataccacatgtaaattattttagagcaattaaattgttttcaggattttccaaaaa

SEQ ID NO: 190801 - DNA, 635 bp, Homo sapiens
  Payload ID: 17695
  Gene Name: thioredoxin
  Uniprot ID: P10599
  ENST ID: ENST00000374515
  CDS Start-End: 32-289
tacagccgctcgtcagactccagcagccaagatggtgaagcagatcgagagcaagactgcttttcaggaagccttggacgctgcaggtgataaacttgtagtagttgacttctcagccacgtggtgtgggccttgcaaaatgatcaagcctttctttcatgatgttgcttcagagtgtgaagtcaaatgcatgccaacattccagttttttaagaagggacaaaaggtgggtgaattttctggagccaataaggaaaagcttgaagccaccattaatgaattagtctaatcatgttttctgaaaatataaccagccattggctatttaaaacttgtaatttttttaatttacaaaaatataaaatatgaagacataaacccagttgccatctgcgtgacaataaaacattaatgctaacactttttaaaaccgtctcatgtctgaatagctttcaaaataaatgtgaaatggtcatttaatgtattttcctatattctcaatcactttttagtaaccttgtaggccactgattattttaagattttaaaaattattattgctaccttaatgtattgctacaaaaatctcttgttgggggcaatgcaggtaataaagtagtatgttgttatttgtt

SEQ ID NO: 190802 - DNA, 869 bp, Homo sapiens
  Payload ID: 17695
  Gene Name: thioredoxin
  Uniprot ID: P10599
  ENST ID: ENST00000374517
  CDS Start-End: 206-523
ctcgcaggctccaggggcggggcgtggccggggcgcagcgacgggcgcggaggtccggccgggcgcgcgcgcccccgccacacgcacgccgggcgtgccagtttataaagggagagagcaagcagcgagtcttgaagctctgtttggtgctttggatccatttccatcggtccttacagccgctcgtcagactccagcagccaagatggtgaagcagatcgagagcaagactgcttttcaggaagccttggacgctgcaggtgataaacttgtagtagttgacttctcagccacgtggtgtgggccttgcaaaatgatcaagcctttctttcattccctctctgaaaagtattccaacgtgatattccttgaagtagatgtggatgactgtcaggatgttgcttcagagtgtgaagtcaaatgcatgccaacattccagttttttaagaagggacaaaaggtgggtgaattttctggagccaataaggaaaagcttgaagccaccattaatgaattagtctaatcatgttttctgaaaatataaccagccattggctatttaaaacttgtaatttttttaatttacaaaaatataaaatatgaagacataaacccagttgccatctgcgtgacaataaaacattaatgctaacactttttaaaaccgtctcatgtctgaatagctttcaaaataaatgtgaaatggtcatttaatgtattttcctatattctcaatcactttttagtaaccttgtaggccactgattattttaagattttaaaaattattattgctaccttaatgtattgctacaaaaatctcttgttgggggcaatgcaggtaataaagtagtatgttgttatttgtt

SEQ ID NO: 190803 - DNA, 1736 bp, Homo sapiens
  Payload ID: 17696
  Gene Name: thioredoxin 2
  Uniprot ID: Q99757
  ENST ID: ENST00000216185
  CDS Start-End: 468-968
aaatcccagacgcccctcaaattggagagggacagatgggcgctgtggctcacgcccgtaatcacaaccctctgagaagccgaggcgggcggatcacgaggtcaaaagatcgagaccgtcctggccaacgtggtgaaaccccgtctctactaaaaataaaaaaattagctgggcgtggtggcgcgcgcctctagtcgggaggctgaggcaggagaatcgcttgaacccggaaggcggaggttgcagtgagccgagatcgcgccactgcaccccagcctggcaacagagcgagactctggctcaaaaaaaaaaaaaaaaaaaaaaaaaattggagagggacgctcttccgcctgcctgtacccggaagtgacgttatgtacgtccccccccgaggaagtgacgacaggcgtgcccttgacaggcagggagggctaggctgtgcatccctccgctcgcattgcagggagatggctcagcgacttcttctgaggaggttcctggcctctgtcatctccaggaagccctctcagggtcagtggccacccctcacttccagagccctgcagaccccacaatgcagtcctggtggcctgactgtaacacccaacccagcccggacaatatacaccacgaggatctccttgacaacctttaatatccaggatggacctgactttcaagaccgagtggtcaacagtgagacaccagtggttgtggatttccacgcacagtggtgtggaccctgcaagatcctggggccgaggttagagaagatggtggccaagcagcacgggaaggtggtgatggccaaggtggatattgatgaccacacagacctcgccattgagtatgaggtgtcagcggtgcccactgtgctggccatgaagaatggggacgtggtggacaagtttgtgggcatcaaggatgaggatcagttggaggccttcctgaagaagctgattggctgacaagcagggatgagtcctggttcccttgcccgcgtgggaccccaatagaactcagcccttccatgccagcccttcctgctgcctccctcctgtctggctcctggggcccatgcttagagcccaggctccagccctgagtgcttccgagctggcggactgcccaggggccatcagaggatggtggtgctgctgctgatccggggaccgctgtcttccctcccatacgcctttcatccctccttctagggcctatggcagttctcccaggatgtgtggcgagagcctgggccagcccacagcgttcctagtcaggcagccacaccttggtcctcatcttggtcccttccaatctgaaacctcgtgcctggctcgtctgccacctacatttctctttccagctgctgttttgtaaaaagaaaaagaaaaaagaagcccaaactagtgagagtaatatctaattatctcattttttgtaggtctgtgataaagaacttagtcatcccttccacctcctactgtgaagaacagaccctgggtcccacactgaaatcccctctagtcacccattcccaccccccagggagctgcctcccaggcagggggtgcagaaaatgattgatgggctggggaaccctggagagcctcgactccggaagtctcaaggtgcctcctcctctccttagctggcccgttggttttctgagcagggggctgaactgtgaacaagtcagacaaataaagcaagggtctgcaccatctgcaatgtca

SEQ ID NO: 190804 - DNA, 912 bp, Homo sapiens
  Payload ID: 17696
  Gene Name: thioredoxin 2
  Uniprot ID: Q99757
  ENST ID: ENST00000403313
  CDS Start-End: 199-699
agttcctccttgaattgttgcgtttcatcttttcagacgaccctgggttccagtgttggctgtcatttaatagcggggttactttgggcatgtcacttaacttacttgagcctcgtattccttcccttactcgcagtgtgggcagtacaatagcaacttcctggaagttgctgtaggaagaccaataatgtgtgtaagatggctcagcgacttcttctgaggaggttcctggcctctgtcatctccaggaagccctctcagggtcagtggccacccctcacttccagagccctgcagaccccacaatgcagtcctggtggcctgactgtaacacccaacccagcccggacaatatacaccacgaggatctccttgacaacctttaatatccaggatggacctgactttcaagaccgagtggtcaacagtgagacaccagtggttgtggatttccacgcacagtggtgtggaccctgcaagatcctggggccgaggttagagaagatggtggccaagcagcacgggaaggtggtgatggccaaggtggatattgatgaccacacagacctcgccattgagtatgaggtgtcagcggtgcccactgtgctggccatgaagaatggggacgtggtggacaagtttgtgggcatcaaggatgaggatcagttggaggccttcctgaagaagctgattggctgacaagcagggatgagtcctggttcccttgcccgcgtgggaccccaatagaactcagcccttccatgccagcccttcctgctgcctccctcctgtctggctcctggggcccatgcttagagcccaggctccagccctgagtgcttccgagctggcggactgcccaggggccatcagaggatggtggtgctgctgctgatccggggaccgctgtct

SEQ ID NO: 190805 - DNA, 570 bp, Homo sapiens
  Payload ID: 17696
  Gene Name: thioredoxin 2
  ENST ID: ENST00000411915
  CDS Start-End: 34-474
ggctgtgcatccctccgctcgcattgcagggagatggctcagcgacttcttctgaggaggttcctggcctctgtcatctccaggaagccctctcagggtcagtggccacccctcacttccagagccctgcagaccccacaatgcagtcctggtggcctgactgtaacacccaacccagcccggacaatatacaccacgaggatctccttgacaacctttaatatccaggatggacctgactttcaagaccgagtggtcaacagtgagacaccagtggttgtggatttccacgcacagtggtgtggaccctgcaagatcctggggccgaggttagagaagatggtggccaagcagcacgggaaggtggtgatggccaaggtggatattgatgaccacacagacctcgccattgagtatgaggcagggtctctgtcacccaggctggagtgcagtggcacaatcacagctcactgaagcctcagtctcccaggctcaagcgatcctcctgcctcagcctcccgagtatgggagtacaggtgtcagcggtgcccactgtgctggccatgaaga

SEQ ID NO: 190806 - DNA, 1280 bp, Homo sapiens
  Payload ID: 17696
  Gene Name: thioredoxin 2
  ENST ID: ENST00000416967
  CDS Start-End: 328-522
gtgacgacaggcgtgcccttgacaggcagggagggctaggctgtgcatccctccgctcgcattgcagggaggaagccctctcagggtcagtggccacccctcacttccagagccctgcagaccccacaatgcagtcctggtggcctgactgtaacacccaacccagcccggacaatatacaccacgaggatctccttgacaacctttaatatccaggatggacctgactttcaagaccgagtggtcaacagtgagacaccagtggttgtggatttccacgcacagtggtgtggaccctgcaagatcctggggccgaggttagagaagatggtggccaagcagcacgggaaggtggtgatggccaaggtggatattgatgaccacacagacctcgccattgagtatgaggtgtcagcggtgcccactgtgctggccatgaagaatggggacgtggtggacaagtttgtgggcatcaaggatgaggatcagttggaggccttcctgaagaagctgattggctgacaagcagggatgagtcctggttcccttgcccgcgtgggaccccaatagaactcagcccttccatgccagcccttcctgctgcctccctcctgtctggctcctggggcccatgcttagagcccaggctccagccctgagtgcttccgagctggcggactgcccaggggccatcagaggatggtggtgctgctgctgatccggggaccgctgtcttccctcccatacgcctttcatccctccttctagggcctatggcagttctcccaggatgtgtggcgagagcctgggccagcccacagcgttcctagtcaggcagccacaccttggtcctcatcttggtcccttccaatctgaaacctcgtgcctggctcgtctgccacctacatttctctttccagctgctgttttgtaaaaagaaaaagaaaaaagaagcccaaactagtgagagtaatatctaattatctcattttttgtaggtctgtgataaagaacttagtcatcccttccacctcctactgtgaagaacagaccctgggtcccacactgaaatcccctctagtcacccattcccaccccccagggagctgcctcccaggcagggggtgcagaaaatgattgatgggctggggaaccctggagagcctcgactccggaagtctcaaggtgcctcctcctctccttagctggcccgttggttttctgagcagggggctgaactgtgaacaagtcagacaaataaagcaagggtctgcaccatc

SEQ ID NO: 190807 - DNA, 3140 bp, Homo sapiens
  Payload ID: 17697
  Gene Name: thioredoxin domain containing 11
  Uniprot ID: Q6PKC3
  ENST ID: ENST00000283033
  CDS Start-End: 149-3025
ggcggaccccgcggcggcggcgcggctgacgtggagcgtccgggttagcgggtgcggcgagctgcgggattggggagcaacgggccgggccgggccttcgggcccgaggcggcggcggcggtataaagccggcgactgggagcatgtaatgtcggaatgcggaggccgcggcggcggcagcagcagcagcgaggacgccgaggacgagggagggggcggcggcggccccgcgggctcagactgcctcagctcgagcccgaccctggccacagcgtcctcggcgggccggctccgtcgcgggctgcgtggcgccttcctcatggcgcgccagcggccggagctgctctgcggggccgtggcgctcggctgcgcgctgctcctcgccctcaagttcacctgcagtcgagcaaaagatgtgataataccagcaaagccacctgtcagctttttctccttgaggtctccagtccttgacctcttccaggggcagctggattatgcagagtacgttcgacgggattcagaggtggtactgctcttcttctatgccccttggtgtggacagtccatcgctgccagggcagaaattgagcaagcagcaagtcggctttcagatcaggtgttgtttgtggcaattaactgttggtggaaccaggggaaatgcagaaaacagaaacacttcttttattttcctgtaatatatctgtatcatcggagttttggaccaatcgaatacaaaggccccatgagtgctgtttacattgagaagtttgtccgccgggtgatgaaaccacttctctacatcccatctcaatcagaattactagattttctctcaaactacgagcctggagtactcgggtactttgagttcagtggctcaccccagcctcctggttatttgaccttcttcacctcagcattacattcattaaagaaagattacctaggaacagtacgatttggggttatcacaaataaacatcttgcgaaactggtatccttagtacactctggaagtgtgtatttacatagacatttcaacacatcacttgtcttccccagggaggtcctgaactacacagctgagaacatctgtaagtgggccttagaaaaccaggagacgctctttcggtggctgcggccacacggaggcaagagtctcctgctgaataacgagctgaagaaaggaccagcgctgtttctgttcataccttttaatcccctggccgaaagtcatcctttaatagacgagatcaccgaagtggccttggagtacaacaactgtcatggggaccaggtggtggagcgtctccttcagcacctgcggcgggtggatgctccagtgctggagtccctggccctggaagtgccggcacagctgccagacccgccaacgatcacagcgtccccctgctgcaacactgtggtgctgccccagtggcactccttctccaggacccacaacgtctgtgaactctgtgtcaaccagacctccgggggcatgaagccgagctcggtcagcgtgccacagtgcagcttttttgaaatggcagcagctctggattctttctacctcaaggagcagaccttttatcatgtggcatcagacagcatagaatgcagcaattttttaacttcctatagccccttcagctactacactgcatgttgcaggaccataagcaggggtgtgtcaggcttcatcgactctgaacaaggtgtctttgaagcccctactgttgcattttcttcccttgagaagaaatgtgaggttgatgccccaagctccgttcctcacattgaggagaacaggtatctctttccagaagtggacatgactagcacaaacttcacaggcctgagctgcagaaccaacaagactctcaacatctaccttttggattcaaatttgttttggttatatgcagagagactgggtgctccgagctccactcaggtgaaagaatttgcggcaattgttgacgtgaaagaagaatctcattacatcttggatccaaagcaagcactgatgaagctcaccctagagtcttttattcaaaacttcagcgttctctatagtcccttgaaaaggcatctcattggaagtggctctgcccagttcccgtctcagcatttaatcactgaagtgacaactgataccttttgggaagtagtccttcaaaaacaggacgttctcctgctctattacgctccgtggtgcggcttctgtccatccctcaatcacatcttcatccagctagctcggaacctgcccatggacacattcactgtggcaaggattgacgtgtctcagaatgaccttccttgggaatttatggtcgatcgtcttcctactgtcttgttttttccctgcaacagaaaggacctaagtgtgaaataccccgaagacgtccccatcacccttccaaacctgttgaggttcattttgcatcactcagaccctgcttccagcccccagaatgtggctaactctcctaccaaggagtgtcttcagagcgaggcagtcttacagcgggggcacatctcccacttggagagagagatccagaaactgagagcagaaataagcagcctccagcgagcacaagtgcaggtggagtcccagctctccagtgcccgcagagatgagcaccggctgcggcagcagcagcgggccctggaagagcagcacagcctgctccacgcacacagtgagcagctgcaggccctctatgagcagaagacacgtgagctgcaggagctggcccgcaagctgcaggagctggccgatgcctcagaaaacctccttaccgagaacacgtggctcaagatcctggtggcgaccatggagaggaaactggagggcagggatggagctgaaagcctggcggcccagagagaggtccaccccaagcagcctgagccctcagccaccccccagctccctggcagctcccctccacctgccaatgtcagcgccacactggtgtctgaaaggaataaggagaacaggacagactaactttttaaatgatatgaagaaatcagaggtgaaaattgtacattgggaatatatttatgcaaattttattgaaatttattgtaaataaagattttctcagtggtctagaaaatca

SEQ ID NO: 190808 - DNA, 3178 bp, Homo sapiens
  Payload ID: 17697
  Gene Name: thioredoxin domain containing 11
  Uniprot ID: Q6PKC3
  ENST ID: ENST00000356957
  CDS Start-End: 109-3066
cgggttagcgggtgcggcgagctgcgggattggggagcaacgggccgggccgggccttcgggcccgaggcggcggcggcggtataaagccggcgactgggagcatgtaatgtcggaatgcggaggccgcggcggcggcagcagcagcagcgaggacgccgaggacgagggagggggcggcggcggccccgcgggctcagactgcctcagctcgagcccgaccctggccacagcgtcctcggcgggccggctccgtcgcgggctgcgtggcgccttcctcatggcgcgccagcggccggagctgctctgcggggccgtggcgctcggctgcgcgctgctcctcgccctcaagttcacctgcagtcgagcaaaagatgtgataataccagcaaagccacctgtcagctttttctccttgaggtctccagtccttgacctcttccaggggcagctggattatgcagagtacgttcgacgggattcagaggtggtactgctcttcttctatgccccttggtgtggacagtccatcgctgccagggcagaaattgagcaagcagcaagtcggctttcagatcaggtgttgtttgtggcaattaactgttggtggaaccaggggaaatgcagaaaacagaaacacttcttttattttcctgtaatatatctgtatcatcggagttttggaccaatcgaatacaaaggccccatgagtgctgtttacattgagaagtttgtccgccgggtgatgaaaccacttctctacatcccatctcaatcagaattactagattttctctcaaactacgagcctggagtactcgggtactttgagttcagtggctcaccccagcctcctggttatttgaccttcttcacctcagcattacattcattaaagaaagctctggaatcaacctcttctccaagggccctggtttcttttactggagaatggcatttagaaaccaagatctacgtgctagattacctaggaacagtacgatttggggttatcacaaataaacatcttgcgaaactggtatccttagtacactctggaagtgtgtatttacatagacatttcaacacatcacttgtcttccccagggaggtcctgaactacacagctgagaacatctgtaagtgggccttagaaaaccaggagacgctctttcggtggctgcggccacacggaggcaagagtctcctgctgaataacgagctgaagaaaggaccagcgctgtttctgttcataccttttaatcccctggccgaaagtcatcctttaatagacgagatcaccgaagtggccttggagtacaacaactgtcatggggaccaggtggtggagcgtctccttcagcacctgcggcgggtggatgctccagtgctggagtccctggccctggaagtgccggcacagctgccagacccgccaacgatcacagcgtccccctgctgcaacactgtggtgctgccccagtggcactccttctccaggacccacaacgtctgtgaactctgtgtcaaccagacctccgggggcatgaagccgagctcggtcagcgtgccacagtgcagcttttttgaaatggcagcagctctggattctttctacctcaaggagcagaccttttatcatgtggcatcagacagcatagaatgcagcaattttttaacttcctatagccccttcagctactacactgcatgttgcaggaccataagcaggggtgtgtcaggcttcatcgactctgaacaaggtgtctttgaagcccctactgttgcattttcttcccttgagaagaaatgtgaggttgatgccccaagctccgttcctcacattgaggagaacaggtatctctttccagaagtggacatgactagcacaaacttcacaggcctgagctgcagaaccaacaagactctcaacatctaccttttggattcaaatttgttttggttatatgcagagagactgggtgctccgagctccactcaggtgaaagaatttgcggcaattgttgacgtgaaagaagaatctcattacatcttggatccaaagcaagcactgatgaagctcaccctagagtcttttattcaaaacttcagcgttctctatagtcccttgaaaaggcatctcattggaagtggctctgcccagttcccgtctcagcatttaatcactgaagtgacaactgataccttttgggaagtagtccttcaaaaacaggacgttctcctgctctattacgctccgtggtgcggcttctgtccatccctcaatcacatcttcatccagctagctcggaacctgcccatggacacattcactgtggcaaggattgacgtgtctcagaatgaccttccttgggaatttatggtcgatcgtcttcctactgtcttgttttttccctgcaacagaaaggacctaagtgtgaaataccccgaagacgtccccatcacccttccaaacctgttgaggttcattttgcatcactcagaccctgcttccagcccccagaatgtggctaactctcctaccaaggagtgtcttcagagcgaggcagtcttacagcgggggcacatctcccacttggagagagagatccagaaactgagagcagaaataagcagcctccagcgagcacaagtgcaggtggagtcccagctctccagtgcccgcagagatgagcaccggctgcggcagcagcagcgggccctggaagagcagcacagcctgctccacgcacacagtgagcagctgcaggccctctatgagcagaagacacgtgagctgcaggagctggcccgcaagctgcaggagctggccgatgcctcagaaaacctccttaccgagaacacgtggctcaagatcctggtggcgaccatggagaggaaactggagggcagggatggagctgaaagcctggcggcccagagagaggtccaccccaagcagcctgagccctcagccaccccccagctccctggcagctcccctccacctgccaatgtcagcgccacactggtgtctgaaaggaataaggagaacaggacagactaactttttaaatgatatgaagaaatcagaggtgaaaattgtacattgggaatatatttatgcaaattttattgaaatttattgtaaataaagattttctcagtggtctagaaaa

SEQ ID NO: 190809 - DNA, 615 bp, Homo sapiens
  Payload ID: 17697
  Gene Name: thioredoxin domain containing 11
  ENST ID: ENST00000575591
  CDS Start-End: 1-615
tacgttcgacgggattcagaggtggtactgctcttcttctatgccccttggtgtggacagtccatcgctgccagggcagaaattgagcaagcagcaagtcggctttcagatcagcctggagtactcgggtactttgagttcagtggctcaccccagcctcctggttatttgaccttcttcacctcagcattacattcattaaagaaagattacctaggaacagtacgatttggggttatcacaaataaacatcttgcgaaactggtatccttagtacactctggaagtgtgtatttacatagacatttcaacacatcacttgtcttccccagggaggtcctgaactacacagctgagaacatctgtaagtgggccttagaaaaccaggagacgctctttcggtggctgcggccacacggaggcaagagtctcctgctgaataacgagctgaagaaaggaccagcgctgtttctgttcataccttttaatcccctggccgaaagtcatcctttaatagacgagatcaccgaagtggccttggagtacaacaactgtcatggggaccaggtggtggagcgtctccttcagcacctgcggcgggtggatgctccagtg

SEQ ID NO: 190810 - DNA, 863 bp, Homo sapiens
  Payload ID: 17697
  Gene Name: thioredoxin domain containing 11
  ENST ID: ENST00000576969
  CDS Start-End: 1-444
cggccggagctgctctgcggggccgtggcgctcggctgcgcgctgctcctcgccctcaagttcacctgcagtcgagcaaaagatgtgataataccagcaaagccacctgtcagctttttctccttgaggtctccagtccttgacctcttccaggggcagctggattatgcagagtacgttcgacgggattcagaggtggtactgctcttcttctatgccccttggtgtggacagtccatcgctgccagggcagaaattgagcaagcagcaagtcggctttcagatcaggtgttgtttgtggcaattaactgttggtggaaccaggggaaatgcagaaaacagaaacacttcttttattttcctgtaatatatctgtatcatcggagcctggagtactcgggtactttgagttcagtggctcaccccagcctcctggttatttgaccttcttcacctcagcattacattcattaaagaaagattacctaggaacagtacgatttggggttatcacaaataaacatcttgcgaaactggtatccttagtacactctggaagtgtgtatttacatagacatttcaacacatcacttgtcttccccagggaggtcctgaactacacagctgagaacatctgtaagtgggccttagaaaaccaggagacgctctttcggtggctgcggccacacggaggcaagagtctcctgctgaataacgagctgaagaaaggaccagcgctgtttctgttcataccttttaatcccctggccgaaagtcatcctttaatagacgagatcaccgaagtggccttggagtacaacaactgtcatggggaccaggtggtggagcgtctccttcagcac

SEQ ID NO: 190811 - DNA, 581 bp, Homo sapiens
  Payload ID: 17697
  Gene Name: thioredoxin domain containing 11
  ENST ID: ENST00000571882
  CDS Start-End: 1-76
atatctgtatcatcggagcctggagtactcgggtactttgagttcagtggctcaccccagcctcctggttatttgaccttcttcacctcagcattacattcattaaagaaagatggagtctcgccctgccgcccaggctggagtgcagtggcgtgatcttggctcactggaatctgcctcccgggttcaagcgattctcctgcctcagcctcctgagtagctggagttacatagattacctaggaacagtacgatttggggttatcacaaataaacatcttgcgaaactggtatccttagtacactctggaagtgtgtatttacatagacatttcaacacatcacttgtcttccccagggaggtcctgaactacacagctgagaacatctgtaagtgggccttagaaaaccaggagacgctctttcggtggctgcggccacacggaggcaagagtctcctgctgaataacgagctgaagaaaggaccagcgctgtttctgttcataccttttaatcccctggccgaaagtcatcctttaatagacgagatcaccgaagtggccttggagtacaacaactgt

SEQ ID NO: 190812 - DNA, 2396 bp, Homo sapiens
  Payload ID: 17698
  Gene Name: thioredoxin domain containing 12 (endoplasmic reticulum)
  Uniprot ID: O95881
  ENST ID: ENST00000371626
  CDS Start-End: 1076-1594
agtgctagtggcggcaggtgcaggtggccgcgcggcatcctggggcttgcagtctcccgagcgttctgttgtgtccctgcctacaattttagggaacctaataaaagggtggtcggtatgtttttatttgggtgtgtacttttgttaggtcgctttttcgctatgcattaagtacggactttaggactcaactagtaccaggaagaaaaagaccggacattttcacctgtttgttatacagcgaaggggaaaaattgggaagaaatcctcaagctacaagaaaaataaccagaagctttacactttagcctgcagtgacttatatcctggtgtcctaagtccacctaagtcagttttgcaataagaggtcccaagtttggttttcttggagcttgcatcagttggttgcatcatccctgagtagaagatttgcggttgcaaggaaaaataaggtacagagcttctccagcgggaaagtgcatgtctgcacggcacgagcccacgcaccgcagaacaggcttgccaggtctcctcagagaccctcgcaggaacctaacaatgaaatccagttgtccagtcttgatttgtggaggggtaaggagaatccgaggccagtgggcaatccgcccactgttgggagcgactgacctcacgaatcaataatttgcttttgactaggaagtgcagcggttcttggggggaggggctggactgggtggcggacgcgaggagcaacggttctcccgaacctctcccccgcccctactatcttggcctacattttcccgctccgtcccgggacctggacacccagaatccacgaaaagcaactcgcgctcgagaacagctctcgtacccttctacgtgatctgcacctttaagctcactccatcccaaaccggaccccggaggcaccacccacatccgtctaacatcacttccttcagagtttgaaaaaaaaaaatctgggaagtagaggtgttgtgctgagcggcgctcggcgaactgtgtggaccgtctgctgggactccggccctgcgtccgctcagccccgtggccccgcgcacctactgccatggagacgcggcctcgtctcggggccacctgtttgctgggcttcagtttcctgctcctcgtcatctcttctgatggacataatgggcttggaaagggttttggagatcatattcattggaggacactggaagatgggaagaaagaagcagctgccagtggactgcccctgatggtgattattcataaatcctggtgtggagcttgcaaagctctaaagcccaaatttgcagaatctacggaaatttcagaactctcccataattttgttatggtaaatcttgaggatgaagaggaacccaaagatgaagatttcagccctgacgggggttatattccacgaatcctttttctggatcccagtggcaaggtgcatcctgaaatcatcaatgagaatggaaaccccagctacaagtatttttatgtcagtgccgagcaagttgttcaggggatgaaggaagctcaggaaaggctgacgggtgatgccttcagaaagaaacatcttgaagatgaattgtaacatgaatgtgccccttctttcatcagagttagtgttctggaaggaaagcagcagggaagggaatattgaggaatcatctagaacaattaagccgaccaggaaacctcattcctacctacactggaaggagcgctctcactgtggaagagttctgctaacagaagctggtctgcatgtttgtggatccagcggagagtggcagactttcttctccttttccctctcacctaaatgtcaacttgtcattgaatgtaaagaatgaaaccttctgacacaaaacttgagccacttggatgtttactcctcgcacttaagtatttgagtcttttcccatttcctcccactttactcaccttagtggtgaaaggagactagtagcatcttttctacaacgttaaaattgcagaagtagcttatcattaaaaaacaacaacaacaacaataacaataaatcctaagtgtaaatcagttattctaccccctaccaaggatatcagcctgttttttcccttttttctcctgggaataattgtgggcttcttcccaaatttctacagcctctttcctcttctcatgcttgagcttccctgtttgcacgcatgcgtgtgcaggactggctgtgtgcttggactcggctccaggtggaagcatgctttcccttgttactgttggagaaactcaaaccttcaagccctaggtgtagccattttgtcaagtcatcaactgtatttttgtactggcattaacaaaaaaagagataaaatattgtaccattaaactttaataaaactttaaaaggaaa

SEQ ID NO: 190813 - DNA, 806 bp, Homo sapiens
  Payload ID: 17698
  Gene Name: thioredoxin domain containing 12 (endoplasmic reticulum)
  ENST ID: ENST00000610127
  CDS Start-End: 96-263
gttgtgctgagcggcgctcggcgaactgtgtggaccgtctgctgggactccggccctgcgtccgctcagccccgtggccccgcgcacctactgccatggagacgcggcctcgtctcggggccacctgtttgctgggcttcagtttcctgctcctcgtcatctcttctgatggacataatgggcttggaaagggttttggagatcatattcattggaggacactggaagatgggaagaaagaagcagctgccaggccttattaataaaatggacgggcagtctttcgctgcaggaagatcacattctcctgaggcctataacatttggcataaataactgatgccattatagtctctgtatctcctttctgagaaagctgaacctgggcctagctggcgtagaactcctgtttccatagaaacaagagggtctgtaaaagtcaagggagacaggaagagcagtttgcacttccggcttacgtcggagacgcgtacaacccggaagttggcgcagcgcggttgccaatggtcgctccctgagaggatgccgctcgtggtgttttgcgggctgccgtacagcggcaagagccggcgtgctgaagagttgcgcgtggcgctggctgccgagggccgcgcggtgtacgtggtggacgacgcagctgtcctgggcgcagaggacccagcggtgtacggcgattctgcccgtgagaaggcattgcgtggagctctgcgagcctccgtggaacggcgcctgagtcgccacgacgtggtcatcctggactcgcttaactacatcaaaggtttccg

SEQ ID NO: 190814 - DNA, 800 bp, Homo sapiens
  Payload ID: 17698
  Gene Name: thioredoxin domain containing 12 (endoplasmic reticulum)
  ENST ID: ENST00000472624
  CDS Start-End: 81-251
gctcggcgaactgtgtggaccgtctgctgggactccggccctgcgtccgctcagccccgtggccccgcgcacctactgccatggagacgcggcctcgtctcggggccacctgtttgctgggcttcagtttcctgctcctcgtcatctcttctgatggacataatgggcttggaaagggttttggagatcatattcattggaggacactggaagatgggaagaaagaagcagctgccaggattcatgtgtgaaatggaagtctggatgaggcaaactcaaaaggctttttccaaccttcattaagttggttattgattgaattgggtctaaccatggattctggattaccattctaaattgaagtagactgtaaccgtcagaaagaacattggttttggagtcggacttctgagttagctatggactgcccctgatggtgattattcataaatcctggtgtggagcttgcaaagctctaaagcccaaatttgcagaatctacggaaatttcagaactctcccataattttgttatggtaaatcttgaggatgaagaggaacccaaagatgaagatttcagccctgacgggggttatattccacgaatcctttttctggatcccagtggcaaggtgcatcctgaaatcatcaatgagaatggaaaccccagctacaagtatttttatgtcagtgccgagcaagttgttcaggggatgaaggaagctcaggaaaggctgacgggtgatgccttcagaaagaaacatcttgaagatgaattgtaacatgaatgtgccccttctt

SEQ ID NO: 190815 - DNA, 3548 bp, Homo sapiens
  Payload ID: 17699
  Gene Name: thioredoxin domain containing 15
  Uniprot ID: Q96J42
  ENST ID: ENST00000358387
  CDS Start-End: 626-1708
aggtagggttagggttgccagatgtcacgaagttacaggatgctcagttttaaggtatatcccttatactataagggttatagtaaaaaatattcattatgtgaaattcaaatataactgggtatcaggtattctatgtggcaaccctaggtaggggagcacaggttaggcaagcgattagaagatttgcagcctccaaagtttctgcacctcgatgggacactagaacaggaaggctcctgggcctttctggctctgggaatgaagcgtggaaaaccctccttaggcgggcgcagtgcttcaagtagccaagctctgacttccgagggaagaaaggaggccatgggcctctgccagagccatgctctgcactctggggtcagcagagttcaaaacgacctgcaacgtctggcgcttagctcctaaagaggtctccagtccagcgccgacggccagcggctagaggccgtccgcccgactccaagatggcgcccgccacagctgccaggtgttaagatggcggcgcggggccgcgcccgcgctcccaggctctcctcccccagccttcctccggctggcagcacgactcgcgtagccgtgcgccgattgcctctcggcctgggcaatggtcccggctgccggtcgacgaccgccccgcgtcatgcggctcctcggctggtggcaagtattgctgtgggtgctgggacttcccgtccgcggcgtggaggttgcagaggaaagtggtcgcttatggtcagaggagcagcctgctcaccctctccaggtgggggctgtgtacctgggtgaggaggagctcctgcatgacccgatgggccaggacagggcagcagaagaggccaatgcggtgctggggctggacacccaaggcgatcacatggtgatgctgtctgtgattcctggggaagctgaggacaaagtgagttcagagcctagcggcgtcacctgtggtgctggaggagcggaggactcaaggtgcaacgtccgagagagccttttctctctggatggcgctggagcacacttccctgacagagaagaggagtattacacagagccagaagtggcggaatctgacgcagccccgacagaggactccaataacactgaaagtctgaaatccccaaaggtgaactgtgaggagagaaacattacaggattagaaaatttcactctgaaaattttaaatatgtcacaggaccttatggattttctgaacccaaacggtagtgactgtactctagtcctgttttacaccccgtggtgccgcttttctgccagtttggcccctcactttaactctctgccccgggcatttccagctcttcactttttggcactggatgcatctcagcacagcagcctttctaccaggtttggcaccgtagctgttcctaatattttattatttcaaggagctaaaccaatggccagatttaatcatacagatcgaacactggaaacactgaaaatcttcatttttaatcagacaggtatagaagccaagaagaatgtggtggtaactcaagccgaccaaataggccctcttcccagcactttgataaaaagtgtggactggttgcttgtattttccttattctttttaattagttttattatgtatgctaccattcgaactgagagtattcggtggctaattccaggacaagagcaggaacatgtggagtagtgatggtctgaaagaagttggaaagaggaacttcaatccttcgtttcagaaattagtgctacagtttcatacattttctccagtgacgtgttgacttgaaacttcaggcagattaaaagaatcatttgttgaacaactgaatgtataaaaaaattataaactggtgttttaactagtattgcaataagcaaatgcaaaaatattcaatagatgcactattcttgtttttactgcatgaacgtaatccagtatttggaaagtaatccagtttgaaatgtgaagatgtattccggcagaatagtgagtagaatgacatgcttactatacagaaggcaaaaataggactctcaggtaatagtttaaggaaacccttgattccttatatatgtttaagaaggttagttttctgtttctttgcagtttttcttctagagtccatagcaggaaagtatgtaaccagaattggttagtgtgaccccctcaagtagcaagtgatggaaaataagagtcaaataccttgatgtttgtgatctctaactcaaaaaatttgaagtgttttaagttgtttctgggtaagggagatgttaggagaaaggaaatgctgtaactaaagctcaattattatcagttctatgctaacgtatacattttaatcatagttacctaagcagcatgcattaattgaaccttaaaatgttcccagcaggctgggcgcagtggctcatgcctgtaatcccagcactttgggaggccaaggcgggaggatcacttgaggttaggacttttgagaccagcctggccaacttggtgaaaccctctctctactaaaaatacaaaaaattagctgggcgtggtggcgggcacctgtaatcccagctacttgggaaagctgaggcatgagaatcacttgaacccgggaggcagaggttgcagtgagctgagatcatgccactgcactccagcctgtgcaaccagagcgaaactccatctcaaaaacaaacaaaaagaagtattgaagtgtaaaacactgttcttgcccacaagttgattctagtctagttcaagacacatgtttagtaaagagacaacatgtaatttaaacaaactttttttttttttttagacaaagtctcactctgtcacctaggctggagtgcaatggtgcaatcttggctcactgcaacctctgcttcccgggttcaagcgattctccagcctcagcctcctgagtagctgggactatgggcctgtgccatcacacccagctaatttttctatttttagtagagatggggttttgccatgttggccaggctggtctcaaactgctgacttcaggtgatccacccgcctcagcctcccaaagtgttgggattacaggtgtgagccactgcgcctggcctaaacaaactttttgaaaagctgtttctaaaagattccttaaattcagatatgacagctaattacctcatcataaattacttttatactaattgtttccagggttttagagtagttgaatgtttatttcacaaggcaccctaaattctatagaaataaaacctcagatgagtctccttcttagagtgttacaatgaatgggagtttacaacttttatgtgtcatgtttccaacagctgtgtttggggtggtcactggcaggaggggaccgtatctcagaatggcacattatttctattttacacatgagcaaattgaggcatagagagttagataacttgcccaggttacacagattgtaagttgatgaagctgggatttgaatcttcacatgtgtgtacttataaatacaaatgtaaggaaaactctagtgagtcca

SEQ ID NO: 190816 - DNA, 518 bp, Homo sapiens
  Payload ID: 17699
  Gene Name: thioredoxin domain containing 15
  ENST ID: ENST00000509954
  CDS Start-End: 1-346
tttggcactggatgcatctcagcacagcaggtttggcaccgtagctgttcctaatattttattatttcaaggagctaaaccaatggccagatttaatcatacagatcgaacactggaaacactgaaaatcttcatttttaatcagacaggtatagaagccaagaagaatgtggtggtaactcaagccgaccaaataggccctcttcccagcactttgataaaaagtgtggactggttgcttgtattttccttattctttttaattagttttattatgtatgctaccattcgaactgagagtattcggtggctaattccaggacaagagcaggaacatgtggagtagtgatggtctgaaagaagttggaaagaggaacttcaatccttcgtttcagaaattagtgctacagtttcatacattttctccagtgacgtgttgacttgaaacttcaggcagattaaaagaatcatttgttgaacaactgaatgtataaaaaaattataaactggtgttttaa

SEQ ID NO: 190817 - DNA, 1477 bp, Homo sapiens
  Payload ID: 17699
  Gene Name: thioredoxin domain containing 15
  ENST ID: ENST00000508779
  CDS Start-End: 1-1034
ttttccctggggtgtcctggatggaggcaggacagcagagagttgtggagaaggttgcagaggaaagtggtcgcttatggtcagaggagcagcctgctcaccctctccaggtgggggctgtgtacctgggtgaggaggagctcctgcatgacccgatgggccaggacagggcagcagaagaggccaatgcggtgctggggctggacacccaaggcgatcacatggtgatgctgtctgtgattcctggggaagctgaggacaaagtgagttcagagcctagcggcgtcacctgtggtgctggaggagcggaggactcaaggtgcaacgtccgagagagccttttctctctggatggcgctggagcacacttccctgacagagaagaggagtattacacagagccagaagtggcggaatctgacgcagccccgacagaggactccaataacactgaaagtctgaaatccccaaaggtgaactgtgaggagagaaacattacaggattagaaaatttcactctgaaaattttaaatatgtcacaggaccttatggattttctgaacccaaacggtagtgactgtactctagtcctgttttacaccccgtggtgccgcttttctgccagtttggcccctcactttaactctctgccccgggcatttccagctcttcactttttggcactggatgcatctcagcacagcagcctttctaccaggtttggcaccgtagctgttcctaatattttattatttcaaggagctaaaccaatggccagatttaatcatacagatcgaacactggaaacactgaaaatcttcatttttaatcagacaggtatagaagccaagaagaatgtggtggtaactcaagccgaccaaataggccctcttcccagcactttgataaaaagtgtggactggttgcttgtattttccttattctttttaattagttttattatgtatgctaccattcgaactgagagtattcggtggctaattccaggacaagagcaggaacatgtggagtagtgatggtctgaaagaagttggaaagaggaacttcaatccttcgtttcagaaattagtgctacagtttcatacattttctccagtgacgtgttgacttgaaacttcaggcagattaaaagaatcatttgttgaacaactgaatgtataaaaaaattataaactggtgttttaactagtattgcaataagcaaatgcaaaaatattcaatagatgcactattcttgtttttactgcatgaacgtaatccagtatttggaaagtaatccagtttgaaatgtgaagatgtattccggcagaatagtgagtagaatgacatgcttactatacagaaggcaaaaataggactctcaggtaatagtttaaggaaacccttgattccttatatatgtttaagaaggttagttttctgtttctttgcagtttttcttctagagtccatagca

SEQ ID NO: 190818 - DNA, 1006 bp, Homo sapiens
  Payload ID: 17699
  Gene Name: thioredoxin domain containing 15
  ENST ID: ENST00000511070
  CDS Start-End: 58-192
ctccggctggcagcacgactcgcgtagccgtgcgccgattgcctctcggcctgggcaatggtcccggctgccggtcgacgaccgccccgcgtcatgcggctcctcggctggtggcaagtattgctgtgggtgctgggacttcccgtccgcggcgtggagggaccttatggattttctgaacccaaacggtagtgactgtactctagtcctgttttacaccccgtggtgccgcttttctgccagtttggcccctcactttaactctctgccccgggcatttccagctcttcactttttggcactggatgcatctcagcacagcagcctttctaccaggtttggcaccgtagctgttcctaatattttattatttcaaggagctaaaccaatggccagatttaatcatacagatcgaacactggaaacactgaaaatcttcatttttaatcagacaggtatagaagccaagaagaatgtggtggtaactcaagccgaccaaataggccctcttcccagcactttgataaaaagtgtggactggttgcttgtattttccttattctttttaattagttttattatgtatgctaccattcgaactgagagtattcggtggctaattccaggacaagagcaggaacatgtggagtagtgatggtctgaaagaagttggaaagaggaacttcaatccttcgtttcagaaattagtgctacagtttcatacattttctccagtgacgtgttgacttgaaacttcaggcagattaaaagaatcatttgttgaacaactgaatgtataaaaaaattataaactggtgttttaactagtattgcaataagcaaatgcaaaaatattcaatagatgcactattcttgtttttactgcatgaacgtaatccagtatttggaaagtaatccagtttgaaatgtgaagatgtattccggcagaatagtgagtagaatgacatgcttactatacagaaggcaaaaataggactctcaggta

SEQ ID NO: 190819 - DNA, 517 bp, Homo sapiens
  Payload ID: 17699
  Gene Name: thioredoxin domain containing 15
  ENST ID: ENST00000506916
  CDS Start-End: 53-517
gctggcagcacgactcgcgtagccgtgcgccgattgcctctcggcctgggcaatggtcccggctgccggtcgacgaccgccccgcgtcatgcggctcctcggctggtggcaagtattgctgtgggtgctgggacttcccgtccgcggcgtggaggaggaaagtggtcgcttatggtcagaggagcagcctgctcaccctctccaggtgggggctgtgtacctgggtgaggaggagctcctgcatgacccgatgggccaggacagggcagcagaagaggccaatgcggtgctggggctggacacccaaggcgatcacatggtgatgctgtctgtgattcctggggaagctgaggacaaagtgagttcagagcctagcggcgtcacctgtggtgctggaggagcggaggactcaaggtgcaacgtccgagagagccttttctctctggatggcgctggagcacacttccctgacagagaagaggagtattacacagagccagaagtggcggaatctgac

SEQ ID NO: 190820 - DNA, 579 bp, Homo sapiens
  Payload ID: 17699
  Gene Name: thioredoxin domain containing 15
  ENST ID: ENST00000508810
  CDS Start-End: 42-579
gaccactgtcttaaggaggccagtcttgctcagctccctgcatgaaaaacagacgagaaacacgggagactcccggtaacccccaacttgccgttgcagaggaaagtggtcgcttatggtcagaggagcagcctgctcaccctctccaggtgggggctgtgtacctgggtgaggaggagctcctgcatgacccgatgggccaggacagggcagcagaagaggccaatgcggtgctggggctggacacccaaggcgatcacatggtgatgctgtctgtgattcctggggaagctgaggacaaagtgagttcagagcctagcggcgtcacctgtggtgctggaggagcggaggactcaaggtgcaacgtccgagagagccttttctctctggatggcgctggagcacacttccctgacagagaagaggagtattacacagagccagaagtggcggaatctgacgcagccccgacagaggactccaataacactgaaagtctgaaatccccaaaggtgaactgtgaggagagaaacattacaggattagaaaatttcactctgaaaattttaaatatgtcac

SEQ ID NO: 190821 - DNA, 2893 bp, Homo sapiens
  Payload ID: 17699
  Gene Name: thioredoxin domain containing 15
  ENST ID: ENST00000507024
  CDS Start-End: 32-166
gccgtgcgccgattgcctctcggcctgggcaatggtcccggctgccggtcgacgaccgccccgcgtcatgcggctcctcggctggtgttgcagaggaaagtggtcgcttatggtcagaggagcagcctgctcaccctctccaggtgggggctgtgtacctgggtgaggaggagctcctgcatgacccgatgggccaggacagggcagcagaagaggccaatgcggtgctggggctggacacccaaggcgatcacatggtgatgctgtctgtgattcctggggaagctgaggacaaagtgagttcagagcctagcggcgtcacctgtggtgctggaggagcggaggactcaaggtgcaacgtccgagagagccttttctctctggatggcgctggagcacacttccctgacagagaagaggagtattacacagagccagaagtggcggaatctgacgcagccccgacagaggactccaataacactgaaagtctgaaatccccaaaggtgaactgtgaggagagaaacattacaggattagaaaatttcactctgaaaattttaaatatgtcacaggaccttatggattttctgaacccaaacggtagtgactgtactctagtcctgttttacaccccgtggtgccgcttttctgccagtttggcccctcactttaactctctgccccgggcatttccagctcttcactttttggcactggatgcatctcagcacagcagcctttctaccaggtttggcaccgtagctgttcctaatattttattatttcaaggagctaaaccaatggccagatttaatcatacagatcgaacactggaaacactgaaaatcttcatttttaatcagacaggtatagaagccaagaagaatgtggtggtaactcaagccgaccaaataggccctcttcccagcactttgataaaaagtgtggactggttgcttgtattttccttattctttttaattagttttattatgtatgctaccattcgaactgagagtattcggtggctaattccaggacaagagcaggaacatgtggagtagtgatggtctgaaagaagttggaaagaggaacttcaatccttcgtttcagaaattagtgctacagtttcatacattttctccagtgacgtgttgacttgaaacttcaggcagattaaaagaatcatttgttgaacaactgaatgtataaaaaaattataaactggtgttttaactagtattgcaataagcaaatgcaaaaatattcaatagatgcactattcttgtttttactgcatgaacgtaatccagtatttggaaagtaatccagtttgaaatgtgaagatgtattccggcagaatagtgagtagaatgacatgcttactatacagaaggcaaaaataggactctcaggtaatagtttaaggaaacccttgattccttatatatgtttaagaaggttagttttctgtttctttgcagtttttcttctagagtccatagcaggaaagtatgtaaccagaattggttagtgtgaccccctcaagtagcaagtgatggaaaataagagtcaaataccttgatgtttgtgatctctaactcaaaaaatttgaagtgttttaagttgtttctgggtaagggagatgttaggagaaaggaaatgctgtaactaaagctcaattattatcagttctatgctaacgtatacattttaatcatagttacctaagcagcatgcattaattgaaccttaaaatgttcccagcaggctgggcgcagtggctcatgcctgtaatcccagcactttgggaggccaaggcgggaggatcacttgaggttaggacttttgagaccagcctggccaacttggtgaaaccctctctctactaaaaatacaaaaaattagctgggcgtggtggcgggcacctgtaatcccagctacttgggaaagctgaggcatgagaatcacttgaacccgggaggcagaggttgcagtgagctgagatcatgccactgcactccagcctgtgcaaccagagcgaaactccatctcaaaaacaaacaaaaagaagtattgaagtgtaaaacactgttcttgcccacaagttgattctagtctagttcaagacacatgtttagtaaagagacaacatgtaatttaaacaaactttttttttttttttagacaaagtctcactctgtcacctaggctggagtgcaatggtgcaatcttggctcactgcaacctctgcttcccgggttcaagcgattctccagcctcagcctcctgagtagctgggactatgggcctgtgccatcacacccagctaatttttctatttttagtagagatggggttttgccatgttggccaggctggtctcaaactgctgacttcaggtgatccacccgcctcagcctcccaaagtgttgggattacaggtgtgagccactgcgcctggcctaaacaaactttttgaaaagctgtttctaaaagattccttaaattcagatatgacagctaattacctcatcataaattacttttatactaattgtttccagggttttagagtagttgaatgtttatttcacaaggcaccctaaattctatagaaataaaacctcagatgagtctccttcttagagtgttacaatgaatgggagtttacaacttttatgtgtcatgtttccaacagctgtgtttggggtggtcactggcaggaggggaccgtatctcagaatggcacattatttctattttacacatgagcaaattgaggcatagagagttagataacttgcccaggttacacagattgtaagttgatgaagctgggatttgaatcttcacatgtgtgtacttataaatacaaatgtaaggaaaa

SEQ ID NO: 190822 - DNA, 4564 bp, Homo sapiens
  Payload ID: 17700
  Gene Name: thioredoxin domain containing 16
  Uniprot ID: Q9P2K2
  ENST ID: ENST00000281741
  CDS Start-End: 373-2850
cgagtcggtggcggctgcaggctgggagggagaagtgctacgcctttgcaggttggcgaagtggttccaggctacccggctagtctggcacggccccgtcttctgcctcctcctccgtcgcgtggcggcgggaactgttggccgcgcggcctcgggaacggcccaggtccccgcccgcaggtcccgggcagataacatagatcatcagtagaaaacttcttgaagttgttcaagaaaaatttgaaagtagcaaaatagaaaataaagaattaacagcagatacagaggacagcatggaagtgttgtcttaggaaacagaacacagcagtgaaaaaacagacaaaatccgctcagatacaactgcagctgataatgttttccggcttcaatgtctttagagttgggatctcttttgtcataatgtgcattttttacatgccaacagtaaactctttaccagaactgagtcctcagaaatattttagtacattgcaaccaggaaaagcctctttagcttatttttgtcaagctgattccccaagaacatctgtatttcttgaagaactgaatgaggctgttagacctctgcaggactatggaatttcagttgccaaggttaattgtgtcaaagaagaaatatcaagatactgtggaaaagaaaaggatttgatgaaagcatatttattcaagggcaacatattgctcagagaattccctactgacaccttgtttgatgtgaatgccattgtcgcccatgttctctttgctcttctttttagtgaagtgaaatatattaccaacctggaagaccttcagaacatagaaaatgctctgaaaggaaaagcaaatattatattctcatatgtaagagccattggaataccagagcacagagcagtcatggaagccgcttttgtgtatgggactacataccaatttgtcttaaccacagaaattgcccttttggaaagtattggctctgaggatgtggaatatgcacatctctacttttttcattgtaaactagtcttggacttgacccagcaatgtagaagaacactaatggaacagccattgactacactgaacattcacctgtttattaagacaatgaaagcacctctgttgactgaagttgctgaagatcctcaacaagtttcaactgtccatctccaactgggcttaccactggtttttattgttagccaacaggctacttatgaagctgatagaagaactgcagaatgggttgcttggcgtcttctgggaaaagcaggagttctactcttgttaagggactctttggaagtgaacattcctcaagatgctaatgtggtcttcaaaagagcagaagagggagttccagtggaatttttggtattacatgatgttgatttaataatatctcatgtggaaaataatatgcacattgaggaaatacaagaagatgaagacaatgacatggaaggtccagatatagatgttcaggatgatgaagtggcagaaactgttttcagagataggaagagaaaattacctttggaacttacagtggaactaacagaagaaacatttaatgcaacagtgatggcttctgacagcatagtactcttctatgctggttggcaagcagtatccatggcatttttgcaatcctatattgatgtggcagttaaactgaaaggcacatctactatgcttcttactagaataaactgtgcagattggtctgatgtatgtactaagcaaaatgttactgaatttcctatcataaagatgtacaagaaaggcgagaacccagtatcttatgctggaatgttaggaaccgaagatctcctaaaatttatccagctcaacaggatttcatatccagtgaatataacatcgatccaagaagcagaagaatatttaagtggggaattatataaagacctcatcttgtattctagtgtgtcagtattgggactatttagtccaaccatgaaaacagcaaaagaagattttagtgaagcaggaaactacctaaaaggatatgttatcactggaatttattctgaagaagatgttttgctactgtcaaccaaatatgctgcaagtcttccagccctgctgcttgccagacacacagaaggcaaaatagagagcatcccactagctagcacacatgcacaagacatagttcaaataataacagatgcactactggaaatgtttccggaaatcactgtggaaaatcttcccagttatttcagacttcagaaaccattattgattttgttcagtgatggcactgtaaatcctcagtataaaaaagcaatattgacactggtaaagcagaaatacttggattcatttactccatgctggttaaatctaaagaatactccagtggggagaggaatcttgagggcatattttgatcctctgcctccccttcctcttcttgttttggtgaatctgcattcaggtggccaagtatttgcatttccttcagaccaggctataattgaagaaaaccttgtattgtggctgaagaaattagaagcaggactagaaaatcatatcacaattttacctgctcaagaatggaaacctcctcttccagcttatgattttctaagtatgatagatgccgcaacatctcaacgtggcactaggaaagttcccaagtgtatgaaagaaacagatgtgcaggagaatgataaggaacaacatgaagataaatcggcagtcagaaaagaaccgattgaaactctgagaataaagcattggaatagaagtaattggtttaaagaagcagaaaaatcatttagacgtgataaagagttaggatgctcaaaagtgaactaattttatagggctgtggtttccaaaatttttttggcatgatagacttaatttatttccttaaagaataatattaaatcatttcaagtttgcagactagtgccatccaatagaattataatataagtcacatattttatttaaaattttctagtaactacattaaacaaagtaaaagtgagcagggcaaaataattttgatattacttttcacccagtagtatacccaaaatagcgaaatatagaaattattaatgagatattttacatccttttttgtaccaagtcttctaaatgcagtacatattttatacttactgcatttcttacttccgagtagccatatttcaagtgttccttgccacatgtggcctgtgactactgtattggacagttcagtactagacaaaaactagcataattaacttagttctagccatgatttctatttggattaaaattaaactctaatcacagttaactccacagtgcattcatgcagctgacagttatatttgttttattggagtcatgatattaaaatcagcgtttgtcaacctcaggggatatttagcaattgtcgggagacatttttgatgtcatgactagggcagttattgacatttagtgagtagaggccagggatcctgctaaataacctgcattggacagcgccccacaacaaagaattatcctgcccgaaatggtagtcgtgccaaggctgagtaaccttgtgttaaaagtaacctgtggcagactaggtttccagaatttcctggttctgctcacgtatcatgtttgaaaaaattttggctattaaagatatgtattagatggtcttatcctgattattacctggatacaacttgatcttttctaatattttcagaaagtgatgggataaccctagaagaggactcagaatgatatttatattttaagtgagtcttaaaacctcctcttatttctacaagttatatggctaaatttcagattgaacagggattcagcattctgccatctcctcatggaaagagaggctccctcatctgaagcgtctctgaaatctacccttgcaagcttcagacaaatcagttgatctccctgagccacacggcctcattctgtgagggagggaaagattagccaaagagttaattttcattccaaatcacttagctgttagactgatctgtttgtagcagttgtttgtctcatttttgctctgtgcattttttgagacatttgttgagaatattctatttggtgctctactgtatttttctttttaatatctacttgatatcttgttctttaaattttcttcacatatggtttgcctgatacaactgatttttataactgaaatttaaggaatctaacagctaaaactcagtaagtgcatatatttccttataacatagacccgttgctactctcagcaccctctcctcaattttttttcctgtagcatgtgatgcctgattaaactcattttcatttgcttttatttctaatatgggaacaatgagagtgaactctaaatataggttgtagtaataaaacatcattagcctaattattagaaaatgctaattaagtaccagcacatagaaacatgaaattgcttagtcattgtacctttgtcagcaattttgacagtcattaatgtttgtcataattttaaataaagtgtctgggtttcagaataccttca

SEQ ID NO: 190823 - DNA, 542 bp, Homo sapiens
  Payload ID: 17700
  Gene Name: thioredoxin domain containing 16
  ENST ID: ENST00000557374
  CDS Start-End: 485-542
gagtcggtggcggctgcaggctgggagggagaagtgctacgcctttgcaggttggcgaagtggttccaggctacccggctagtctggcacggccccgtcttctgcctcctcctccgtcgcgtggcggcgggaactgttggccgcgcggcctcgggaacggcccaggtccccgcccgcaggtcccgggcagactgaagttgctgaagatcctcaacaagtttcaactgtccatctccaactgggcttaccactggtttttattgttagccaacaggctacttatgaagctgatagaagaactgcagaatgggttgcttggcgtcttctgggaaaagcaggagttctactcttgttaagggactctttggaagtgaacattcctcaagatgctaatgtggtcttcaaaagagcagaagagggagttccagtggaatttttggtattacatgatgttgatttaataatatctcatgtggaaaataatatgcacattgaggaaatacaagaagatgaagacaatgacatggaaggtccagatatag

SEQ ID NO: 190824 - DNA, 566 bp, Homo sapiens
  Payload ID: 17700
  Gene Name: thioredoxin domain containing 16
  ENST ID: ENST00000555312
  CDS Start-End: 1-323
ctactatgcttcttactagaataaactgtgcagattggtctgatgtatgtactaagcaaaatgttactgaatttcctatcataaagatgtacaagaaaggcgagaacccagtatcttatgctggaatgttaggaaccgaagatctcctaaaatttatccagctcaacaggatttcatatccagtgaatataacatcgatccaagaagcagaagaatatttaagtggggaattatataaagacctcatcttgtattctagtgtgtcagtattgggactatttagtccaaccatgaaaacaggtaggaaaaaagtcaatgactaagttgtgaggaaatctgagagccaaagccaagattcaacataaaaatgagatccttaatttctgaagaactgagtactccactttctggctacaactacctacaaacacttacaaaaatggcaaaatgttactaaagcaaaagaagattttagtgaagcaggaaactacctaaaaggatatgttatcactggaatttattctgaagaagatgttttgctactgtcaaccaaatatgctgcaagt

SEQ ID NO: 190825 - DNA, 2219 bp, Homo sapiens
  Payload ID: 17701
  Gene Name: thioredoxin domain containing 17
  Uniprot ID: Q9BRA2
  ENST ID: ENST00000250101
  CDS Start-End: 326-697
aggccctgaactatttaaggatccaggtgttgcaaggcggtaagttttgcagccagtgtccatgaggtcggggctgggactagattagggtagatctaagcctgggcttgggagtgcagctagcgcagaaagatctgaggaactagagcaaaaagccatgcggatggattgtggtcgtcagaggctcccgtagtctttagcggcgctggcttccgcaggctccgccctctcttgcccacccggaaacagcctcgccccgcctacgcgggacccaaccgcggcgaccggacgtgcactcctccagtagcggctgcacgtcgtgccaatggcccgctatgaggaggtgagcgtgtccggcttcgaggagttccaccgggccgtggaacagcacaatggcaagaccattttcgcctactttacgggttctaaggacgccggggggaaaagctggtgccccgactgcgtgcaggctgaaccagtcgtacgagaggggctgaagcacattagtgaaggatgtgtgttcatctactgccaagtaggagaaaagccttattggaaagatccaaataatgacttcagaaaaaacttgaaagtaacagcagtgcctacactacttaagtatggaacacctcaaaaactggtagaatctgagtgtcttcaggccaacctggtggaaatgttgttctctgaagattaagattttaggatggcaatcatgtcttgatgtcctgatttgttctagtatcaataaactgtatacttgctttgaattcatgttagcaataaatgatgttaaaaaaactggcatgtgtctaaacaatagagtgctattaaaatgcccatgaacctttagtttgcctgtaatacatggatatttttaagatataaagaagtcttcagaaatagcagtaaaggctcaaaggaacgtattcttgaaggtgacggaaatacctaaaaactcctaaaggtgcagagcacaccttccaaatctctcaaaagatcagtatcttttattttaagttatctccatctgcaaagcaactgatgatattcctgaaaccccttctttgattttggaatgtagaacctaacctcaccactgaaggaaagcacatgacctctaatctagcctctgcttaattcaggcagttttgttttgtttaataaaaaacagactcctgagcactagaagcagtttgttttgcagctgtctcaatgtgctttacttgggatgaggcaggtggcggagagcggccggaaagactctataacccagttctgggaagaactccaagctgggagtcagtcacactgactctaccacttactagctgtgtaaccacaggcaagttactcaccccgtccaaacctcagttttctcttctataaacaaggttcttagaataaaatgagaattcaaggaagcacttaacatagcacctggtttgtggtacctcccaaatcaatggtagctttcccaaatgaacacaagtatttgaggctcctcatgtttgttctaaagtcaagagtccagttagtaactaaccactagttgtcctgccatgactaggtcaagtgaggccacagtgattcagtgattcttaaagccaccttgcaaagcaggtaatacagttatttcctgtcctgcagaattcaagaacctttatgcagttcctgtcctatgatttaaagaggtcagtgactccgctactctcactacatcttagagtagagtggtagagtagttgatctgagacagtaaggttccaggagatggtcttgccctactatatgtcaggaacagctagccttagaattcagtatacttggtggcccacccctaccccatgccccagtgccttatttggtctaaagcacctaacttttccattcttaatcagctgattatgctaaatgcgtaaaaaagaaaaacaccttacaaatccacagggaaatcaaagaacaattcaggtttaacagaaatagtctattaacaataaaaagttggatgaaaaagcacactaaaggttctaggggctaccataataaaggtagataggaagagttttcattttttttgtcttcactgtacaaaagaaatacattatatacatgtattaagtgcctcgtttgtatccagtttttcattttcccgatgtgttattttgctgttgctgctctgccaaggcttgctgaaggcgcatccgcttccgggaata

SEQ ID NO: 190826 - DNA, 616 bp, Homo sapiens
  Payload ID: 17701
  Gene Name: thioredoxin domain containing 17
  ENST ID: ENST00000574734
  CDS Start-End: 50-277
cgcggcgaccggacgtgcactcctccagtagcggctgcacgtcgtgccaatggcccgctatgaggaggtgagcgtgtccggcttcgaggagttccaccgggccgtggaacagcacaatggcaagaccattttcgcctactttacgggttctaaggacgccggggggaaaagctggtgccccgactgcgtgcaggctgaaccagtcgtacgagaggggctgaagcacattagtgaaggatgtgtgttcatctactgccaagtaggagaaaagccttagtaagtggcaatgtataatctacctcgcagacgtgcacaaattgcatacttaggcgggaagggcctcagggacttacttacccagtttgtcttacaagttggaaagatccaaataatgacttcagaaaaaacttgaaagtaacagcagtgcctacactacttaagtatggaacacctcaaaaactggtagaatctgagtgtcttcaggccaacctggtggaaatgttgttctctgaagattaagattttaggatggcaatcatgtcttgatgtcctgatttgttctagtatcaataaactgtatacttgctttgaattcatgttagcaataaatgatgtt

SEQ ID NO: 190827 - DNA, 459 bp, Homo sapiens
  Payload ID: 17701
  Gene Name: thioredoxin domain containing 17
  ENST ID: ENST00000570330
  CDS Start-End: 68-364
gcctacgcgggacccaaccgcggcgaccggacgtgcactcctccagtagcggctgcacgtcgtgccaatggcccgctatgaggaggtgagcgtgtccggcttcgaggagttccaccgggccgtggaacagcacaatgctgaaccagtcgtacgagaggggctgaagcacattagtgaaggatgtgtgttcatctactgccaagtaggagaaaagccttattggaaagatccaaataatgacttcagaaaaaacttgaaagtaacagcagtgcctacactacttaagtatggaacacctcaaaaactggtagaatctgagtgtcttcaggccaacctggtggaaatgttgttctctgaagattaagattttaggatggcaatcatgtcttgatgtcctgatttgttctagtatcaataaactgtatacttgctttgaattcatgttagcaataaatgatg

SEQ ID NO: 190828 - DNA, 746 bp, Homo sapiens
  Payload ID: 17701
  Gene Name: thioredoxin domain containing 17
  ENST ID: ENST00000574838
  CDS Start-End: 41-283
cggacgtgcactcctccagtagcggctgcacgtcgtgccaatggcccgctatgaggaggtgagcgtgtccggcttcgaggagttccaccgggccgtggaacagcacaatggcaagaccattttcgcctactttacgggttctaaggacgccggggggaaaagctggtgccccgactgcgtgcaggctgaaccagtcgtacgagaggggctgaagcacattagtgaaggatgtgtgttcatctactgccaagtaggagaaaagccttacctcaaaaactggtagaatctgagtgtcttcaggccaacctggtggaaatgttgttctctgaagattaagattttaggatggcaatcatgtcttgatgtcctgatttgttctagtatcaataaactgtatacttgctttgaattcatgttagcaataaatgatgttaaaaaaactggcatgtgtctaaacaatagagtgctattaaaatgcccatgaacctttagtttgcctgtaatacatggatatttttaagatataaagaagtcttcagaaatagcagtaaaggctcaaaggaacgtattcttgaaggtgacggaaatacctaaaaactcctaaaggtgcagagcacaccttccaaatctctcaaaagatcagtatcttttattttaagttatctccatctgcaaagcaactgatgatattcctgaaaccccttctttgattttggaatgtagaacctaacctcaccactgaagga

SEQ ID NO: 190829 - DNA, 1873 bp, Homo sapiens
  Payload ID: 17702
  Gene Name: thioredoxin domain containing 2 (spermatozoa)
  Uniprot ID: Q86VQ3
  ENST ID: ENST00000306084
  CDS Start-End: 200-1861
gaatgcgtagtcccagcctcagcacaggggagccaccttgaagctctcaaatatcactgttgtgaatacagagagggaaaaccaactgtaacgtgccacccaaatgtaagttttactcatattttgatgttaggatggatagcttggaaaaagttggagggtacggcctttactatgaggcatctatgaaggatcaggaatggatgtagacaaggaactaggaatggaaagtgttaaagctggagcctctggaaaaccagaaatgaggctgggcactcaggaagaaacaagtgaaggtgatgctaatgaaagctcattactagtcctgtccagcaacgtgcctctcctggccctagagttcttggaaatagcccaggccaaagagaaggcctttctccccatggtcagccacacgttccacatgcgcacagaggagtctgatgcctcacaggagggcgatgacctacccaagtcctcagcaaacaccagccatcccaagcaggatgacagccccaagtcctcagaagaaaccatccagcccaaggagggtgacatccccaaggccccagaagaaaccatccaatccaagaaggaggacctccccaagtcctcagaaaaagccatccagcccaaagagagtaacatccccaagtcctcagcaaaacccatccagcccaagctgggcaatattcccaaggcctcagtgaagcccagccagcccaaggagggtgacatccccaaggccccagaagaaaccatccaatccaagaaggaggacctccccaagtcctcagaagaagccatccagcccaaagagggtgacatccccaagtcctcagcaaaacccatccagcccaagctgggcaatattgccaagacctcagtgaagcccagccagcccaaggagagtgatatccccaagtccccagaagaaaccatccagcccaaggagggtgacatccccaagtcctcagcaaagcccatccagcccaagctgggcaatattcccaaggcctcagtgaagcccagccagcccaaggagggtgacatctccaagtccccagaagaagccatccagcccaaggagggtgacctccccaagtccctagaggaagccatccagcccaaggagggtgacatccccaagtccccagaagaagccatccagcccaaggagggtgacatccccaagtccctagaggaagccatccagcctaaggagggtgacatccccaagtccccagaagaaaccatccagcccaagaagggtgacatccccaagtccccagaagaagccatccagcccaaggagggtgacattcccaagtctccaaaacaagccatccagcccaaggagggtgacattcccaagtccctagaggaagccatcccacccaaggagattgacatccccaagtccccagaagaaaccatccagcccaaggaggatgacagccccaagtccctagaagaagccaccccatccaaggagggtgacatcctaaagcctgaagaagaaacaatggagttcccggagggggacaaggtgaaagtgatcctgagcaaggaggactttgaggcatcactgaaggaggccggggagaggctggtggctgtggacttctcggccacgtggtgtgggccctgcaggaccatcagaccattcttccatgccctgtctgtgaagcatgaggatgtggtgttcctggaggtggacgctgacaactgtgaggaggtggtgagagagtgcgccatcatgtgtgtcccaacctttcagttttataaaaaagaagaaaaggtggatgaactttgcggcgcccttaaggaaaaacttgaagcagtcattgcagaattaaagtaaacatgtattctg

SEQ ID NO: 190830 - DNA, 2830 bp, Homo sapiens
  Payload ID: 17702
  Gene Name: thioredoxin domain containing 2 (spermatozoa)
  Uniprot ID: Q86VQ3
  ENST ID: ENST00000357775
  CDS Start-End: 236-1696
cctcagtggtttgttgtgttctaggaaatgatgccagtgaatgcgtagtcccagcctcagcacaggggagccaccttgaagctctcaaatatcactgttgtgaatacagagagggaaaaccaactgtaacgtgccacccaaataaagctcattactagtcctgtccagcaacgtgcctctcctggccctagagttcttggaaatagcccaggccaaagagaaggcctttctccccatggtcagccacacgttccacatgcgcacagaggagtctgatgcctcacaggagggcgatgacctacccaagtcctcagcaaacaccagccatcccaagcaggatgacagccccaagtcctcagaagaaaccatccagcccaaggagggtgacatccccaaggccccagaagaaaccatccaatccaagaaggaggacctccccaagtcctcagaaaaagccatccagcccaaagagagtaacatccccaagtcctcagcaaaacccatccagcccaagctgggcaatattcccaaggcctcagtgaagcccagccagcccaaggagggtgacatccccaaggccccagaagaaaccatccaatccaagaaggaggacctccccaagtcctcagaagaagccatccagcccaaagagggtgacatccccaagtcctcagcaaaacccatccagcccaagctgggcaatattgccaagacctcagtgaagcccagccagcccaaggagagtgatatccccaagtccccagaagaaaccatccagcccaaggagggtgacatccccaagtcctcagcaaagcccatccagcccaagctgggcaatattcccaaggcctcagtgaagcccagccagcccaaggagggtgacatctccaagtccccagaagaagccatccagcccaaggagggtgacctccccaagtccctagaggaagccatccagcccaaggagggtgacatccccaagtccccagaagaagccatccagcccaaggagggtgacatccccaagtccctagaggaagccatccagcctaaggagggtgacatccccaagtccccagaagaaaccatccagcccaagaagggtgacatccccaagtccccagaagaagccatccagcccaaggagggtgacattcccaagtctccaaaacaagccatccagcccaaggagggtgacattcccaagtccctagaggaagccatcccacccaaggagattgacatccccaagtccccagaagaaaccatccagcccaaggaggatgacagccccaagtccctagaagaagccaccccatccaaggagggtgacatcctaaagcctgaagaagaaacaatggagttcccggagggggacaaggtgaaagtgatcctgagcaaggaggactttgaggcatcactgaaggaggccggggagaggctggtggctgtggacttctcggccacgtggtgtgggccctgcaggaccatcagaccattcttccatgccctgtctgtgaagcatgaggatgtggtgttcctggaggtggacgctgacaactgtgaggaggtggtgagagagtgcgccatcatgtgtgtcccaacctttcagttttataaaaaagaagaaaaggtggatgaactttgcggcgcccttaaggaaaaacttgaagcagtcattgcagaattaaagtaaacatgtattctgaaaacattgcagacagtcaggtgtttatagcttttgagttctcttttattatttacacaaagtgatcaggtataacaaaagtgtatgtccaaatggcactgcttgtacatgataatattaactctacccttttcaaaaaacagtccaagcattaaagtacattgcgactgtgtttctgttagtgggagagtataaaattagaaattcccatggtgaagactgctaagtcccatggtttcctatttttcaatcttgatatgtatttatttttcacttgtctttgaaaatttcacgcatttagtgtttgcagcaagactgaaaatttagataatttttctatagaggtagatgactgaaaggtgaatggaaacttcttttctcatgtcacacatctttggggattctgataagatatgtttggaaataaggaatttgaaagattcacatcttagctaacctccttcttgtgccggaagtgctacggaggccttgggaaattcagtgggttttccaagatctgatttgttggtgacggaaatgagatcaaggccgcttccagatttcaagtccagggctctacctactataatctacgctcacaaaatctcagacaagaggtcggaacttcaggtttctcggaggttgaagtcctctggatctttgctgcctttatgacatcagtgccctgatggcagagttcctggttcgtctccctggtaattgagttcataatacctagaccttcctctgacttttttacttaaatttgttcttattttcaatattgaacaagccagcctttaacatgactctaccagcttagacatataggcctagactttaatgaattaacctaatcacagtgctaccagagtcttgtttggacaacttagtgagccccagatgtctatgagcccaaagtcccaggtctgaaccatagacagaggcttagtccagagtgggtttttaaaaatgaataaaaccagcttcattaggtataattgatatacaaagaacagcacatatttaatggagggagttggatgagtttggatgtgttgcatatgcccttgattgccatctccaccatcaaagtaattaacaccttcattgcctccagaa

SEQ ID NO: 190831 - DNA, 1703 bp, Homo sapiens
  Payload ID: 17702
  Gene Name: thioredoxin domain containing 2 (spermatozoa)
  ENST ID: ENST00000536353
  CDS Start-End: 408-740
gataagatggttgattcacagaacccaggctggacgggacttgtggcgagcagtccagcacagcctcacagtgcagagcatgagctttggagcctgcccccaccctagctttgtgaccttaagtgagctacatagcttctcatgtgtaaactactcatcataatggttctgacctcagtggtttgttgtgttctaggaaatgatgccagtgaatgcgtagtcccagcctcagcacaggggagccaccttgaagctctcaaatatcactgttgtgaatacagagagggaaaaccaactgtaacgtgccacccaaataaagctcattactagtcctgtccagcaacgtgcctctcctggccctagagttcttggaaatagcccaggccaaagagaaggcctttctccccatggtcagccacacgttccacatgcgcacagaggagtctgatgcctcacaggagggcgatgacctacccaagtcctcagcaaacaccagccatcccaagcaggatgacagccccaagtcctcagaagaaaccatccagcccaaggagggtgacatccccaaggccccagaagaaaccatccaatccaagaaggaggacctccccaagtcctcagaaaaagccatccagcccaaagagagtaacatccccaagtcctcagcaaaacccatccagcccaagctgggcaatattcccaaggcctcagtgaagcccagccagcccaaggaggggtgacatccccaagtccccagaagaagccatccagcccaaggagggtgacatccccaagtccctagaggaagccatccagcctaaggagggtgacatccccaagtccccagaagaaaccatccagcccaagaagggtgacatccccaagtccccagaagaagccatccagcccaaggagggtgacattcccaagtctccaaaacaagccatccagcccaaggagggtgacattcccaagtccctagaggaagccatcccacccaaggagattgacatccccaagtccccagaagaaaccatccagcccaaggaggatgacagccccaagtccctagaagaagccaccccatccaaggagggtgacatcctaaagcctgaagaagaaacaatggagttcccggagggggacaaggtgaaagtgatcctgagcaaggaggactttgaggcatcactgaaggaggccggggagaggctggtggctgtggacttctcggccacgtggtgtgggccctgcaggaccatcagaccattcttccatgccctgtctgtgaagcatgaggatgtggtgttcctggaggtggacgctgacaactgtgaggaggtggtgagagagtgcgccatcatgtgtgtcccaacctttcagttttataaaaaagaagaaaaggtggatgaactttgcggcgcccttaaggaaaaacttgaagcagtcattgcagaattaaagtaaacatgtattctgaaaacattgcagacagtcaggtgtttatagcttttgagttctcttttattatttacacaaagtgatcaggtataacaaaagtgtatgtccaaatggcactgcttgtacatgataatattaactctacccttttcaaaaaacagtccaagcattaaagtacattgcgactgtgtttctgttagtgggagagtataaaattagaaattcccatggtgaagactgctaag

SEQ ID NO: 190832 - DNA, 571 bp, Homo sapiens
  Payload ID: 17702
  Gene Name: thioredoxin domain containing 2 (spermatozoa)
  ENST ID: ENST00000584255
  CDS Start-End: 322-571
gattcacagaacccaggctggacgggacttgtggcgagcagtccagcacagcctcacagtgcagagcatgagctttggagcctgcccccaccctagctttgtgaccttaagaaatgatgccagtgaatgcgtagtcccagcctcagcacaggggagccaccttgaagctctcaaatatcactgttgtgaatacagagagggaaaaccaactgtaacgtgccacccaaataaagctcattactagtcctgtccagcaacgtgcctctcctggccctagagttcttggaaatagcccaggccaaagagaaggcctttctccccatggtcagccacacgttccacatgcgcacagaggagtctgatgcctcacaggagggcgatgacctacccaagtcctcagcaaacaccagccatcccaagcaggatgacagccccaagtcctcagaagaaaccatccagcccaaggagggtgacatccccaaggccccagaagaaaccatccaatccaagaaggaggacctccccaagtcctcagaaaaagccatccagcccaaagagagtaacatcccca

SEQ ID NO: 190833 - DNA, 2066 bp, Homo sapiens
  Payload ID: 17702
  Gene Name: thioredoxin domain containing 2 (spermatozoa)
  Uniprot ID: Q86VQ3
  ENST ID: ENST00000611534
  CDS Start-End: 450-2066
gtaaagagaatgttggagctgggggatcctggagaaagatgataagatggttgattcacagaacccaggctggacgggacttgtggcgagcagtccagcacagcctcacagtgcagagcatgagctttggagcctgcccccaccctagctttgtgaccttaagtgagctacatagcttctcatgtgtaaactactcatcataatggttctgacctcagtggtttgttgtgttctaggaaatgatgccagtgaatgcgtagtcccagcctcagcacaggggagccaccttgaagctctcaaatatcactgttgtgaatacagagagggaaaaccaactgtaacgtgccacccaaatgtaagttttactcatattttgatgttaggatggatagcttggaaaaagttggagggtacggcctttactatgaggcatctatgaaggatcaggaatggatgtagacaaggaactaggaatggaaagtgttaaagctggagcctctggaaaaccagaaatgaggctgggcactcaggaagaaacaagtgaaggtgatgctaatgaaagctcattactagtcctgtccagcaacgtgcctctcctggccctagagttcttggaaatagcccaggccaaagagaaggcctttctccccatggtcagccacacgttccacatgcgcacagaggagtctgatgcctcacaggagggcgatgacctacccaagtcctcagcaaacaccagccatcccaagcaggatgacagccccaagtcctcagaagaaaccatccagcccaaggagggtgacatccccaaggccccagaagaaaccatccaatccaagaaggaggacctccccaagtcctcagaaaaagccatccagcccaaagagagtaacatccccaagtcctcagcaaaacccatccagcccaagctgggcaatattcccaaggcctcagtgaagcccagccagcccaaggagggtgacatccccaaggccccagaagaaaccatccaatccaagaaggaggacctccccaagtcctcagaagaagccatccagcccaaagagggtgacatccccaagtcctcagcaaaacccatccagcccaagctgggcaatattgccaagacctcagtgaagcccagccagcccaaggagagtgatatccccaagtccccagaagaaaccatccagcccaaggagggtgacatccccaagtcctcagcaaagcccatccagcccaagctgggcaatattcccaaggcctcagtgaagcccagccagcccaaggagggtgacatctccaagtccccagaagaagccatccagcccaaggagggtgacctccccaagtccctagaggaagccatccagcccaaggagggtgacatccccaagtccctagaggaagccatccagcctaaggagggtgacatccccaagtccccagaagaaaccatccagcccaagaagggtgacatccccaagtccccagaagaagccatccagcccaaggagggtgacattcccaagtctccaaaacaagccatccagcccaaggagggtgacattcccaagtccctagaggaagccatcccacccaaggagattgacatccccaagtccccagaagaaaccatccagcccaaggaggatgacagccccaagtccctagaagaagccaccccatccaaggagggtgacatcctaaagcctgaagaagaaacaatggagttcccggagggggacaaggtgaaagtgatcctgagcaaggaggactttgaggcatcactgaaggaggccggggagaggctggtggctgtggacttctcggccacgtggtgtgggccctgcaggaccatcagaccattcttccatgccctgtctgtgaagcatgaggatgtggtgttcctggaggtggacgctgacaactgtgaggaggtggtgagagagtgcgccatcatgtgtgtcccaacctttcagttttataaaaaagaagaaaaggtggatgaactttgcggcgcccttaaggaaaaacttgaagcagtcattgcagaattaaagtaa

SEQ ID NO: 190834 - DNA, 2964 bp, Homo sapiens
  Payload ID: 17703
  Gene Name: thioredoxin domain containing 5 (endoplasmic reticulum)
  Uniprot ID: Q8NBS9
  ENST ID: ENST00000379757
  CDS Start-End: 39-1337
ccggaggccgcggcgagagcgcgcccagccccgccgcgatgcccgcgcgcccaggacgcctcctcccgctgctggcccggccggcggccctgactgcgctgctgctgctgctgctgggccatggcggcggcgggcgctggggcgcccgggcccaggaggcggcggcggcggcggcggacgggccccccgcggcagacggcgaggacggacaggacccgcacagcaagcacctgtacacggccgacatgttcacgcacgggatccagagcgccgcgcacttcgtcatgttcttcgcgccctggtgtggacactgccagcggctgcagccgacttggaatgacctgggagacaaatacaacagcatggaagatgccaaagtctatgtggctaaagtggactgcacggcccactccgacgtgtgctccgcccagggggtgcgaggataccccaccttaaagcttttcaagccaggccaagaagctgtgaagtaccagggtcctcgggacttccagacactggaaaactggatgctgcagacactgaacgaggagccagtgacaccagagccggaagtggaaccgcccagtgcccccgagctcaagcaagggctgtatgagctctcagcaagcaactttgagctgcacgttgcacaaggcgaccactttatcaagttcttcgctccgtggtgtggtcactgcaaagccctggctccaacctgggagcagctggctctgggccttgaacattccgaaactgtcaagattggcaaggttgattgtacacagcactatgaactctgctccggaaaccaggttcgtggctatcccactcttctctggttccgagatgggaaaaaggtggatcagtacaagggaaagcgggatttggagtcactgagggagtacgtggagtcgcagctgcagcgcacagagactggagcgacggagaccgtcacgccctcagaggccccggtgctggcagctgagcccgaggctgacaagggcactgtgttggcactcactgaaaataacttcgatgacaccattgcagaaggaataaccttcatcaagttttatgctccatggtgtggtcattgtaagactctggctcctacttgggaggaactctctaaaaaggaattccctggtctggcgggggtcaagatcgccgaagtagactgcactgctgaacggaatatctgcagcaagtattcggtacgaggctaccccacgttattgcttttccgaggagggaagaaagtcagtgagcacagtggaggcagagaccttgactcgttacaccgctttgtcctgagccaagcgaaagacgaactttaggaacacagttggaggtcacctctcctgcccagctcccgcaccctgcgtttaggagttcagtcccacagaggccactgggttcccagtggtggctgttcagaaagcagaacatactaagcgtgaggtatcttctttgtgtgtgtgttttccaagccaacacactctacagattctttattaagttaagtttctctaagtaaatgtgtaactcatggtcactgtgtaaacattttcagtggcgatatatcccctttgaccttctcttgatgaaatttacatggtttcctttgagactaaaatagcgttgagggaaatgaaattgctggactatttgtggctcctgagttgagtgattttggtgaaagaaagcacatccaaagcatagtttacctgcccacgagttctggaaaggtggccttgtggcagtattgacgttcctctgatcttaaggtcacagttgactcaatactgtgttggtccgtagcatggagcagattgaaatgcaaaaacccacacctctggaagataccttcacggccgctgctggagcttctgttgctgtgaatacttctctcagtgtgagaggttagccgtgatgaaagcagcgttacttctgaccgtgcctgagtaagagaatgctgatgccataactttatgtgtcgatacttgtcaaatcagttactgttcaggggatccttctgtttctcacggggtgaaacatgtctttagttcctcatgttaacacgaagccagagcccacatgaactgttggatgtcttccttagaaagggtaggcatggaaaattccacgaggctcattctcagtatctcattaactcattgaaagattccagttgtatttgtcacctggggtgacaagaccagacaggctttcccaggcctgggtatccagggaggctctgcagccctgctgaagggccctaactagagttctagagtttctgattctgtttctcagtagtccttttagaggcttgctatacttggtctgcttcaaggaggtcgaccttctaatgtatgaagaatgggatgcatttgatctcaagaccaaagacagatgtcagtgggctgctctggccctggtgtgcacggctgtggcagctgttgatgccagtgtcctctaactcatgctgtccttgtgattaaacacctctatctcccttgggaataagcacatacaggcttaagctctaagatagataggtgtttgtccttttaccatcgagctacttcccataataaccactttgcatccaacactcttcacccacctcccatacgcaaggggatgtggatacttggcccaaagtaactggtggtaggaatcttagaaacaagaccacttatactgtctgtctgaggcagaagataacagcagcatctcgaccagcctctgccttaaaggaaatctttattaatcacgtatggttcacagataattctttttttaaaaaaacccaacctcctagagaagcacaactgtcaagagtcttgtacacacaacttcagctttgcatcacgagtcttgtattccaagaaaatcaaagtggtacaatttgtttgtttacactatgatactttctaaataaactctttttttttaaaa

SEQ ID NO: 190835 - DNA, 1301 bp, Homo sapiens
  Payload ID: 17703
  Gene Name: thioredoxin domain containing 5 (endoplasmic reticulum)
  Uniprot ID: Q8NBS9
  ENST ID: ENST00000473453
  CDS Start-End: 327-1301
aattcaaccgcctcttgcacctcggcaccgagggaggggaaggtggggtcgtcgccctttcgggcagccgggagtccaaatgtcaccccgcggtccctgcccagcgccccaaacttcctgtgccggccggacgcgcggcctgcccgtgggccacgtgcactcaccagagcggccttgctgctgccgcggccaccggggtcggctgggacagactgcgggcacgtccccttccagaggctttaactgaaaaatagaacccaggaaggtgtggacactgccagcggctgcagccgacttggaatgacctgggagacaaatacaacagcatggaagatgccaaagtctatgtggctaaagtggactgcacggcccactccgacgtgtgctccgcccagggggtgcgaggataccccaccttaaagcttttcaagccaggccaagaagctgtgaagtaccagggtcctcgggacttccagacactggaaaactggatgctgcagacactgaacgaggagccagtgacaccagagccggaagtggaaccgcccagtgcccccgagctcaagcaagggctgtatgagctctcagcaagcaactttgagctgcacgttgcacaaggcgaccactttatcaagttcttcgctccgtggtgtggtcactgcaaagccctggctccaacctgggagcagctggctctgggccttgaacattccgaaactgtcaagattggcaaggttgattgtacacagcactatgaactctgctccggaaaccaggttcgtggctatcccactcttctctggttccgagatgggaaaaaggtggatcagtacaagggaaagcgggatttggagtcactgagggagtacgtggagtcgcagctgcagcgcacagagactggagcgacggagaccgtcacgccctcagaggccccggtgctggcagctgagcccgaggctgacaagggcactgtgttggcactcactgaaaataacttcgatgacaccattgcagaaggaataaccttcatcaagttttatgctccatggtgtggtcattgtaagactctggctcctacttgggaggaactctctaaaaaggaattccctggtctggcgggggtcaagatcgccgaagtagactgcactgctgaacggaatatctgcagcaagtattcggtacgaggctaccccacgttattgcttttccgaggagggaagaaagtcagtgagcacagtggaggcagagaccttgactcgttacaccgctttgtcctgagccaagcgaaagacgaactttag

SEQ ID NO: 190836 - DNA, 1787 bp, Homo sapiens
  Payload ID: 17704
  Gene Name: thioredoxin domain containing 8 (spermatozoa)
  ENST ID: ENST00000374507
  CDS Start-End: 52-378
gatccaactaaaccaacaggggattttcatcagcacttccctggtgtaatcatggtacagattattaaagacacgaatgaatttaaaacatttttgacagctgccggacacaaactcgcagtggttcaattttcttcgaaacggtgtggtccctgcaaaaggatgtttcctgttttccatgagctggctgaaacttgtcacatcaaaacaatacccacatttcagatgttcaagaaaagccagaagggctccatctccaggcctacaccaaccagtgaactccatccccatcagaaatggacccttgactccagtcaagccaatccaagtcaaaccagagctaatttcaggactttgcttaagcagctaggtaaataaccttctcctttgatatcactggatttgaatttgggaagatatgagtctgaagctactacagcttgtcaccatgtaaaacctgaaaacgaatctaccacacagaagaaaacagagtcaagccaagagtactaatggcattgactgcaccctgaatctatccatgcctgaagcctacactatccccatagattcttcagctatgtaaactctgggttggtttctctgtcacttgcaacccaaaaaattctgatgaacatatctggtgttctcccaggctactctccttcatttcatggtgtaattgttaaaagagtagaatatatttgcagtttccaattctcattttccactcattccctcatctatttatctatttatctttctgtcctctctaaagtcaccaaggatctccctgcacctaatttaaatagccatttctcaattcttgattccttagctacacagaagcaccattaactaatgagcttctatattctggaaattttcttctcttttgactttatctctcatccctccctatgctctcctctggcttgtctcctgttatagtcaaatatatccgttttggatatctatctttttggttcaatccatttcccattctacctctctcctttagcaatgtcattcctacttctagttccatctataaatacttttttacttagacaattgcaatgccccctcctcaccctcaacttagcaccatatctctgttctccagatttgtgcacagctccctgtatggcatccttttttaacatgtgatgtcctccccctccattgcctatagaatcaaggctaaaccattgtatttaaggctggcattcaagtttctccataattttgacccaatctactgctccaagcctttctctgtttaactcagatcttcatgtatttttctcatactagtccaagcacctgaaggaggtcatgtctgatttgaaagctcagtgactagaagaatcccaagtggatagaaaatactcatgatgtgtgtgatgaatgagtgagtgcatgaatgaatgaatgaatgcttctgttttttccctgcatcccactgccagctcagcctctcctcctgattctgtcctggtaccaacctgattcagggcaagtttctctccagttcagtataattttctggttttattcctgctgctgctgatattgtttggtagctgctgccactcaacagtttttactccattttatgatgacacaagactctgagttctcaactgattttgtgtctatgctcttgaaccaattcaagctatgcttttgaggaaaggcatggccctgcttggtctcaattctgtatggggatggaagtgccctcaataagctggggagagaggacatttataaacaattatatctaa

SEQ ID NO: 190837 - DNA, 455 bp, Homo sapiens
  Payload ID: 17704
  Gene Name: thioredoxin domain containing 8 (spermatozoa)
  Uniprot ID: Q6A555
  ENST ID: ENST00000374510
  CDS Start-End: 13-360
cctggtgtaatcatggtacagattattaaagacacgaatgaatttaaaacatttttgacagctgccggacacaaactcgcagtggttcaattttcttcgaaacggtgtggtccctgcaaaaggatgtttcctgttttccatgctatgtctgtgaaataccaaaatgtattttttgctaatgtggatgtgaacaattctccggagctggctgaaacttgtcacatcaaaacaatacccacatttcagatgttcaagaaaagccagaaggtaaccctattctcaagaatcaaaagaataatttgctgttatagaagtggattcatgagcaacctgtgtcttgcagatgatggaaatgagtaggatttaacttttcaatcaggaataaaattccttaaagcctcaacattttcgcagcacttgaatcaataaatgtttcacctttgtgcatttgtgaa

SEQ ID NO: 190838 - DNA, 472 bp, Homo sapiens
  Payload ID: 17704
  Gene Name: thioredoxin domain containing 8 (spermatozoa)
  Uniprot ID: Q6A555
  ENST ID: ENST00000374511
  CDS Start-End: 89-472
aggcaggatactgtaataaataggagacagctacagtgatccaactaaaccaacaggggattttcatcagcacttccctggtgtaatcatggtacagattattaaagacacgaatgaatttaaaacatttttgacagctgccggacacaaactcgcagtggttcaattttcttcgaaacggtgtggtccctgcaaaaggatgtttcctgttttccatgctatgtctgtgaaataccaaaatgtattttttgctaatgtggatgtgaacaattctccggagctggctgaaacttgtcacatcaaaacaatacccacatttcagatgttcaagaaaagccagaaggtaaccctattctcaagaatcaaaagaataatttgctgttatagaagtggattcatgagcaacctgatttttgagttttgtggagccgatgctaaaaaattggaagccaagactcaagaattaatgtaa

SEQ ID NO: 190839 - DNA, 356 bp, Homo sapiens
  Payload ID: 17704
  Gene Name: thioredoxin domain containing 8 (spermatozoa)
  ENST ID: ENST00000423740
  CDS Start-End: 13-300
cctggtgtaatcatggtacagattattaaagacacgaatgaatttaaaacatttttgacagctgccggacacaaactcgcagtggttcaattttcttcgaaacggtgtggtccctgcaaaaggatgtttcctgttttccatgagctggctgaaacttgtcacatcaaaacaatacccacatttcagatgttcaagaaaagccagaaggtaaccctattctcaagaatcaaaagaataatttgctgttatagaagtggattcatgagcaacctgtgtcttgcagatgatggaaatgagtaggatttaacttttcaatcaggaataaaattccttaaagcctcaacattttcgcagca

SEQ ID NO: 190840 - DNA, 1637 bp, Homo sapiens
  Payload ID: 17705
  Gene Name: thioredoxin domain containing 9
  Uniprot ID: O14530
  ENST ID: ENST00000264255
  CDS Start-End: 257-937
cgggctgctgggcgggaggcgcacgcgcagaactgttcgccacccgaccgcccgccccttcctctggcgtccaaggtgatatcgcgcgaggttcgcagccaataaggaggcggatgtgacggcccgtttgcagccgccggcagctactgcaaggcaaaagccggagtggacgtgtcttttgaaactgctgctctttcacttctcaggcgtcaccgagagctcagcacccaggctgaactctgtaccatttggaagaatggaagctgatgcatctgttgacatgttttccaaagtcctggagcatcagctgcttcagactaccaaactggtggaagaacatttggattctgaaattcaaaaactggatcagatggatgaggatgaattggaacgccttaaagaaaagagactccaggcactaaggaaagctcaacagcagaaacaagaatggctttctaaaggacatggggaatacagagaaatccctagtgaaagagacttttttcaagaagtcaaggagagtgaaaatgtggtttgccatttctacagagactccacattcaggtgtaaaatactagacagacatctggcaatattgtccaagaaacacctcgagaccaaatttttgaagctgaatgtggaaaaagcacctttcctttgtgagagactgcatatcaaagtcattcccacactagcactgctaaaagatgggaaaacacaagattatgttgttgggtttactgacctaggaaatacagatgacttcaccacagaaactttagaatggaggctcggttcttctgacattcttaattacagtggaaatttaatggagccaccatttcagaaccaaaagaaatttggaacaaacttcacaaagctggaaaagaaaactatccgaggaaagaaatatgattcagactctgatgatgattagagctcaataattctttgtaaattgtctttttttttctgcttcagatttaaatgtgtttttaaaattctattaatgtctatacattggtcacctaaatactcatattctcgagttttatacagttgtatcacatcgaaaagtgtctttactgttttctgtgtggccatcatgtttaagttgaggaaaactcagttcttaaattatctgggaagggtctggattctctatttttgagattgactttatcacaatatgattcttacatctttataccatttacaattgtgttttagatctacagagttagaaattcgaaaactattccaggactaattcttaatcggcattatttatacaagaggtcaagtaacatttactagcgcaatactgcacttgtaaatgaattataaacgctcttctggaatatatttaaataaccattaaagaactgcttattcattctggacactgcatgttgatgttgaatcaactgatgccagcagaaagctattttgatttgtgaacatactgccttatttaaagggtcctgattgcttgtattttaagacattcattaaaaagaaaccaggaaacacttttgaaataacagcataaggaacttcactgtctctgctcaataaaatacctgtaactggaagtttatgtggaaattgtcataaaagcatacatccaacaaaaa

SEQ ID NO: 190841 - DNA, 568 bp, Homo sapiens
  Payload ID: 17705
  Gene Name: thioredoxin domain containing 9
  ENST ID: ENST00000409705
  CDS Start-End: 162-568
acagacaagaataaatatcttgatcactgacacatgctgtacaaataaaattaggaagtcaactctttccatcatgagtaacagaactcaatcgaatgtgacacacagaaatgtctcaaaaatctctagcacccaggctgaactctgtaccatttggaagaatggaagctgatgcatctgttgacatgttttccaaagtcctggagcatcagctgcttcagactaccaaactggtggaagaacatttggattctgaaattcaaaaactggatcagatggatgaggatgaattggaacgccttaaagaaaagagactccaggcactaaggaaagctcaacagcagaaacaagaatggctttctaaaggacatggggaatacagagaaatccctagtgaaagagacttttttcaagaagtcaaggagagtgaaaatgtggtttgccatttctacagagactccacattcaggtgtaaaatactagacagacatctggcaatattgtccaagaaacacctcgagaccaaatttttgaagctgaatgtggaaaaagcacctttcctttgtga

SEQ ID NO: 190842 - DNA, 1111 bp, Homo sapiens
  Payload ID: 17705
  Gene Name: thioredoxin domain containing 9
  Uniprot ID: O14530
  ENST ID: ENST00000409434
  CDS Start-End: 128-694
gcagccgccggcagctactgcaaggcaaaagccggagtggacgtgtcttttgaaactgctgctctttcacttctcaggcgtcaccgagagctcagcacccaggctgaactctgtaccatttggaagaatggaagctgatgcatctgttgacatgttttccaaagtcctggagcatcagctgcttcagactaccaaactggtggaagaacatttggattctgaaattcaaaaactggatcagatggatgaggatgaattggaacgccttaaagaaaagagactccaggcactaaggaaagctcaacagcagaaacaagaatggctttctaaaggacatggggaatacagagaaatccctagtgaaagagacttttttcaagaagtcaaggagagtgaaaatgtggtttgccatttctacagagactccacattcaggtgtaaaatactagacagacatctggcaatattgtccaagaaacacctcgagaccaaatttttgaagctgaatgtggaaaaagcacctttcctttgtgagagactgcatatcaaagtcattcccacactagcactgctaaaagatgggaaaacacaagattatgttgttgggtttactgacctaggaaatacagatgacttcaccacagaaactttagaatggaggctcggttcttctgacattcttaattacaggtaacttttaacaaaagaagagattgattttaattcatatatagttgatatttttacaaaagatttttgtattgtaacatttattttatgaaattaaggcattttggctgagatgtggaaagtttctcaaaggaaaagcatgtttttttgaagtgtgtaatattagcgtgattttacggcaaaatcagatttacagattaaactgatttaataggtaaaactgagtctcaccgtactcctgactataaaagttttcagcttaacgtatactattgacactaattttgtattaatctggaaacttaaaatggcaatccagtgttgactattccccaatttaagccagattgctcaaatgaattctgacttaagtgattctctttgataaaataaaaattaaaagcagactcttgcaaagaaa

SEQ ID NO: 190843 - DNA, 768 bp, Homo sapiens
  Payload ID: 17705
  Gene Name: thioredoxin domain containing 9
  ENST ID: ENST00000422767
  CDS Start-End: 33-227
cacccaggctgaactctgtaccatttggaagaatggaagctgatgcatctgttgacatgttttccaaagtcctggagcatcagctgcttcagactaccaaactggtggaagaacatttggattctgaaattcaaaaactggatcagatggatgaggatgaattggaacgccttaaagaaaagagactccaggcactaaggaaagctcaacagcagaaacaagtgtaaaatactagacagacatctggcaatattgtccaagaaacacctcgagaccaaatttttgaagctgaatgtggaaaaagcacctttcctttgtgagagactgcatatcaaagtcattcccacactagcactgctaaaagatgggaaaacacaagattatgttgttgggtttactgacctaggaaatacagatgacttcaccacagaaactttagaatggaggctcggttcttctgacattcttaattacagtggaaatttaatggagccaccatttcagaaccaaaagaaatttggaacaaacttcacaaagctggaaaagaaaactatccgaggaaagaaatatgattcagactctgatgatgattagagctcaataattctttgtaaattgtctttttttttctgcttcagatttaaatgtgtttttaaaattctattaatgtctatacattggtcacctaaatactcatattctcgagttttatacagttgtatcacatcgaaaagtgtctttactgttttctgtgtggccatcatgttt

SEQ ID NO: 190844 - DNA, 739 bp, Homo sapiens
  Payload ID: 17705
  Gene Name: thioredoxin domain containing 9
  ENST ID: ENST00000438680
  CDS Start-End: 128-352
gcagccgccggcagctactgcaaggcaaaagccggagtggacgtgtcttttgaaactgctgctctttcacttctcaggcgtcaccgagagctcagcacccaggctgaactctgtaccatttggaagaatggaagctgatgcatctgttgacatgttttccaaagtcctggagcatcagctgcttcagactaccaaactggtggaagaacatttggattctgaaattcaaaaactggatcagatggatgaggatgaattggaacgccttaaagaaaagagactccaggcactaaggaaagctcaacagcagaaacaagtaacctctctgccctgctttctgaaattgctataacagaatggctttctaaaggacatggggaatacagagaaatccctagtgaaagagacttttttcaagaagtcaaggagagtgaaaatgtggtttgccatttctacagagactccacattcaggtgtaaaatactagacagacatctggcaatattgtccaagaaacacctcgagaccaaatttttgaagctgaatgtggaaaaagcacctttcctttgtgagagactgcatatcaaagtcattcccacactagcactgctaaaagatgggaaaacacaagattatgttgttgggtttactgacctaggaaatacagatgacttcaccacagaaactttagaatggaggctcggttcttctgacattcttaattacaggtaacttttaa

SEQ ID NO: 190845 - DNA, 733 bp, Homo sapiens
  Payload ID: 17705
  Gene Name: thioredoxin domain containing 9
  ENST ID: ENST00000434323
  CDS Start-End: 180-548
gatatcgcgcgaggttcgcagccaataaggaggcggatgtgacggcccgtttgcagccgccggcagctactgcaaggcaaaagccggagtggacgtgtcttttgaaactgctgctctttcacttctcaggcgtcaccgagagctcagcacccaggctgaactctgtaccatttggaagaatggaagctgatgcatctgttgacatgttttccaaagtcctggagcatcagctgcttcagactaccaaactggtggaagaacatttggattctgaaattcaaaaactggatcagatggatgaggatgaattggaacgccttaaagaaaagagactccaggcactaaggaaagctcaacagcagaaacaagaatggctttctaaaggacatggggaatacagagaaatccctagtgaaagagacttttttcaagaagtcaaggagagtgaaaatgtggtttgccatttctacagagactccacattcagcgttgcatatttaggagtaagaagtttttcctcggtaatgctgttcagtttttcttcatgacttccaaatatggcaccatgtgtgcacttctgattcttgtgtaaaatactagacagacatctggcaatattgtccaagaaacacctcgagaccaaatttttgaagctgaatgtggaaaaagcacctttcctttgtgagagactgcatatcaaagtcattcccacactagcactgctaaaagatgg

SEQ ID NO: 190846 - DNA, 1225 bp, Homo sapiens
  Payload ID: 17706
  Gene Name: thioredoxin interacting protein
  Uniprot ID: Q9H3M7
  ENST ID: ENST00000425134
  CDS Start-End: 203-1213
atgtgtgcataagttgcttattctttgtctacttcctatttgagatgttagtagagaactgtcctgggtgaatctttcagtattgcagggcttggcaacttgctgcccgacaaaatacatcagaatttctctttaagaacaatatgggatggattaaaaaatatatatatgggatgaaattgggggtacttcaataccttgcatgccacccaagcattccttatcacacagatgcattttaagtgtaacagcaagcctaatggctactcgattttctttcccttcaggtgagaatgagatggtgatcatgagacctggaaacaaatatgagtacaagttcggctttgagcttcctcaggggcctctgggaacatccttcaaaggaaaatatgggtgtgtagactactgggtgaaggcttttcttgaccgcccgagccagccaactcaagagacaaagaaaaactttgaagtagtggatctggtggatgtcaatacccctgatttaatggcacctgtgtctgctaaaaaagaaaagaaagtttcctgcatgttcattcctgatgggcgggtgtctgtctctgctcgaattgacagaaaaggattctgtgaaggtgatgagatttccatccatgctgactttgagaatacatgttcccgaattgtggtccccaaagctgccattgtggcccgccacacttaccttgccaatggccagaccaaggtgctgactcagaagttgtcatcagtcagaggcaatcatattatctcagggacatgcgcatcatggcgtggcaagagccttcgggttcagaagatcaggccttctatcctgggctgcaacatccttcgagttgaatattccttactgatctatgttagcgttcctggatccaagaaggtcatccttgacctgcccctggtaattggcagcagatcaggtctaagcagcagaacatccagcatggccagccgaaccagctctgagatgagttgggtagatctgaacatccctgataccccagaagctcctccctgctatatggatgtcattcctgaagatcaccgattggagagcccaaccactcctctgctagatgacatggatggctctcaagacagccctatctttatgtatgcccctgagttcaagttcatgccaccaccgacttatactgaggtggatccctgcatcctcaacaacaatgtgcagtgagcatgtggaaga

SEQ ID NO: 190847 - DNA, 2926 bp, Homo sapiens
  Payload ID: 17706
  Gene Name: thioredoxin interacting protein
  Uniprot ID: Q9H3M7
  ENST ID: ENST00000582401
  CDS Start-End: 335-1510
gacgtttccgcctcctgcttgaaactaacccctctttttctccaaaggagtgcttgtggagatcggatcttttctccagcaattgggggaaagaaggctttttctctgaattagcttagtgtaaccagcggcgtatattttttaggcgccttttcgaaaacctagtagttaatattcatttgtttaaatcttattttatttttaagctcaaactgcttaagaataccttaattccttaaagtgaaataattttttgcaaaggggtttcctcgatttggagctttttttttcttccaccgtcatttctaactcttaaaaccaactcagttccatcatggtgatgttcaagaagatcaagtcttttgaggtggtctttaacgaccctgaaaaggtgtacggcagtggcgagaaggtggctggccgggtgatagtggaggtgtgtgaagttactcgtgtcaaagccgttaggatcctggcttgcggagtggctaaagtgctttggatgcagggatcccagcagtgcaaacagacttcggagtacctgcgctatgaagacacgcttcttctggaagaccagccaacaggtgagaatgagatggtgatcatgagacctggaaacaaatatgagtacaagttcggctttgagcttcctcaggggcctctgggaacatccttcaaaggaaaatatgggtgtgtagactactgggtgaaggcttttcttgaccgcccgagccagccaactcaagagacaaagaaaaactttgaagtagtggatctggtggatgtcaatacccctgatttaatggcacctgtgtctgctaaaaaagaaaagaaagtttcctgcatgttcattcctgatgggcgggtgtctgtctctgctcgaattgacagaaaaggattctgtgaaggtgatgagatttccatccatgctgactttgagaatacatgttcccgaattgtggtccccaaagctgccattgtggcccgccacacttaccttgccaatggccagaccaaggtgctgactcagaagttgtcatcagtcagaggcaatcatattatctcagggacatgcgcatcatggcgtggcaagagccttcgggttcagaagatcaggccttctatcctgggctgcaacatccttcgagttgaatattccttactgatctatgttagcgttcctggatccaagaaggtcatccttgacctgcccctggtaattggcagcagatcaggtctaagcagcagaacatccagcatggccagccgaaccagctctgagatgagttgggtagatctgaacatccctgataccccagaagctcctccctgctatatggatgtcattcctgaagatcaccgattggagagcccaaccactcctctgctagatgacatggatggctctcaagacagccctatctttatgtatgcccctgagttcaagttcatgccaccaccgacttatactgaggtggatccctgcatcctcaacaacaatgtgcagtgagcatgtggaagaaaagaagcagctttacctacttgtttctttttgtctctcttcctggacactcactttttcagagactcaacagtctctgcaatggagtgtgggtccaccttagcctctgacttcctaatgtaggaggtggtcagcaggcaatctcctgggccttaaaggatgcggactcatcctcagccagcgcccatgttgtgatacaggggtgtttgttggatgggtttaaaaataactagaaaaactcaggcccatccattttctcagatctccttgaaaattgaggccttttcgatagtttcgggtcaggtaaaaatggcctcctggcgtaagcttttcaaggttttttggaggctttttgtaaattgtgataggaactttggaccttgaacttacgtatcatgtggagaagagccaatttaacaaactaggaagatgaaaagggaaattgtggccaaaactttgggaaaaggaggttcttaaaatcagtgtttcccctttgtgcacttgtagaaaaaaaagaaaaaccttctagagctgatttgatggacaatggagagagctttccctgtgattataaaaaaggaagctagctgctctacggtcatctttgcttagagtatactttaacctggcttttaaagcagtagtaactgccccaccaaaggtcttaaaagccatttttggagcctattgcactgtgttctcctactgcaaatattttcatatgggaggatggttttctcttcatgtaagtccttggaattgattctaaggtgatgttcttagcactttaattcctgtcaaattttttgttctccccttctgccatcttaaatgtaagctgaaactggtctactgtgtctctagggttaagccaaaagacaaaaaaaattttactacttttgagattgccccaatgtacagaattatataattctaacgcttaaatcatgtgaaagggttgctgctgtcagccttgcccactgtgacttcaaacccaaggaggaactcttgatcaagatgcccaaccctgtgatcagaacctccaaatactgccatgagaaactagagggcaggtcttcataaaagccctttgaacccccttcctgccctgtgttaggagatagggatattggcccctcactgcagctgccagcacttggtcagtcactctcagccatagcactttgttcactgtcctgtgtcagagcactgagctccacccttttctgagagttattacagccagaaagtgtgggctgaagatggttggtttcatgtttttgtattatgtatctttttgtatggtaaagactatattttgtacttaaccagatatatttttaccccagatggggatattctttgtaaaaaatgaaaataaagtttttttaatggaaaaaaaaa

SEQ ID NO: 190848 - DNA, 4082 bp, Homo sapiens
  Payload ID: 17707
  Gene Name: thioredoxin reductase 1
  ENST ID: ENST00000354940
  CDS Start-End: 702-2198
agaccctcacgtgatgacaacagctagcaaagttctgtagctactgccttagggcatagtctaatttcttcagtaaaaacacacttattccaaatttggttccagaattgccttaaattgtttttgctctgttcttaggttgggggcggctatgagcaggcagaggatgtggtgtcacccaattaggagctctcagcttacgaggcaattagcataggttgccagggctgcacgaggagtggatttctgctttgtcattctgactctggcagttagcccgcccgctcggcgcagggcgtggcttctcgtagccattaggaaacagcaaccctttcacctcagttttcttcactccggcatttgcagcagagcgaaaggtggtcgagtcctgaaggagggcctgatgtcttcatcattctcaaattcttgtaagctctgcgtcgggtgaaaccagacaaagccgcgagcccagggatgggagcacgcgggggacggcctgccggcggggacgacagcattgcgcctgggtgcagcagtgtgcgtctcggggaagggaagatattttaaggcgtgtctgagcagacggggaggcttttccaaacccaggcagcttcgtggcgtgtgcggtttcgacccggtcacacaaagcttcagcatgtcatgtggcttatcaggagggcagacttcaaaagctactaaaaatgaacggccctgaagatcttcccaagtcctatgactatgaccttatcatcattggaggtggctcaggaggtctggcagctgctaaggaggcagcccaatatggcaagaaggtgatggtcctggactttgtcactcccacccctcttggaactagatggggtctcggaggaacatgtgtgaatgtgggttgcatacctaaaaaactgatgcatcaagcagctttgttaggacaagccctgcaagactctcgaaattatggatggaaagtcgaggagacagttaagcatgattgggacagaatgatagaagctgtacagaatcacattggctctttgaattggggctaccgagtagctctgcgggagaaaaaagtcgtctatgagaatgcttatgggcaatttattggtcctcacaggattaaggcaacaaataataaaggcaaagaaaaaatttattcagcagagagatttctcattgccactggtgaaagaccacgttacttgggcatccctggtgacaaagaatactgcatcagcagtgatgatcttttctccttgccttactgcccgggtaagaccctggttgttggagcatcctatgtcgctttggagtgcgctggatttcttgctggtattggtttagacgtcactgttatggttaggtccattcttcttagaggatttgaccaggacatggccaacaaaattggtgaacacatggaagaacatggcatcaagtttataagacagttcgtaccaattaaagttgaacaaattgaagcagggacaccaggccgactcagagtagtagctcagtccaccaatagtgaggaaatcattgaaggagaatataatacggtgatgctggcaataggaagagatgcttgcacaagaaaaattggcttagaaaccgtaggggtgaagataaatgaaaagactggaaaaatacctgtcacagatgaagaacagaccaatgtgccttacatctatgccattggcgatatattggaggataaggtggagctcaccccagttgcaatccaggcaggaagattgctggctcagaggctctatgcaggttccactgtcaagtgtgactatgaaaatgttccaaccactgtatttactcctttggaatatggtgcttgtggcctttctgaggagaaagctgtggagaagtttggggaagaaaatattgaggtttaccatagttacttttggccattggaatggacgattccgtcaagagataacaacaaatgttatgcaaaaataatctgtaatactaaagacaatgaacgtgttgtgggctttcacgtactgggtccaaatgctggagaagttacacaaggctttgcagctgcgctcaaatgtggactgaccaaaaagcagctggacagcacaattggaatccaccctgtctgtgcagaggtattcacaacattgtctgtgaccaagcgctctggggcaagcatcctccaggctggctgcggttaagccccagtgtggatgctgttgccaagactgcaaaccactggctcgtttccgtgcccaaatccaaggcgaagttttctagagggttcttgggctcttggcacctgcgtgtcctgtgcttaccaccgcccaaggcccccttggatctcttggataggagttggtgaatagaaggcaggcagcatcacactggggtcactgacagacttgaagctgacatttggcagggcatcgaagggatgcatccatgaagtcaccagtctcaagcccatgtggtaggcggtgatggaacaactgtcaaatcagttttagcatgacctttccttgtggattttcttattctcgttgtcaagttttctagggttgaatttttttcttttttctccatggtgttaatgatattagagatgaaaaacgttagcagttgatttttgtccaaaagcaagtcatggctagagtatccatgcaaggtgtcttgttgcatggaagggatagtttggctcccttggaggctatgtaggcttgtcccgggaaagagaactgtcctgcagctgaaatggactgttctttactgacctgctcagcagtttcttctctcatatattcccaaaacaagtacatctgcgatcaactctagccaaatttgcccctgtgtgctacatgatggatgattattattttaaggtctgtttaggaagggaaatggctacttggccagccattgcctggcatttggtagtatagtatgattctcaccattatttgtcatggaggcagacatacaccagaaatgggggagaaacagtacatatctttctgtctttagtttattgtgtgctggtctaagcaagctgagatcatttgcaatggaaaacacgtaacttgtttaaaagtttttctggtagctttagctttatgctaaaaaaaataatgacattgggtatctatttctttctaagactacattagtaggaaaataagtcttttcatgcttatgatttagctgttttgtggtaattgctttttaaaggaagttattaatatcataagttattattaatattttgaacacaggtggatgtgaaggattttcatttaaaaaccaagtggttttgactttttctgttgaatgaacaactgtgccttgtggaatttttgcagaagtgtttatgctttgttagcatttcaacttgcattattataaagaggtattaatgcctcagttatgtgtttgtcaatgtactggctgaggattctatctcagctgtcttttctaactgtgtaggttgagttttgaacacgtgcttgtggacatcaggcctcctgccagcagttcttgaagcttctttttcattcctgctactctacctgtatttctcagttgcagcactgagtggtcaaaatacatttctgggccacctcagggaacccatgcatctgcctggcatttaggcagcagagcccctgaccgtcccccacagggctctgcctcacgtcctcatctcatttggctgtgtaaagaaatgggaaaagggaaaaggagagagcaattgaggcagttgaccatattcagttttatttatttatttttaatttgtttttttctccaagtccaccagtctctgaaattagaacagtaggcggtatgagataatcaggcctaatcatgttgtgattctcttttcttagtggagtggaatgttctatccccacaagaaggattatatcttatagacttgtcttgttcagattctgtatttacccattttattgaaacatatactaagttccatgtatttttgttacaaatcttctgaaaaaaaacaaaacaatgtgaaacattaaaattaaaaggcattaataatatccacgtgtgccttcttactg

SEQ ID NO: 190849 - DNA, 4277 bp, Homo sapiens
  Payload ID: 17707
  Gene Name: thioredoxin reductase 1
  ENST ID: ENST00000388854
  CDS Start-End: 747-2393
agaccctcacgtgatgacaacagctagcaaagttctgtagctactgccttagggcatagtctaatttcttcagtaaaaacacacttattccaaatttggttccagaattgccttaaattgtttttgctctgttcttaggttgggggcggctatgagcaggcagaggatgtggtgtcacccaattaggagctctcagcttacgaggcaattagcataggttgccagggctgcacgaggagtggatttctgctttgtcattctgactctggcagttagcccgcccgctcggcgcagggcgtggcttctcgtagccattaggaaacagcaaccctttcacctcagttttcttcactccggcatttgcagcagagcgaaaggtggtcgagtcctgaaggagggcctgatgtcttcatcattctcaaattcttgtaagctctgcgtcgggtgaaaccagacaaagccgcgagcccagggatgggagcacgcgggggacggcctgccggcggggacgacagcattgcgcctgggtgcagcagtgtgcgtctcggggaagggaagatattttaaggcgtgtctgagcagacggggaggcttttccaaacccaggcagcttcgtggcgtgtgcggtttcgacccggtcacacaaagcttcagcatgtcatgtggtaggtgaggccggcgcctgtaggctggcggtttccttcctcttggtctttgtagagacagtttgcagaacagcggagaaaatggaggacggtcgggccctggaaggaacgctctcggaattggccgcggaaaccgatctgcccgttgtgtttgtgaaacagagaaagataggcggccatggtccaaccttgaaggcttatcaggagggcagacttcaaaagctactaaaaatgaacggccctgaagatcttcccaagtcctatgactatgaccttatcatcattggaggtggctcaggaggtctggcagctgctaaggaggcagcccaatatggcaagaaggtgatggtcctggactttgtcactcccacccctcttggaactagatggggtctcggaggaacatgtgtgaatgtgggttgcatacctaaaaaactgatgcatcaagcagctttgttaggacaagccctgcaagactctcgaaattatggatggaaagtcgaggagacagttaagcatgattgggacagaatgatagaagctgtacagaatcacattggctctttgaattggggctaccgagtagctctgcgggagaaaaaagtcgtctatgagaatgcttatgggcaatttattggtcctcacaggattaaggcaacaaataataaaggcaaagaaaaaatttattcagcagagagatttctcattgccactggtgaaagaccacgttacttgggcatccctggtgacaaagaatactgcatcagcagtgatgatcttttctccttgccttactgcccgggtaagaccctggttgttggagcatcctatgtcgctttggagtgcgctggatttcttgctggtattggtttagacgtcactgttatggttaggtccattcttcttagaggatttgaccaggacatggccaacaaaattggtgaacacatggaagaacatggcatcaagtttataagacagttcgtaccaattaaagttgaacaaattgaagcagggacaccaggccgactcagagtagtagctcagtccaccaatagtgaggaaatcattgaaggagaatataatacggtgatgctggcaataggaagagatgcttgcacaagaaaaattggcttagaaaccgtaggggtgaagataaatgaaaagactggaaaaatacctgtcacagatgaagaacagaccaatgtgccttacatctatgccattggcgatatattggaggataaggtggagctcaccccagttgcaatccaggcaggaagattgctggctcagaggctctatgcaggttccactgtcaagtgtgactatgaaaatgttccaaccactgtatttactcctttggaatatggtgcttgtggcctttctgaggagaaagctgtggagaagtttggggaagaaaatattgaggtttaccatagttacttttggccattggaatggacgattccgtcaagagataacaacaaatgttatgcaaaaataatctgtaatactaaagacaatgaacgtgttgtgggctttcacgtactgggtccaaatgctggagaagttacacaaggctttgcagctgcgctcaaatgtggactgaccaaaaagcagctggacagcacaattggaatccaccctgtctgtgcagaggtattcacaacattgtctgtgaccaagcgctctggggcaagcatcctccaggctggctgcggttaagccccagtgtggatgctgttgccaagactgcaaaccactggctcgtttccgtgcccaaatccaaggcgaagttttctagagggttcttgggctcttggcacctgcgtgtcctgtgcttaccaccgcccaaggcccccttggatctcttggataggagttggtgaatagaaggcaggcagcatcacactggggtcactgacagacttgaagctgacatttggcagggcatcgaagggatgcatccatgaagtcaccagtctcaagcccatgtggtaggcggtgatggaacaactgtcaaatcagttttagcatgacctttccttgtggattttcttattctcgttgtcaagttttctagggttgaatttttttcttttttctccatggtgttaatgatattagagatgaaaaacgttagcagttgatttttgtccaaaagcaagtcatggctagagtatccatgcaaggtgtcttgttgcatggaagggatagtttggctcccttggaggctatgtaggcttgtcccgggaaagagaactgtcctgcagctgaaatggactgttctttactgacctgctcagcagtttcttctctcatatattcccaaaacaagtacatctgcgatcaactctagccaaatttgcccctgtgtgctacatgatggatgattattattttaaggtctgtttaggaagggaaatggctacttggccagccattgcctggcatttggtagtatagtatgattctcaccattatttgtcatggaggcagacatacaccagaaatgggggagaaacagtacatatctttctgtctttagtttattgtgtgctggtctaagcaagctgagatcatttgcaatggaaaacacgtaacttgtttaaaagtttttctggtagctttagctttatgctaaaaaaaataatgacattgggtatctatttctttctaagactacattagtaggaaaataagtcttttcatgcttatgatttagctgttttgtggtaattgctttttaaaggaagttattaatatcataagttattattaatattttgaacacaggtggatgtgaaggattttcatttaaaaaccaagtggttttgactttttctgttgaatgaacaactgtgccttgtggaatttttgcagaagtgtttatgctttgttagcatttcaacttgcattattataaagaggtattaatgcctcagttatgtgtttgtcaatgtactggctgaggattctatctcagctgtcttttctaactgtgtaggttgagttttgaacacgtgcttgtggacatcaggcctcctgccagcagttcttgaagcttctttttcattcctgctactctacctgtatttctcagttgcagcactgagtggtcaaaatacatttctgggccacctcagggaacccatgcatctgcctggcatttaggcagcagagcccctgaccgtcccccacagggctctgcctcacgtcctcatctcatttggctgtgtaaagaaatgggaaaagggaaaaggagagagcaattgaggcagttgaccatattcagttttatttatttatttttaatttgtttttttctccaagtccaccagtctctgaaattagaacagtaggcggtatgagataatcaggcctaatcatgttgtgattctcttttcttagtggagtggaatgttctatccccacaagaaggattatatcttatagacttgtcttgttcagattctgtatttacccattttattgaaacatatactaagttccatgtatttttgttacaaatcttctgaaaaaaaacaaaacaatgtgaaacattaaaattaaaaggcattaataatatccacgtgtgccttcttactg

SEQ ID NO: 190850 - DNA, 3832 bp, Homo sapiens
  Payload ID: 17707
  Gene Name: thioredoxin reductase 1
  ENST ID: ENST00000397736
  CDS Start-End: 566-1948
agaccctcacgtgatgacaacagctagcaaagttctgtagctactgccttagggcatagtctaatttcttcagtaaaaacacacttattccaaatttggttccagaattgccttaaattgtttttgctctgttcttaggttgggggcggctatgagcaggcagaggatgtggtgtcacccaattaggagctctcagcttacgaggcaattagcataggttgccagggctgcacgaggagtggatttctgctttgtcattctgactctggcagttagcccgcccgctcggcgcagggcgtggcttctcgtagccattaggaaacagcaaccctttcacctcagttttcttcactccggcatttgcagcagagcgaaaggtggtcgagtcctgaaggagggcctgatgtcttcatcattctcaaattcttaggacggtcgggccctggaaggaacgctctcggaattggccgcggaaaccgatctgcccgttgtgtttgtgaaacagagaaagataggcggccatggtccaaccttgaaggaggcagcccaatatggcaagaaggtgatggtcctggactttgtcactcccacccctcttggaactagatggggtctcggaggaacatgtgtgaatgtgggttgcatacctaaaaaactgatgcatcaagcagctttgttaggacaagccctgcaagactctcgaaattatggatggaaagtcgaggagacagttaagcatgattgggacagaatgatagaagctgtacagaatcacattggctctttgaattggggctaccgagtagctctgcgggagaaaaaagtcgtctatgagaatgcttatgggcaatttattggtcctcacaggattaaggcaacaaataataaaggcaaagaaaaaatttattcagcagagagatttctcattgccactggtgaaagaccacgttacttgggcatccctggtgacaaagaatactgcatcagcagtgatgatcttttctccttgccttactgcccgggtaagaccctggttgttggagcatcctatgtcgctttggagtgcgctggatttcttgctggtattggtttagacgtcactgttatggttaggtccattcttcttagaggatttgaccaggacatggccaacaaaattggtgaacacatggaagaacatggcatcaagtttataagacagttcgtaccaattaaagttgaacaaattgaagcagggacaccaggccgactcagagtagtagctcagtccaccaatagtgaggaaatcattgaaggagaatataatacggtgatgctggcaataggaagagatgcttgcacaagaaaaattggcttagaaaccgtaggggtgaagataaatgaaaagactggaaaaatacctgtcacagatgaagaacagaccaatgtgccttacatctatgccattggcgatatattggaggataaggtggagctcaccccagttgcaatccaggcaggaagattgctggctcagaggctctatgcaggttccactgtcaagtgtgactatgaaaatgttccaaccactgtatttactcctttggaatatggtgcttgtggcctttctgaggagaaagctgtggagaagtttggggaagaaaatattgaggtttaccatagttacttttggccattggaatggacgattccgtcaagagataacaacaaatgttatgcaaaaataatctgtaatactaaagacaatgaacgtgttgtgggctttcacgtactgggtccaaatgctggagaagttacacaaggctttgcagctgcgctcaaatgtggactgaccaaaaagcagctggacagcacaattggaatccaccctgtctgtgcagaggtattcacaacattgtctgtgaccaagcgctctggggcaagcatcctccaggctggctgcggttaagccccagtgtggatgctgttgccaagactgcaaaccactggctcgtttccgtgcccaaatccaaggcgaagttttctagagggttcttgggctcttggcacctgcgtgtcctgtgcttaccaccgcccaaggcccccttggatctcttggataggagttggtgaatagaaggcaggcagcatcacactggggtcactgacagacttgaagctgacatttggcagggcatcgaagggatgcatccatgaagtcaccagtctcaagcccatgtggtaggcggtgatggaacaactgtcaaatcagttttagcatgacctttccttgtggattttcttattctcgttgtcaagttttctagggttgaatttttttcttttttctccatggtgttaatgatattagagatgaaaaacgttagcagttgatttttgtccaaaagcaagtcatggctagagtatccatgcaaggtgtcttgttgcatggaagggatagtttggctcccttggaggctatgtaggcttgtcccgggaaagagaactgtcctgcagctgaaatggactgttctttactgacctgctcagcagtttcttctctcatatattcccaaaacaagtacatctgcgatcaactctagccaaatttgcccctgtgtgctacatgatggatgattattattttaaggtctgtttaggaagggaaatggctacttggccagccattgcctggcatttggtagtatagtatgattctcaccattatttgtcatggaggcagacatacaccagaaatgggggagaaacagtacatatctttctgtctttagtttattgtgtgctggtctaagcaagctgagatcatttgcaatggaaaacacgtaacttgtttaaaagtttttctggtagctttagctttatgctaaaaaaaataatgacattgggtatctatttctttctaagactacattagtaggaaaataagtcttttcatgcttatgatttagctgttttgtggtaattgctttttaaaggaagttattaatatcataagttattattaatattttgaacacaggtggatgtgaaggattttcatttaaaaaccaagtggttttgactttttctgttgaatgaacaactgtgccttgtggaatttttgcagaagtgtttatgctttgttagcatttcaacttgcattattataaagaggtattaatgcctcagttatgtgtttgtcaatgtactggctgaggattctatctcagctgtcttttctaactgtgtaggttgagttttgaacacgtgcttgtggacatcaggcctcctgccagcagttcttgaagcttctttttcattcctgctactctacctgtatttctcagttgcagcactgagtggtcaaaatacatttctgggccacctcagggaacccatgcatctgcctggcatttaggcagcagagcccctgaccgtcccccacagggctctgcctcacgtcctcatctcatttggctgtgtaaagaaatgggaaaagggaaaaggagagagcaattgaggcagttgaccatattcagttttatttatttatttttaatttgtttttttctccaagtccaccagtctctgaaattagaacagtaggcggtatgagataatcaggcctaatcatgttgtgattctcttttcttagtggagtggaatgttctatccccacaagaaggattatatcttatagacttgtcttgttcagattctgtatttacccattttattgaaacatatactaagttccatgtatttttgttacaaatcttctgaaaaaaaacaaaacaatgtgaaacattaaaattaaaaggcattaataatatccacgtgtgccttcttactg

SEQ ID NO: 190851 - DNA, 3855 bp, Homo sapiens
  Payload ID: 17707
  Gene Name: thioredoxin reductase 1
  ENST ID: ENST00000429002
  CDS Start-End: 25-1971
agttcccacagggccttgtgcgacatgggctgcgccgagggcaaggcagtggcggcggccgccccaacggagctgcagacgaaaggcaagaacggcgatggccgccgtaggtcagctaaagatcatcaccctggtaaaactttgccagagaacccagcaggattcaccagcacggccactgcagactccagagccctgcttcaggcctatatagatggtcactctgtggtcatcttcagtaggtccacatgcacacgctgtactgaggtaaagaagttatttaaatctctgtgtgttccttattttgtgcttgaacttgatcaaacagaggacggtcgggccctggaaggaacgctctcggaattggccgcggaaaccgatctgcccgttgtgtttgtgaaacagagaaagataggcggccatggtccaaccttgaaggcttatcaggagggcagacttcaaaagctactaaaaatgaacggccctgaagatcttcccaagtcctatgactatgaccttatcatcattggaggtggctcaggaggtctggcagctgctaaggaggcagcccaatatggcaagaaggtgatggtcctggactttgtcactcccacccctcttggaactagatggggtctcggaggaacatgtgtgaatgtgggttgcatacctaaaaaactgatgcatcaagcagctttgttaggacaagccctgcaagactctcgaaattatggatggaaagtcgaggagacagttaagcatgattgggacagaatgatagaagctgtacagaatcacattggctctttgaattggggctaccgagtagctctgcgggagaaaaaagtcgtctatgagaatgcttatgggcaatttattggtcctcacaggattaaggcaacaaataataaaggcaaagaaaaaatttattcagcagagagatttctcattgccactggtgaaagaccacgttacttgggcatccctggtgacaaagaatactgcatcagcagtgatgatcttttctccttgccttactgcccgggtaagaccctggttgttggagcatcctatgtcgctttggagtgcgctggatttcttgctggtattggtttagacgtcactgttatggttaggtccattcttcttagaggatttgaccaggacatggccaacaaaattggtgaacacatggaagaacatggcatcaagtttataagacagttcgtaccaattaaagttgaacaaattgaagcagggacaccaggccgactcagagtagtagctcagtccaccaatagtgaggaaatcattgaaggagaatataatacggtgatgctggcaataggaagagatgcttgcacaagaaaaattggcttagaaaccgtaggggtgaagataaatgaaaagactggaaaaatacctgtcacagatgaagaacagaccaatgtgccttacatctatgccattggcgatatattggaggataaggtggagctcaccccagttgcaatccaggcaggaagattgctggctcagaggctctatgcaggttccactgtcaagtgtgactatgaaaatgttccaaccactgtatttactcctttggaatatggtgcttgtggcctttctgaggagaaagctgtggagaagtttggggaagaaaatattgaggtttaccatagttacttttggccattggaatggacgattccgtcaagagataacaacaaatgttatgcaaaaataatctgtaatactaaagacaatgaacgtgttgtgggctttcacgtactgggtccaaatgctggagaagttacacaaggctttgcagctgcgctcaaatgtggactgaccaaaaagcagctggacagcacaattggaatccaccctgtctgtgcagaggtattcacaacattgtctgtgaccaagcgctctggggcaagcatcctccaggctggctgcggttaagccccagtgtggatgctgttgccaagactgcaaaccactggctcgtttccgtgcccaaatccaaggcgaagttttctagagggttcttgggctcttggcacctgcgtgtcctgtgcttaccaccgcccaaggcccccttggatctcttggataggagttggtgaatagaaggcaggcagcatcacactggggtcactgacagacttgaagctgacatttggcagggcatcgaagggatgcatccatgaagtcaccagtctcaagcccatgtggtaggcggtgatggaacaactgtcaaatcagttttagcatgacctttccttgtggattttcttattctcgttgtcaagttttctagggttgaatttttttcttttttctccatggtgttaatgatattagagatgaaaaacgttagcagttgatttttgtccaaaagcaagtcatggctagagtatccatgcaaggtgtcttgttgcatggaagggatagtttggctcccttggaggctatgtaggcttgtcccgggaaagagaactgtcctgcagctgaaatggactgttctttactgacctgctcagcagtttcttctctcatatattcccaaaacaagtacatctgcgatcaactctagccaaatttgcccctgtgtgctacatgatggatgattattattttaaggtctgtttaggaagggaaatggctacttggccagccattgcctggcatttggtagtatagtatgattctcaccattatttgtcatggaggcagacatacaccagaaatgggggagaaacagtacatatctttctgtctttagtttattgtgtgctggtctaagcaagctgagatcatttgcaatggaaaacacgtaacttgtttaaaagtttttctggtagctttagctttatgctaaaaaaaataatgacattgggtatctatttctttctaagactacattagtaggaaaataagtcttttcatgcttatgatttagctgttttgtggtaattgctttttaaaggaagttattaatatcataagttattattaatattttgaacacaggtggatgtgaaggattttcatttaaaaaccaagtggttttgactttttctgttgaatgaacaactgtgccttgtggaatttttgcagaagtgtttatgctttgttagcatttcaacttgcattattataaagaggtattaatgcctcagttatgtgtttgtcaatgtactggctgaggattctatctcagctgtcttttctaactgtgtaggttgagttttgaacacgtgcttgtggacatcaggcctcctgccagcagttcttgaagcttctttttcattcctgctactctacctgtatttctcagttgcagcactgagtggtcaaaatacatttctgggccacctcagggaacccatgcatctgcctggcatttaggcagcagagcccctgaccgtcccccacagggctctgcctcacgtcctcatctcatttggctgtgtaaagaaatgggaaaagggaaaaggagagagcaattgaggcagttgaccatattcagttttatttatttatttttaatttgtttttttctccaagtccaccagtctctgaaattagaacagtaggcggtatgagataatcaggcctaatcatgttgtgattctcttttcttagtggagtggaatgttctatccccacaagaaggattatatcttatagacttgtcttgttcagattctgtatttacccattttattgaaacatatactaagttccatgtatttttgttacaaatcttctgaaaaaaaacaaaacaatgtgaaacattaaaattaaaaggcattaataatatccacgtgtgccttcttactg

SEQ ID NO: 190852 - DNA, 3930 bp, Homo sapiens
  Payload ID: 17707
  Gene Name: thioredoxin reductase 1
  Uniprot ID: Q16881
  ENST ID: ENST00000503506
  CDS Start-End: 575-2074
agaccctcacgtgatgacaacagctagcaaagttctgtagctactgccttagggcatagtctaatttcttcagtaaaaacacacttattccaaatttggttccagaattgccttaaattgtttttgctctgttcttaggttgggggcggctatgagcaggcagaggatgtggtgtcacccaattaggagctctcagcttacgaggcaattagcataggttgccagggctgcacgaggagtggatttctgctttgtcattctgactctggcagttagcccgcccgctcggcgcagggcgtggcttctcgtagccattaggaaacagcaaccctttcacctcagttttcttcactccggcatttgcagcagagcgaaaggtggtcgagtcctgaaggagggcctgatgtcttcatcattctcaaattcttaggacggtcgggccctggaaggaacgctctcggaattggccgcggaaaccgatctgcccgttgtgtttgtgaaacagagaaagataggcggccatggtccaaccttgaaggcttatcaggagggcagacttcaaaagctactaaaaatgaacggccctgaagatcttcccaagtcctatgactatgaccttatcatcattggaggtggctcaggaggtctggcagctgctaaggaggcagcccaatatggcaagaaggtgatggtcctggactttgtcactcccacccctcttggaactagatggggtctcggaggaacatgtgtgaatgtgggttgcatacctaaaaaactgatgcatcaagcagctttgttaggacaagccctgcaagactctcgaaattatggatggaaagtcgaggagacagttaagcatgattgggacagaatgatagaagctgtacagaatcacattggctctttgaattggggctaccgagtagctctgcgggagaaaaaagtcgtctatgagaatgcttatgggcaatttattggtcctcacaggattaaggcaacaaataataaaggcaaagaaaaaatttattcagcagagagatttctcattgccactggtgaaagaccacgttacttgggcatccctggtgacaaagaatactgcatcagcagtgatgatcttttctccttgccttactgcccgggtaagaccctggttgttggagcatcctatgtcgctttggagtgcgctggatttcttgctggtattggtttagacgtcactgttatggttaggtccattcttcttagaggatttgaccaggacatggccaacaaaattggtgaacacatggaagaacatggcatcaagtttataagacagttcgtaccaattaaagttgaacaaattgaagcagggacaccaggccgactcagagtagtagctcagtccaccaatagtgaggaaatcattgaaggagaatataatacggtgatgctggcaataggaagagatgcttgcacaagaaaaattggcttagaaaccgtaggggtgaagataaatgaaaagactggaaaaatacctgtcacagatgaagaacagaccaatgtgccttacatctatgccattggcgatatattggaggataaggtggagctcaccccagttgcaatccaggcaggaagattgctggctcagaggctctatgcaggttccactgtcaagtgtgactatgaaaatgttccaaccactgtatttactcctttggaatatggtgcttgtggcctttctgaggagaaagctgtggagaagtttggggaagaaaatattgaggtttaccatagttacttttggccattggaatggacgattccgtcaagagataacaacaaatgttatgcaaaaataatctgtaatactaaagacaatgaacgtgttgtgggctttcacgtactgggtccaaatgctggagaagttacacaaggctttgcagctgcgctcaaatgtggactgaccaaaaagcagctggacagcacaattggaatccaccctgtctgtgcagaggtattcacaacattgtctgtgaccaagcgctctggggcaagcatcctccaggctggctgctgaggttaagccccagtgtggatgctgttgccaagactgcaaaccactggctcgtttccgtgcccaaatccaaggcgaagttttctagagggttcttgggctcttggcacctgcgtgtcctgtgcttaccaccgcccaaggcccccttggatctcttggataggagttggtgaatagaaggcaggcagcatcacactggggtcactgacagacttgaagctgacatttggcagggcatcgaagggatgcatccatgaagtcaccagtctcaagcccatgtggtaggcggtgatggaacaactgtcaaatcagttttagcatgacctttccttgtggattttcttattctcgttgtcaagttttctagggttgaatttttttcttttttctccatggtgttaatgatattagagatgaaaaacgttagcagttgatttttgtccaaaagcaagtcatggctagagtatccatgcaaggtgtcttgttgcatggaagggatagtttggctcccttggaggctatgtaggcttgtcccgggaaagagaactgtcctgcagctgaaatggactgttctttactgacctgctcagcagtttcttctctcatatattcccaaaacaagtacatctgcgatcaactctagccaaatttgcccctgtgtgctacatgatggatgattattattttaaggtctgtttaggaagggaaatggctacttggccagccattgcctggcatttggtagtatagtatgattctcaccattatttgtcatggaggcagacatacaccagaaatgggggagaaacagtacatatctttctgtctttagtttattgtgtgctggtctaagcaagctgagatcatttgcaatggaaaacacgtaacttgtttaaaagtttttctggtagctttagctttatgctaaaaaaaataatgacattgggtatctatttctttctaagactacattagtaggaaaataagtcttttcatgcttatgatttagctgttttgtggtaattgctttttaaaggaagttattaatatcataagttattattaatattttgaacacaggtggatgtgaaggattttcatttaaaaaccaagtggttttgactttttctgttgaatgaacaactgtgccttgtggaatttttgcagaagtgtttatgctttgttagcatttcaacttgcattattataaagaggtattaatgcctcagttatgtgtttgtcaatgtactggctgaggattctatctcagctgtcttttctaactgtgtaggttgagttttgaacacgtgcttgtggacatcaggcctcctgccagcagttcttgaagcttctttttcattcctgctactctacctgtatttctcagttgcagcactgagtggtcaaaatacatttctgggccacctcagggaacccatgcatctgcctggcatttaggcagcagagcccctgaccgtcccccacagggctctgcctcacgtcctcatctcatttggctgtgtaaagaaatgggaaaagggaaaaggagagagcaattgaggcagttgaccatattcagttttatttatttatttttaatttgtttttttctccaagtccaccagtctctgaaattagaacagtaggcggtatgagataatcaggcctaatcatgttgtgattctcttttcttagtggagtggaatgttctatccccacaagaaggattatatcttatagacttgtcttgttcagattctgtatttacccattttattgaaacatatactaagttccatgtatttttgttacaaatcttctgaaaaaaaacaaaacaatgtgaaacattaaaattaaaaggcatt

SEQ ID NO: 190853 - DNA, 577 bp, Homo sapiens
  Payload ID: 17707
  Gene Name: thioredoxin reductase 1
  ENST ID: ENST00000526266
  CDS Start-End: 368-577
gaagaagctaaatcaagcctctgagtttcaccttggaagggcctggcaggacctggcagtggttgcctgtttgtttagagggagtgtggcttctgctggctgttaggagcccgcaacgctctcagctgagagtgcttcaatctggcattatccaaagaacagagcgaaaggtggtcgagtcctgaaggagggcctgatgtcttcatcattctcaaattcttaggacggtcgggccctggaaggaacgctctcggaattggccgcggaaaccgatctgcccgttgtgtttgtgaaacagagaaagataggcggccatggtccaaccttgaaggcttatcaggagggcagacttcaaaagctactaaaaatgaacggccctgaagatcttcccaagtcctatgactatgaccttatcatcattggaggtggctcaggaggtctggcagctgctaaggaggcagcccaatatggcaagaaggtgatggtcctggactttgtcactcccacccctcttggaactagatggggtctcggaggaacatgtgtgaatgtgggttgcatacctaaaaaactgatg

SEQ ID NO: 190854 - DNA, 728 bp, Homo sapiens
  Payload ID: 17707
  Gene Name: thioredoxin reductase 1
  ENST ID: ENST00000531691
  CDS Start-End: 312-728
tttctgctttgtcattctgactctggcagttagcccgcccgctcggcgcagggcgtggcttctcgtagccattaggaaacagcaaccctttcacctcagttttcttcactccggcatttgcagcagagcgaaaggtggtcgagtcctgaaggagggcctgatgtcttcatcattctcaaattcttaggacggtcgggccctggaaggaacgctctcggaattggccgcggaaaccgatctgcccgttgtgtttgtgaaacagagaaagataggcggccatggtccaaccttgaagagatggaggtctcattatgttgtccaggctggtcttgaactcctgggctcaagcgatcatccggcctcggcctcctaaagtgctgggactgcaggtcacgacatttagtgaggcttatcaggagggcagacttcaaaagctactaaaaatgaacggccctgaagatcttcccaagtcctatgactatgaccttatcatcattggaggtggctcaggaggtctggcagctgctaaggaggcagcccaatatggcaagaaggtgatggtcctggactttgtcactcccacccctcttggaactagatggggtctcggaggaacatgtgtgaatgtgggttgcatacctaaaaaactgatgcatcaagcagctttgttaggacaagccctgcaagactctcgaaattatggatggaaagtcgaggagacaggtatg

SEQ ID NO: 190855 - DNA, 557 bp, Homo sapiens
  Payload ID: 17707
  Gene Name: thioredoxin reductase 1
  ENST ID: ENST00000529751
  CDS Start-End: 424-557
ttttcttcactccggcatttgcagcagagcgaaaggtggtcgagtcctgaaggagggcctgatgtcttcatcattctcaaattcttgtaagctctgcgtcgggtgaaaccagacaaagccgcgagcccagggatgggagcacgcgggggacggcctgccggcggggacgacagcattgcgcctgggtgcagcagtgtgcgtctcggggaagggaagatattttaaggcgtgtctgagcagacggggaggcttttccaaacccaggcagcttcgtggcgtgtgcggtttcgacccggtcacacaaagcttcagcatgtcatgtggtaggttgaacaaattgaagcagggacaccaggccgactcagagtagtagctcagtccaccaatagtgaggaaatcattgaaggagaatataatacggtgatgctggcaataggaagagatgcttgcacaagaaaaattggcttagaaaccgtaggggtgaagataaatgaaaagactggaaaaatacctgtcacagatgaagaacagaccaatgtgccttacatctatgccat

SEQ ID NO: 190856 - DNA, 1847 bp, Homo sapiens
  Payload ID: 17707
  Gene Name: thioredoxin reductase 1
  ENST ID: ENST00000526950
  CDS Start-End: 79-1785
actgtcagagtggtgcagtcttgcccccactgttgctggtttccaggtgttctcccttcagtccctgagccactacgtatgcccgccatgctgccaacaggtagccacagtgctgtgcttcctccttcacattgctccaccgcacccccttccacatcccaagaaccttcttcttccgctgaccccaagctctgcctttcaccccctacatctgatagtaggcaagagagaaatgtgcagtttgggctggcttatcaggagggcagacttcaaaagctactaaaaatgaacggccctgaagatcttcccaagtcctatgactatgaccttatcatcattggaggtggctcaggaggtctggcagctgctaaggaggcagcccaatatggcaagaaggtgatggtcctggactttgtcactcccacccctcttggaactagatggggtctcggaggaacatgtgtgaatgtgggttgcatacctaaaaaactgatgcatcaagcagctttgttaggacaagccctgcaagactctcgaaattatggatggaaagtcgaggagacagttaagcatgattgggacagaatgatagaagctgtacagaatcacattggctctttgaattggggctaccgagtagctctgcgggagaaaaaagtcgtctatgagaatgcttatgggcaatttattggtcctcacaggattaaggcaacaaataataaaggcaaagaaaaaatttattcagcagagagatttctcattgccactggtgaaagaccacgttacttgggcatccctggtgacaaagaatactgcatcagcagtgatgatcttttctccttgccttactgcccgggtaagaccctggttgttggagcatcctatgtcgctttggagtgcgctggatttcttgctggtattggtttagacgtcactgttatggttaggtccattcttcttagaggatttgaccaggacatggccaacaaaattggtgaacacatggaagaacatggcatcaagtttataagacagttcgtaccaattaaagttgaacaaattgaagcagggacaccaggccgactcagagtagtagctcagtccaccaatagtgaggaaatcattgaaggagaatataatacggtgatgctggcaataggaagagatgcttgcacaagaaaaattggcttagaaaccgtaggggtgaagataaatgaaaagactggaaaaatacctgtcacagatgaagaacagaccaatgtgccttacatctatgccattggcgatatattggaggataaggtggagctcaccccagttgcaatccaggcaggaagattgctggctcagaggctctatgcaggttccactgtcaagtgtgactatgaaaatgttccaaccactgtatttactcctttggaatatggtgcttgtggcctttctgaggagaaagctgtggagaagtttggggaagaaaatattgaggtttaccatagttacttttggccattggaatggacgattccgtcaagagataacaacaaatgttatgcaaaaataatctgtaatactaaagacaatgaacgtgttgtgggctttcacgtactgggtccaaatgctggagaagttacacaaggctttgcagctgcgctcaaatgtggactgaccaaaaagcagctggacagcacaattggaatccaccctgtctgtgcagaggtattcacaacattgtctgtgaccaagcgctctggggcaagcatcctccaggctggctgctgaggttaagccccagtgtggatgctgttgccaagactgcaaaccactggctcgtttccgtgcccaaatcc

SEQ ID NO: 190857 - DNA, 1933 bp, Homo sapiens
  Payload ID: 17707
  Gene Name: thioredoxin reductase 1
  Uniprot ID: Q16881
  ENST ID: ENST00000524698
  CDS Start-End: 211-1710
aggctggcggtttccttcctcttggtctttgtagagacagtttgcagaacagcggagaaaatggaggacggtcgggccctggaaggaacgctctcggaattggccgcggaaaccgatctgcccgttgtgtttgtgaaacagagaaagataggcggccatggtccaaccttgaaggcttatcaggagggcagacttcaaaagctactaaaaatgaacggccctgaagatcttcccaagtcctatgactatgaccttatcatcattggaggtggctcaggaggtctggcagctgctaaggaggcagcccaatatggcaagaaggtgatggtcctggactttgtcactcccacccctcttggaactagatggggtctcggaggaacatgtgtgaatgtgggttgcatacctaaaaaactgatgcatcaagcagctttgttaggacaagccctgcaagactctcgaaattatggatggaaagtcgaggagacagttaagcatgattgggacagaatgatagaagctgtacagaatcacattggctctttgaattggggctaccgagtagctctgcgggagaaaaaagtcgtctatgagaatgcttatgggcaatttattggtcctcacaggattaaggcaacaaataataaaggcaaagaaaaaatttattcagcagagagatttctcattgccactggtgaaagaccacgttacttgggcatccctggtgacaaagaatactgcatcagcagtgatgatcttttctccttgccttactgcccgggtaagaccctggttgttggagcatcctatgtcgctttggagtgcgctggatttcttgctggtattggtttagacgtcactgttatggttaggtccattcttcttagaggatttgaccaggacatggccaacaaaattggtgaacacatggaagaacatggcatcaagtttataagacagttcgtaccaattaaagttgaacaaattgaagcagggacaccaggccgactcagagtagtagctcagtccaccaatagtgaggaaatcattgaaggagaatataatacggtgatgctggcaataggaagagatgcttgcacaagaaaaattggcttagaaaccgtaggggtgaagataaatgaaaagactggaaaaatacctgtcacagatgaagaacagaccaatgtgccttacatctatgccattggcgatatattggaggataaggtggagctcaccccagttgcaatccaggcaggaagattgctggctcagaggctctatgcaggttccactgtcaagtgtgactatgaaaatgttccaaccactgtatttactcctttggaatatggtgcttgtggcctttctgaggagaaagctgtggagaagtttggggaagaaaatattgaggtttaccatagttacttttggccattggaatggacgattccgtcaagagataacaacaaatgttatgcaaaaataatctgtaatactaaagacaatgaacgtgttgtgggctttcacgtactgggtccaaatgctggagaagttacacaaggctttgcagctgcgctcaaatgtggactgaccaaaaagcagctggacagcacaattggaatccaccctgtctgtgcagaggtattcacaacattgtctgtgaccaagcgctctggggcaagcatcctccaggctggctgctgaggttaagccccagtgtggatgctgttgccaagactgcaaaccactggctcgtttccgtgcccaaatccaaggcgaagttttctagagggttcttgggctcttggcacctgcgtgtcctgtgcttaccaccgcccaaggcccccttggatctcttggataggagttggtgaatagaaggcaggcagcatcacactggggtcactgacagacttgaagctgacatttggca

SEQ ID NO: 190858 - DNA, 554 bp, Homo sapiens
  Payload ID: 17707
  Gene Name: thioredoxin reductase 1
  ENST ID: ENST00000531689
  CDS Start-End: 339-554
attaggaaacagcaaccctttcacctcagttttcttcactccggcatttgcagcagagcgaaaggtggtcgagtcctgaaggagggcctgatgtcttcatcattctcaaattcttaggacggtcgggccctggaaggaacgctctcggaattggccgcggaaaccgatctgcccgttgtgtttgtgaaacagagaaagataggcggccatggtccaaccttgaaggggtaggggacccggaaaccccagggtctggaggagagcaaccaggaagctcttggggtgacttcgttttccttcaggcttatcaggagggcagacttcaaaagctactaaaaatgaacggccctgaagatcttcccaagtcctatgactatgaccttatcatcattggaggtggctcaggaggtctggcagctgctaaggaggcagcccaatatggcaagaaggtgatggtcctggactttgtcactcccacccctcttggaactagatggggtctcggaggaacatgtgtgaatgtgggttgcatacctaaaaaactgatgcatcaa

SEQ ID NO: 190859 - DNA, 786 bp, Homo sapiens
  Payload ID: 17707
  Gene Name: thioredoxin reductase 1
  ENST ID: ENST00000527335
  CDS Start-End: 260-786
accttacacgctccgctctgcttttgtgccacacagaggacggtcgggccctggaaggaacgctctcggaattggccgcggaaaccgatctgcccgttgtgtttgtgaaacagagaaagataggcggccatggtccaaccttgaaggggtaggggacccggaaaccccagggtctggaggagagcaaccaggaagctcttggggtgacttcgttttccttcaggcttatcaggagggcagacttcaaaagctactaaaaatgaacggccctgaagatcttcccaagtcctatgactatgaccttatcatcattggaggtggctcaggaggtctggcagctgctaaggaggcagcccaatatggcaagaaggtgatggtcctggactttgtcactcccacccctcttggaactagatggggtctcggaggaacatgtgtgaatgtgggttgcatacctaaaaaactgatgcatcaagcagctttgttaggacaagccctgcaagactctcgaaattatggatggaaagtcgaggagacagttaagcatgattgggacagaatgatagaagctgtacagaatcacattggctctttgaattggggctaccgagtagctctgcgggagaaaaaagtcgtctatgagaatgcttatgggcaatttattggtcctcacaggattaaggcaacaaataataaaggcaaagaaaaaatttattcagcagagagatttctcattgccactggtgaaagaccacgttacttgggcatccctggtgacaaagaata

SEQ ID NO: 190860 - DNA, 629 bp, Homo sapiens
  Payload ID: 17707
  Gene Name: thioredoxin reductase 1
  ENST ID: ENST00000528079
  CDS Start-End: 342-629
agagcgaaaggtggtcgagtcctgaaggagggcctgatgtcttcatcattctcaaattcttaggacggtcgggccctggaaggaacgctctcggaattggccgcggaaaccgatctgcccgttgtgtttgtgaaacagagaaagataggcggccatggtccaaccttgaagtgctttgtattgaaggaggaaccttggccataatgccagttgatgactactggctgtgtttaccagcctcttgtgctagaccttttgtgcagactgtcagagtggtgcagtcttgcccccactgttgctggtttccaggtgttctcccttcagtccctgagccactacgtatgcccgccatgctgccaacaggtagccacagtgctgtgcttcctccttcacattgctccaccgcacccccttccacatcccaagaaccttcttcttccgctgaccccaagctctgcctttcaccccctacatctgatagtaggcaagagagaaatgtgcagtttgggctggcttatcaggagggcagacttcaaaagctactaaaaatgaacggccctgaagatcttcccaagtcctatgactatgaccttatcatcattggaggtggctcaggaggtctggcagct

SEQ ID NO: 190861 - DNA, 400 bp, Homo sapiens
  Payload ID: 17707
  Gene Name: thioredoxin reductase 1
  ENST ID: ENST00000526580
  CDS Start-End: 90-400
aggtggtcgagtcctgaaggagggcctgatgtcttcatcattctcaaattcttgcttatcaggagggcagacttcaaaagctactaaaaatgaacggccctgaagatcttcccaagtcctatgactatgaccttatcatcattggaggtggctcaggaggtctggcagctgctaaggaggcagcccaatatggcaagaaggtgatggtcctggactttgtcactcccacccctcttggaactagatggggtctcggaggaacatgtgtgaatgtgggttgcatacctaaaaaactgatgcatcaagcagctttgttaggacaagccctgcaagactctcgaaattatggatggaaagtcgaggagacagttaagcatgattgggacagaatgatagaagc

SEQ ID NO: 190862 - DNA, 3858 bp, Homo sapiens
  Payload ID: 17707
  Gene Name: thioredoxin reductase 1
  ENST ID: ENST00000527688
  CDS Start-End: 360-1808
agtgtgcggatttgccggggtcagactccaagcttgattgtgagttctagcctttgtcagaaatgcagcaagtcatgctaacttgcaagggagtcaacagagggcacgcggtgcctgcggggccgggacggaagccccgcccccggcgcagttcccgcctgttagcgggggagaagcaccttacacgctccgctctgcttttgtgccacacagaggacggtcgggccctggaaggaacgctctcggaattggccgcggaaaccgatctgcccgttgtgtttgtgaaacagagaaagataggcggccatggtccaaccttgaaggcttatcaggagggcagacttcaaaagctactaaaaatgaacggccctgaagatcttcccaagtcctatgactatgaccttatcatcattggaggtggctcaggaggtctggcagctgctaaggaggcagcccaatatggcaagaaggtgatggtcctggactttgtcactcccacccctcttggaactagatggggtctcggaggaacatgtgtgaatgtgggttgcatacctaaaaaactgatgcatcaagcagctttgttaggacaagccctgcaagactctcgaaattatggatggaaagtcgaggagacagttaagcatgattgggacagaatgatagaagctgtacagaatcacattggctctttgaattggggctaccgagtagctctgcgggagaaaaaagtcgtctatgagaatgcttatgggcaatttattggtcctcacaggattaaggcaacaaataataaaggcaaagaaaaaatttattcagcagagagatttctcattgccactggtgaaagaccacgttacttgggcatccctggtgacaaagaatactgcatcagcagtgatgatcttttctccttgccttactgcccgggtaagaccctggttgttggagcatcctatgtcgctttggagtgcgctggatttcttgctggtattggtttagacgtcactgttatggttaggtccattcttcttagaggatttgaccaggacatggccaacaaaattggtgaacacatggaagaacatggcatcaagtttataagacagttcgtaccaattaaagttgaacaaattgaagcagggacaccaggccgactcagagtagtagctcagtccaccaatagtgaggaaatcattgaaggagaatataatacggtgatgctggcaataggaagagatgcttgcacaagaaaaattggcttagaaaccgtaggggtgaagataaatgaaaagactggaaaaatacctgtcacagatgaagaacagaccaatgtgccttacatctatgccattggcgatatattggaggataaggtggagctcaccccagttgcaatccaggcaggaagattgctggctcagaggctctatgcaggttccactgtcaagtgtgactatgaaaatgttccaaccactgtatttactcctttggaatatggtgcttgtggcctttctgaggagaaagctgtggagaagtttggggaagaaaatattgaggtttaccatagttacttttggccattggaatggacgattccgtcaagagataacaacaaatgttatgcaaaaataatctgtaatactaaagacaatgaacgtgttgtgggctttcacgtactgggtccaaatgctggagaagttacacaaggctttgcagctgcgctcaaatgtggactgaccaaaaagcagctggacagcacaattggaatccaccctgtctgtgcagagtttttttcatttatttgagatagggttcctgtcacccaggctggagtgcagtggtgtgatctcagttcactgcagccttgacctttcaagctcaagcgatgttcctgcctcagtctcctgagtagctgggaccacaggtattcacaacattgtctgtgaccaagcgctctggggcaagcatcctccaggctggctgctgaggttaagccccagtgtggatgctgttgccaagactgcaaaccactggctcgtttccgtgcccaaatccaaggcgaagttttctagagggttcttgggctcttggcacctgcgtgtcctgtgcttaccaccgcccaaggcccccttggatctcttggataggagttggtgaatagaaggcaggcagcatcacactggggtcactgacagacttgaagctgacatttggcagggcatcgaagggatgcatccatgaagtcaccagtctcaagcccatgtggtaggcggtgatggaacaactgtcaaatcagttttagcatgacctttccttgtggattttcttattctcgttgtcaagttttctagggttgaatttttttcttttttctccatggtgttaatgatattagagatgaaaaacgttagcagttgatttttgtccaaaagcaagtcatggctagagtatccatgcaaggtgtcttgttgcatggaagggatagtttggctcccttggaggctatgtaggcttgtcccgggaaagagaactgtcctgcagctgaaatggactgttctttactgacctgctcagcagtttcttctctcatatattcccaaaacaagtacatctgcgatcaactctagccaaatttgcccctgtgtgctacatgatggatgattattattttaaggtctgtttaggaagggaaatggctacttggccagccattgcctggcatttggtagtatagtatgattctcaccattatttgtcatggaggcagacatacaccagaaatgggggagaaacagtacatatctttctgtctttagtttattgtgtgctggtctaagcaagctgagatcatttgcaatggaaaacacgtaacttgtttaaaagtttttctggtagctttagctttatgctaaaaaaaataatgacattgggtatctatttctttctaagactacattagtaggaaaataagtcttttcatgcttatgatttagctgttttgtggtaattgctttttaaaggaagttattaatatcataagttattattaatattttgaacacaggtggatgtgaaggattttcatttaaaaaccaagtggttttgactttttctgttgaatgaacaactgtgccttgtggaatttttgcagaagtgtttatgctttgttagcatttcaacttgcattattataaagaggtattaatgcctcagttatgtgtttgtcaatgtactggctgaggattctatctcagctgtcttttctaactgtgtaggttgagttttgaacacgtgcttgtggacatcaggcctcctgccagcagttcttgaagcttctttttcattcctgctactctacctgtatttctcagttgcagcactgagtggtcaaaatacatttctgggccacctcagggaacccatgcatctgcctggcatttaggcagcagagcccctgaccgtcccccacagggctctgcctcacgtcctcatctcatttggctgtgtaaagaaatgggaaaagggaaaaggagagagcaattgaggcagttgaccatattcagttttatttatttatttttaatttgtttttttctccaagtccaccagtctctgaaattagaacagtaggcggtatgagataatcaggcctaatcatgttgtgattctcttttcttagtggagtggaatgttctatccccacaagaaggattatatcttatagacttgtcttgttcagattctgtatttacccattttattgaaacatatactaagttccatgtatttttgttacaaatcttctgaaaaaaaacaaaacaatgtgaaacattaaaattaaaaggcattaataat

SEQ ID NO: 190863 - DNA, 3836 bp, Homo sapiens
  Payload ID: 17707
  Gene Name: thioredoxin reductase 1
  Uniprot ID: Q16881
  ENST ID: ENST00000525566
  CDS Start-End: 25-1974
agttcccacagggccttgtgcgacatgggctgcgccgagggcaaggcagtggcggcggccgccccaacggagctgcagacgaaaggcaagaacggcgatggccgccgtaggtcagctaaagatcatcaccctggtaaaactttgccagagaacccagcaggattcaccagcacggccactgcagactccagagccctgcttcaggcctatatagatggtcactctgtggtcatcttcagtaggtccacatgcacacgctgtactgaggtaaagaagttatttaaatctctgtgtgttccttattttgtgcttgaacttgatcaaacagaggacggtcgggccctggaaggaacgctctcggaattggccgcggaaaccgatctgcccgttgtgtttgtgaaacagagaaagataggcggccatggtccaaccttgaaggcttatcaggagggcagacttcaaaagctactaaaaatgaacggccctgaagatcttcccaagtcctatgactatgaccttatcatcattggaggtggctcaggaggtctggcagctgctaaggaggcagcccaatatggcaagaaggtgatggtcctggactttgtcactcccacccctcttggaactagatggggtctcggaggaacatgtgtgaatgtgggttgcatacctaaaaaactgatgcatcaagcagctttgttaggacaagccctgcaagactctcgaaattatggatggaaagtcgaggagacagttaagcatgattgggacagaatgatagaagctgtacagaatcacattggctctttgaattggggctaccgagtagctctgcgggagaaaaaagtcgtctatgagaatgcttatgggcaatttattggtcctcacaggattaaggcaacaaataataaaggcaaagaaaaaatttattcagcagagagatttctcattgccactggtgaaagaccacgttacttgggcatccctggtgacaaagaatactgcatcagcagtgatgatcttttctccttgccttactgcccgggtaagaccctggttgttggagcatcctatgtcgctttggagtgcgctggatttcttgctggtattggtttagacgtcactgttatggttaggtccattcttcttagaggatttgaccaggacatggccaacaaaattggtgaacacatggaagaacatggcatcaagtttataagacagttcgtaccaattaaagttgaacaaattgaagcagggacaccaggccgactcagagtagtagctcagtccaccaatagtgaggaaatcattgaaggagaatataatacggtgatgctggcaataggaagagatgcttgcacaagaaaaattggcttagaaaccgtaggggtgaagataaatgaaaagactggaaaaatacctgtcacagatgaagaacagaccaatgtgccttacatctatgccattggcgatatattggaggataaggtggagctcaccccagttgcaatccaggcaggaagattgctggctcagaggctctatgcaggttccactgtcaagtgtgactatgaaaatgttccaaccactgtatttactcctttggaatatggtgcttgtggcctttctgaggagaaagctgtggagaagtttggggaagaaaatattgaggtttaccatagttacttttggccattggaatggacgattccgtcaagagataacaacaaatgttatgcaaaaataatctgtaatactaaagacaatgaacgtgttgtgggctttcacgtactgggtccaaatgctggagaagttacacaaggctttgcagctgcgctcaaatgtggactgaccaaaaagcagctggacagcacaattggaatccaccctgtctgtgcagaggtattcacaacattgtctgtgaccaagcgctctggggcaagcatcctccaggctggctgctgaggttaagccccagtgtggatgctgttgccaagactgcaaaccactggctcgtttccgtgcccaaatccaaggcgaagttttctagagggttcttgggctcttggcacctgcgtgtcctgtgcttaccaccgcccaaggcccccttggatctcttggataggagttggtgaatagaaggcaggcagcatcacactggggtcactgacagacttgaagctgacatttggcagggcatcgaagggatgcatccatgaagtcaccagtctcaagcccatgtggtaggcggtgatggaacaactgtcaaatcagttttagcatgacctttccttgtggattttcttattctcgttgtcaagttttctagggttgaatttttttcttttttctccatggtgttaatgatattagagatgaaaaacgttagcagttgatttttgtccaaaagcaagtcatggctagagtatccatgcaaggtgtcttgttgcatggaagggatagtttggctcccttggaggctatgtaggcttgtcccgggaaagagaactgtcctgcagctgaaatggactgttctttactgacctgctcagcagtttcttctctcatatattcccaaaacaagtacatctgcgatcaactctagccaaatttgcccctgtgtgctacatgatggatgattattattttaaggtctgtttaggaagggaaatggctacttggccagccattgcctggcatttggtagtatagtatgattctcaccattatttgtcatggaggcagacatacaccagaaatgggggagaaacagtacatatctttctgtctttagtttattgtgtgctggtctaagcaagctgagatcatttgcaatggaaaacacgtaacttgtttaaaagtttttctggtagctttagctttatgctaaaaaaaataatgacattgggtatctatttctttctaagactacattagtaggaaaataagtcttttcatgcttatgatttagctgttttgtggtaattgctttttaaaggaagttattaatatcataagttattattaatattttgaacacaggtggatgtgaaggattttcatttaaaaaccaagtggttttgactttttctgttgaatgaacaactgtgccttgtggaatttttgcagaagtgtttatgctttgttagcatttcaacttgcattattataaagaggtattaatgcctcagttatgtgtttgtcaatgtactggctgaggattctatctcagctgtcttttctaactgtgtaggttgagttttgaacacgtgcttgtggacatcaggcctcctgccagcagttcttgaagcttctttttcattcctgctactctacctgtatttctcagttgcagcactgagtggtcaaaatacatttctgggccacctcagggaacccatgcatctgcctggcatttaggcagcagagcccctgaccgtcccccacagggctctgcctcacgtcctcatctcatttggctgtgtaaagaaatgggaaaagggaaaaggagagagcaattgaggcagttgaccatattcagttttatttatttatttttaatttgtttttttctccaagtccaccagtctctgaaattagaacagtaggcggtatgagataatcaggcctaatcatgttgtgattctcttttcttagtggagtggaatgttctatccccacaagaaggattatatcttatagacttgtcttgttcagattctgtatttacccattttattgaaacatatactaagttccatgtatttttgttacaaatcttctgaaaaaaaacaaaacaatgtgaaacattaaaattaaaaggcattaataat

SEQ ID NO: 190864 - DNA, 2018 bp, Homo sapiens
  Payload ID: 17707
  Gene Name: thioredoxin reductase 1
  Uniprot ID: Q16881
  ENST ID: ENST00000529546
  CDS Start-End: 226-1611
agttttcttcactccggcatttgcagcagagcgaaaggtggtcgagtcctgaaggagggcctgatgtcttcatcattctcaaattcttaggacggtcgggccctggaaggaacgctctcggaattggccgcggaaaccgatctgcccgttgtgtttgtgaaacagagaaagataggcggccatggtccaaccttgaaggaggcagcccaatatggcaagaaggtgatggtcctggactttgtcactcccacccctcttggaactagatggggtctcggaggaacatgtgtgaatgtgggttgcatacctaaaaaactgatgcatcaagcagctttgttaggacaagccctgcaagactctcgaaattatggatggaaagtcgaggagacagttaagcatgattgggacagaatgatagaagctgtacagaatcacattggctctttgaattggggctaccgagtagctctgcgggagaaaaaagtcgtctatgagaatgcttatgggcaatttattggtcctcacaggattaaggcaacaaataataaaggcaaagaaaaaatttattcagcagagagatttctcattgccactggtgaaagaccacgttacttgggcatccctggtgacaaagaatactgcatcagcagtgatgatcttttctccttgccttactgcccgggtaagaccctggttgttggagcatcctatgtcgctttggagtgcgctggatttcttgctggtattggtttagacgtcactgttatggttaggtccattcttcttagaggatttgaccaggacatggccaacaaaattggtgaacacatggaagaacatggcatcaagtttataagacagttcgtaccaattaaagttgaacaaattgaagcagggacaccaggccgactcagagtagtagctcagtccaccaatagtgaggaaatcattgaaggagaatataatacggtgatgctggcaataggaagagatgcttgcacaagaaaaattggcttagaaaccgtaggggtgaagataaatgaaaagactggaaaaatacctgtcacagatgaagaacagaccaatgtgccttacatctatgccattggcgatatattggaggataaggtggagctcaccccagttgcaatccaggcaggaagattgctggctcagaggctctatgcaggttccactgtcaagtgtgactatgaaaatgttccaaccactgtatttactcctttggaatatggtgcttgtggcctttctgaggagaaagctgtggagaagtttggggaagaaaatattgaggtttaccatagttacttttggccattggaatggacgattccgtcaagagataacaacaaatgttatgcaaaaataatctgtaatactaaagacaatgaacgtgttgtgggctttcacgtactgggtccaaatgctggagaagttacacaaggctttgcagctgcgctcaaatgtggactgaccaaaaagcagctggacagcacaattggaatccaccctgtctgtgcagaggtattcacaacattgtctgtgaccaagcgctctggggcaagcatcctccaggctggctgctgaggttaagccccagtgtggatgctgttgccaagactgcaaaccactggctcgtttccgtgcccaaatccaaggcgaagttttctagagggttcttgggctcttggcacctgcgtgtcctgtgcttaccaccgcccaaggcccccttggatctcttggataggagttggtgaatagaaggcaggcagcatcacactggggtcactgacagacttgaagctgacatttggcagggcatcgaagggatgcatccatgaagtcaccagtctcaagcccatgtggtaggcggtgatggaacaactgtcaaatcagttttagcatgacctttccttgtggattttcttattctcgttgtcaagttttctagggttgaatttttttcttttttctccatggtgttaatgatattagagatg

SEQ ID NO: 190865 - DNA, 3808 bp, Homo sapiens
  Payload ID: 17707
  Gene Name: thioredoxin reductase 1
  Uniprot ID: Q16881
  ENST ID: ENST00000526390
  CDS Start-End: 324-1955
tagccattaggaaacagcaaccctttcacctcagttttcttcactccggcatttgcagcagagcgaaaggtggtcgagtcctgaaggagggcctgatgtcttcatcattctcaaattcttaggacggtcgggccctggaaggaacgctctcggaattggccgcggaaaccgatctgcccgttgtgtttgtgaaacagagaaagataggcggccatggtccaaccttgaaggggtaggggacccggaaaccccagggtctggaggagagcaaccaggaagctcttggggtgacttcgttttccttcagagatggaggtctcattatgttgtccaggctggtcttgaactcctgggctcaagcgatcatccggcctcggcctcctaaagtgctgggactgcaggtcacgacatttagtgaggcttatcaggagggcagacttcaaaagctactaaaaatgaacggccctgaagatcttcccaagtcctatgactatgaccttatcatcattggaggtggctcaggaggtctggcagctgctaaggaggcagcccaatatggcaagaaggtgatggtcctggactttgtcactcccacccctcttggaactagatggggtctcggaggaacatgtgtgaatgtgggttgcatacctaaaaaactgatgcatcaagcagctttgttaggacaagccctgcaagactctcgaaattatggatggaaagtcgaggagacagttaagcatgattgggacagaatgatagaagctgtacagaatcacattggctctttgaattggggctaccgagtagctctgcgggagaaaaaagtcgtctatgagaatgcttatgggcaatttattggtcctcacaggattaaggcaacaaataataaaggcaaagaaaaaatttattcagcagagagatttctcattgccactggtgaaagaccacgttacttgggcatccctggtgacaaagaatactgcatcagcagtgatgatcttttctccttgccttactgcccgggtaagaccctggttgttggagcatcctatgtcgctttggagtgcgctggatttcttgctggtattggtttagacgtcactgttatggttaggtccattcttcttagaggatttgaccaggacatggccaacaaaattggtgaacacatggaagaacatggcatcaagtttataagacagttcgtaccaattaaagttgaacaaattgaagcagggacaccaggccgactcagagtagtagctcagtccaccaatagtgaggaaatcattgaaggagaatataatacggtgatgctggcaataggaagagatgcttgcacaagaaaaattggcttagaaaccgtaggggtgaagataaatgaaaagactggaaaaatacctgtcacagatgaagaacagaccaatgtgccttacatctatgccattggcgatatattggaggataaggtggagctcaccccagttgcaatccaggcaggaagattgctggctcagaggctctatgcaggttccactgtcaagtgtgactatgaaaatgttccaaccactgtatttactcctttggaatatggtgcttgtggcctttctgaggagaaagctgtggagaagtttggggaagaaaatattgaggtttaccatagttacttttggccattggaatggacgattccgtcaagagataacaacaaatgttatgcaaaaataatctgtaatactaaagacaatgaacgtgttgtgggctttcacgtactgggtccaaatgctggagaagttacacaaggctttgcagctgcgctcaaatgtggactgaccaaaaagcagctggacagcacaattggaatccaccctgtctgtgcagaggtattcacaacattgtctgtgaccaagcgctctggggcaagcatcctccaggctggctgctgaggttaagccccagtgtggatgctgttgccaagactgcaaaccactggctcgtttccgtgcccaaatccaaggcgaagttttctagagggttcttgggctcttggcacctgcgtgtcctgtgcttaccaccgcccaaggcccccttggatctcttggataggagttggtgaatagaaggcaggcagcatcacactggggtcactgacagacttgaagctgacatttggcagggcatcgaagggatgcatccatgaagtcaccagtctcaagcccatgtggtaggcggtgatggaacaactgtcaaatcagttttagcatgacctttccttgtggattttcttattctcgttgtcaagttttctagggttgaatttttttcttttttctccatggtgttaatgatattagagatgaaaaacgttagcagttgatttttgtccaaaagcaagtcatggctagagtatccatgcaaggtgtcttgttgcatggaagggatagtttggctcccttggaggctatgtaggcttgtcccgggaaagagaactgtcctgcagctgaaatggactgttctttactgacctgctcagcagtttcttctctcatatattcccaaaacaagtacatctgcgatcaactctagccaaatttgcccctgtgtgctacatgatggatgattattattttaaggtctgtttaggaagggaaatggctacttggccagccattgcctggcatttggtagtatagtatgattctcaccattatttgtcatggaggcagacatacaccagaaatgggggagaaacagtacatatctttctgtctttagtttattgtgtgctggtctaagcaagctgagatcatttgcaatggaaaacacgtaacttgtttaaaagtttttctggtagctttagctttatgctaaaaaaaataatgacattgggtatctatttctttctaagactacattagtaggaaaataagtcttttcatgcttatgatttagctgttttgtggtaattgctttttaaaggaagttattaatatcataagttattattaatattttgaacacaggtggatgtgaaggattttcatttaaaaaccaagtggttttgactttttctgttgaatgaacaactgtgccttgtggaatttttgcagaagtgtttatgctttgttagcatttcaacttgcattattataaagaggtattaatgcctcagttatgtgtttgtcaatgtactggctgaggattctatctcagctgtcttttctaactgtgtaggttgagttttgaacacgtgcttgtggacatcaggcctcctgccagcagttcttgaagcttctttttcattcctgctactctacctgtatttctcagttgcagcactgagtggtcaaaatacatttctgggccacctcagggaacccatgcatctgcctggcatttaggcagcagagcccctgaccgtcccccacagggctctgcctcacgtcctcatctcatttggctgtgtaaagaaatgggaaaagggaaaaggagagagcaattgaggcagttgaccatattcagttttatttatttatttttaatttgtttttttctccaagtccaccagtctctgaaattagaacagtaggcggtatgagataatcaggcctaatcatgttgtgattctcttttcttagtggagtggaatgttctatccccacaagaaggattatatcttatagacttgtcttgttcagattctgtatttacccattttattgaaacatatactaagttccatgtatttttgttacaaatcttctgaaaaaaaacaaaacaatgtgaaacattaaaattaaaaggc

SEQ ID NO: 190866 - DNA, 3974 bp, Homo sapiens
  Payload ID: 17707
  Gene Name: thioredoxin reductase 1
  Uniprot ID: Q16881
  ENST ID: ENST00000526691
  CDS Start-End: 457-2112
acgaggcaattagcataggttgccagggctgcacgaggagtggatttctgctttgtcattctgactctggcagttagcccgcccgctcggcgcagggcgtggcttctcgtagccattaggaaacagcaaccctttcacctcagttttcttcactccggcatttgcagcagagcgaaaggtggtcgagtcctgaaggagggcctgatgtcttcatcattctcaaattcttgtaagctctgcgtcgggtgaaaccagacaaagccgcgagcccagggatgggagcacgcgggggacggcctgccggcggggacgacagcattgcgcctgggtgcagcagtgtgcgtctcggggaagggaagatattttaaggcgtgtctgagcagacggggaggcttttccaaacccaggcagcttcgtggcgtgtgcggtttcgacccggtcacacaaagcttcagcatgtcatgtgaggacggtcgggccctggaaggaacgctctcggaattggccgcggaaaccgatctgcccgttgtgtttgtgaaacagagaaagataggcggccatggtccaaccttgaaggcttatcaggagggcagacttcaaaagctactaaaaatgaacggccctgaagatcttcccaagtcctatgactatgaccttatcatcattggaggtggctcaggaggtctggcagctgctaaggaggcagcccaatatggcaagaaggtgatggtcctggactttgtcactcccacccctcttggaactagatggggtctcggaggaacatgtgtgaatgtgggttgcatacctaaaaaactgatgcatcaagcagctttgttaggacaagccctgcaagactctcgaaattatggatggaaagtcgaggagacagttaagcatgattgggacagaatgatagaagctgtacagaatcacattggctctttgaattggggctaccgagtagctctgcgggagaaaaaagtcgtctatgagaatgcttatgggcaatttattggtcctcacaggattaaggcaacaaataataaaggcaaagaaaaaatttattcagcagagagatttctcattgccactggtgaaagaccacgttacttgggcatccctggtgacaaagaatactgcatcagcagtgatgatcttttctccttgccttactgcccgggtaagaccctggttgttggagcatcctatgtcgctttggagtgcgctggatttcttgctggtattggtttagacgtcactgttatggttaggtccattcttcttagaggatttgaccaggacatggccaacaaaattggtgaacacatggaagaacatggcatcaagtttataagacagttcgtaccaattaaagttgaacaaattgaagcagggacaccaggccgactcagagtagtagctcagtccaccaatagtgaggaaatcattgaaggagaatataatacggtgatgctggcaataggaagagatgcttgcacaagaaaaattggcttagaaaccgtaggggtgaagataaatgaaaagactggaaaaatacctgtcacagatgaagaacagaccaatgtgccttacatctatgccattggcgatatattggaggataaggtggagctcaccccagttgcaatccaggcaggaagattgctggctcagaggctctatgcaggttccactgtcaagtgtgactatgaaaatgttccaaccactgtatttactcctttggaatatggtgcttgtggcctttctgaggagaaagctgtggagaagtttggggaagaaaatattgaggtttaccatagttacttttggccattggaatggacgattccgtcaagagataacaacaaatgttatgcaaaaataatctgtaatactaaagacaatgaacgtgttgtgggctttcacgtactgggtccaaatgctggagaagttacacaaggctttgcagctgcgctcaaatgtggactgaccaaaaagcagctggacagcacaattggaatccaccctgtctgtgcagaggtattcacaacattgtctgtgaccaagcgctctggggcaagcatcctccaggctggctgctgaggttaagccccagtgtggatgctgttgccaagactgcaaaccactggctcgtttccgtgcccaaatccaaggcgaagttttctagagggttcttgggctcttggcacctgcgtgtcctgtgcttaccaccgcccaaggcccccttggatctcttggataggagttggtgaatagaaggcaggcagcatcacactggggtcactgacagacttgaagctgacatttggcagggcatcgaagggatgcatccatgaagtcaccagtctcaagcccatgtggtaggcggtgatggaacaactgtcaaatcagttttagcatgacctttccttgtggattttcttattctcgttgtcaagttttctagggttgaatttttttcttttttctccatggtgttaatgatattagagatgaaaaacgttagcagttgatttttgtccaaaagcaagtcatggctagagtatccatgcaaggtgtcttgttgcatggaagggatagtttggctcccttggaggctatgtaggcttgtcccgggaaagagaactgtcctgcagctgaaatggactgttctttactgacctgctcagcagtttcttctctcatatattcccaaaacaagtacatctgcgatcaactctagccaaatttgcccctgtgtgctacatgatggatgattattattttaaggtctgtttaggaagggaaatggctacttggccagccattgcctggcatttggtagtatagtatgattctcaccattatttgtcatggaggcagacatacaccagaaatgggggagaaacagtacatatctttctgtctttagtttattgtgtgctggtctaagcaagctgagatcatttgcaatggaaaacacgtaacttgtttaaaagtttttctggtagctttagctttatgctaaaaaaaataatgacattgggtatctatttctttctaagactacattagtaggaaaataagtcttttcatgcttatgatttagctgttttgtggtaattgctttttaaaggaagttattaatatcataagttattattaatattttgaacacaggtggatgtgaaggattttcatttaaaaaccaagtggttttgactttttctgttgaatgaacaactgtgccttgtggaatttttgcagaagtgtttatgctttgttagcatttcaacttgcattattataaagaggtattaatgcctcagttatgtgtttgtcaatgtactggctgaggattctatctcagctgtcttttctaactgtgtaggttgagttttgaacacgtgcttgtggacatcaggcctcctgccagcagttcttgaagcttctttttcattcctgctactctacctgtatttctcagttgcagcactgagtggtcaaaatacatttctgggccacctcagggaacccatgcatctgcctggcatttaggcagcagagcccctgaccgtcccccacagggctctgcctcacgtcctcatctcatttggctgtgtaaagaaatgggaaaagggaaaaggagagagcaattgaggcagttgaccatattcagttttatttatttatttttaatttgtttttttctccaagtccaccagtctctgaaattagaacagtaggcggtatgagataatcaggcctaatcatgttgtgattctcttttcttagtggagtggaatgttctatccccacaagaaggattatatcttatagacttgtcttgttcagattctgtatttacccattttattgaaacatatactaagttccatgtatttttgttacaaatcttctgaaaaaaaacaaaacaatgtgaaacattaaaattaaaaggcattaataat

SEQ ID NO: 190867 - DNA, 607 bp, Homo sapiens
  Payload ID: 17707
  Gene Name: thioredoxin reductase 1
  ENST ID: ENST00000529784
  CDS Start-End: 449-607
acacaaagcttcagcatgtcatgtggtaggtgaggccggcgcctgtaggctggcggtttccttcctcttggtctttgtagagacagtttgcagaacagcggagaaaatggaggacggtcgggccctggaaggaacgctctcggaattggccgcggaaaccgatctgcccgttgtgtttgtgaaacagagaaagataggcggccatggtccaaccttgaagtgctttgtattgaaggaggaaccttggccataatgccagttgatgactactggctgtgtttaccagcctcttgtgctagaccttttgtgcagactgtcagagtggtgcagtcttgcccccactgttgctggtttccaggtgttctcccttcagtccctgagccactacgtatgcccgccatgctgccaacaggcttatcaggagggcagacttcaaaagctactaaaaatgaacggccctgaagatcttcccaagtcctatgactatgaccttatcatcattggaggtggctcaggaggtctggcagctgctaaggaggcagcccaatatggcaagaaggtgatggtcctggactttgtcactcccacccctcttggaactagatgg

SEQ ID NO: 190868 - DNA, 1893 bp, Homo sapiens
  Payload ID: 17708
  Gene Name: thioredoxin reductase 2
  ENST ID: ENST00000334363
  CDS Start-End: 2-1018
gatggcggcaatggcggtggcgctgcggggattaggagggcgcttccggtggcggacgcaggccgtggcgggcggggtgcggggcgcggcgcggggcgcagcagcaggtcagcgggactatgatctcctggtggtcggcgggggatctggtggcctggcttgtgccaaggaggccgcccagctgggaaggaaggtggccgtggtggactacgtggaaccttctccccaaggcacccggtggggcctcggcggcacctgcgtcaacgtgggctgcatccccaagaagctgatgcaccaggcggcactgctgggaggcctgatccaagatgcccccaactatggctgggaggtggcccagcccgtgccgcatgactggaggaagatggcagaagctgttcaaaatcacgtgaaatccttgaactggggccaccgtgtccagcttcaggacagaaaagtcaagtactttaacatcaaagccagctttgttgacgagcacacggtttgcggcgttgccaaaggtgggaaagagattctgctgtcagccgatcacatcatcattgctactggagggcggccgagataccccacgcacatcgaaggtgccttggaatatggaatcacaagtgatgacatcttctggctgaaggaatcccctggaaaaacgttggtggtcggggccagctatgtggccctggagtgtgctggcttcctcaccgggattgggctggacaccaccatcatgatgcgcagcatccccctccgcggcttcgaccagcaaatgtcctccatggtcatagagcacatggcatctcatggcacccggttcctgaggggctgtgccccctcgcgggtcaggaggctccctgatggccagctgcaggtcacctgggaggacagcaccaccggcaaggaggacacgggcacctttgacaccgtcctgtgggccatagcaccttgcatctctgcgtgtctccccaccaccgtgggacatgctggaaaaaaccagagaagagactgagacggcatcagccaggtgtcctcatcgaggatcaactaggcaatcatcctcgccttccctggcccttgagcaattgcttattaaggtttcagcacataaatcctacttgtcaccttccaggtttaagtcttggtatgtttcttttctttttttttttttttttgagatggagtctcgctctgtcgcccaggctggagtgcagtggcaacctccgcctcccgggttcaagcgattctcctgcctcagcctcctgggtagctggggctacaggcgcccaccactacacctgactaatttttgtatttttagtagagacggggtttcaccatgtaggccaggatggtctcaatctcctgaccttgtgatccacctgccttggcctcccaaagtactgagattacaggtgtgagccaccgcacctggccagtatgtattttttctttagcatattaaatgttttgctgcttcaggctttccagctaggtttttttctttttttgcgtgtgaaacagggtctctctctgttgcctaggaggagtgtggtggtgtgatcatagctcactgcagcctccacctcccaggctcaatcaatcttcccatctcagccttctaagtgctgggattacaggtttgagctactgtgcccagccaagctagtttgttgtttttaacataaaaatgatatggatttgaaagttttaaaaattatggtgacatacacataacatcaaattcatcatcttaagcattttaaagtatatagttcagtggtgttaagtacgttcatattgtacaagcagcatgaccatccatctctagaacttttccattatctccaaactgagctctgtccccattaaacactcactccctgc

SEQ ID NO: 190869 - DNA, 2025 bp, Homo sapiens
  Payload ID: 17708
  Gene Name: thioredoxin reductase 2
  ENST ID: ENST00000400518
  CDS Start-End: 185-1669
ccggacctcaggcccagttcagtgtacttcccctctctacttcctccctccagtcccttctccatccctcccttttttggctgccccttgcctgccttcctcgccagtagcttgcagagtagacacgatgacaccttttgcaggctaaaaaggctgagagtggcactatgtgcagtgagccaccatggaggaccaagcaggtcagcgggactatgatctcctggtggtcggcgggggatctggtggcctggcttgtgccaaggaggccgcccagctgggaaggaaggtggccgtggtggactacgtggaaccttctccccaaggcacccggtggggcctcggcggcacctgcgtcaacgtgggctgcatccccaagaagctgatgcaccaggcggcactgctgggaggcctgatccaagatgcccccaactatggctgggaggtggcccagcccgtgccgcatgactggaggaagatggcagaagctgttcaaaatcacgtgaaatccttgaactggggccaccgtgtccagcttcaggacagaaaagtcaagtactttaacatcaaagccagctttgttgacgagcacacggtttgcggcgttgccaaaggtgggaaagagattctgctgtcagccgatcacatcatcattgctactggagggcggccgagataccccacgcacatcgaaggtgccttggaatatggaatcacaagtgatgacatcttctggctgaaggaatcccctggaaaaacgttggtggtcggggccagctatgtggccctggagtgtgctggcttcctcaccgggattgggctggacaccaccatcatgatgcgcagcatccccctccgcggcttcgaccagcaaatgtcctccatggtcatagagcacatggcatctcatggcacccggttcctgaggggctgtgccccctcgcgggtcaggaggctccctgatggccagctgcaggtcacctgggaggacagcaccaccggcaaggaggacacgggcacctttgacaccgtcctgtgggccataggtcgagtcccagacaccagaagtctgaatttggagaaggctggggtagatactagccccgacactcagaagatcctggtggactcccgggaagccacctctgtgccccacatctacgccattggtgacgtggtggaggggcggcctgagctgacacccatagcgatcatggccgggaggctcctggtgcagcggctcttcggcgggtcctcagatctgatggactacgacaatgttcccacgaccgtcttcaccccgctggagtatggctgtgtggggctgtccgaggaggaggcagtggctcgccacgggcaggagcatgttgaggtctatcacgcccattataaaccactggagttcacggtggctggacgagatgcatcccagtgttatgtaaagatggtgtgcctgagggagcccccacagctggtgctgggcctgcatttccttggccccaacgcaggcgaagttactcaaggatttgctctggggatcaagtgtggggcttcctatgcgcaggtgatgcggaccgtgggtatccatcccacatgctctgaggaggtagtcaagctgcgcatctccaagcgctcaggcctggaccccacggtgacaggctgctgagggtaagcgccatccctgcaggccagggcacacggtgcgcccgccgccagctcctcggaggccagacccaggatggctgcaggccaggtttggggggcctcaaccctctcctggagcgcctgtgagatggtcagcgtggagcgcaagtgctggacaggtggcccgtgtgccccacagggatggctcaggggactgtccacctcacccctgcacctctcagcctctgccgccgggcacccccccccaggctcctggtgccagatgatgacgacctgggtggaaacctaccctgtgggcacccatgtccgagccccctggcatttctgcaatgcaaataaagagggtactttttctgaagtgtg

SEQ ID NO: 190870 - DNA, 3155 bp, Homo sapiens
  Payload ID: 17708
  Gene Name: thioredoxin reductase 2
  ENST ID: ENST00000400519
  CDS Start-End: 1-1572
atggcggcaatggcggtggcgctgcggggattaggagggcgcttccggtggcggacgcaggccgtggcgggcggggtgcggggcgcggcgcggggcgcagcaggtcagcgggactatgatctcctggtggtcggcgggggatctggtggcctggcttgtgccaaggaggccgcccagctgggaaggaaggtggccgtggtggactacgtggaaccttctccccaaggcacccggtggggcctcggcggcacctgcgtcaacgtgggctgcatccccaagaagctgatgcaccaggcggcactgctgggaggcctgatccaagatgcccccaactatggctgggaggtggcccagcccgtgccgcatgactggaggaagatggcagaagctgttcaaaatcacgtgaaatccttgaactggggccaccgtgtccagcttcaggacagaaaagtcaagtactttaacatcaaagccagctttgttgacgagcacacggtttgcggcgttgccaaaggtgggaaagagattctgctgtcagccgatcacatcatcattgctactggagggcggccgagataccccacgcacatcgaaggtgccttggaatatggaatcacaagtgatgacatcttctggctgaaggaatcccctggaaaaacgttggtggtcggggccagctatgtggccctggagtgtgctggcttcctcaccgggattgggctggacaccaccatcatgatgcgcagcatccccctccgcggcttcgaccagcaaatgtcctccatggtcatagagcacatggcatctcatggcacccggttcctgaggggctgtgccccctcgcgggtcaggaggctccctgatggccagctgcaggtcacctgggaggacagcaccaccggcaaggaggacacgggcacctttgacaccgtcctgtgggccataggtcgagtcccagacaccagaagtctgaatttggagaaggctggggtagatactagccccgacactcagaagatcctggtggactcccgggaagccacctctgtgccccacatctacgccattggtgacgtggtggaggggcggcctgagctgacacccatagcgatcatggccgggaggctcctggtgcagcggctcttcggcgggtcctcagatctgatggactacgacaatgttcccacgaccgtcttcaccccgctggagtatggctgtgtggggctgtccgaggaggaggcagtggctcgccacgggcaggagcatgttgaggtctatcacgcccattataaaccactggagttcacggtggctggacgagatgcatcccagtgttatgtaaagatggtgtgcctgagggagcccccacagctggtgctgggcctgcatttccttggccccaacgcaggcgaagttactcaaggatttgctctggggatcaagtgtggggcttcctatgcgcaggtgatgcggaccgtgggtatccatcccacatgctctgaggaggtagtcaagctgcgcatctccaagcgctcaggcctggaccccacggtgacaggctgctgagggtaagcgccatccctgcaggccagggcacacggtgcgcccgccgccagctcctcggaggccagacccaggtatgcaggtggggctggctctgtttgaggacagggcatgtggcaggggtgcaggagccctggccatgggctccctccaggtgtacagcaaggctacacctgccacgccacccagaatgggtgctccatcctgtaaccaggccacagcggtgacaggcagaaggggaagttcccaggggcccaaacctccccgggggaccccagaccccggcctggccacagctgctccccacacacaggaggtatcaagaaacggggctcatccttagcagcctatcccaggtggatgttggcgtggaaggtgtcccgggtgggctaaagtcgggcatctcaagttgctgccccacagggggctgcagtcgggaagctggcctcccaccgaggcctcccaccaaggcctggctcctgcagagttcagcgcccgctcatttccctatctcccagaaggtggagacgctgccctgtgatggccggccctgcccagcctgccctgcacatctggttctgttccagctctgcagagccaggctgaccggggggcatgttgttcatcgtgacctcttctggggaggaagaaactggcaagggctcctggcctctgccccagggatgcctgtgccagagccccctcgcctcgtggtctaatagtgcatcctccggcctgggctgcagggcaggggccggggcagggtgggccctcagcccgtgccatccagcccacctggggcacccccatggctgtcagcccctcccagggttggggtgtttgggctccatctctcccccggggctgaggtggagaccaggcagagcagtgggctccccccaagatgcctgtggacaggctctagggtctgcatggcgccgaggggctctggggaggcctctctgggggtactcagggccccctgcttcaccgtggccgcctccccccggcggggccgcgctcgatagggataaacaaagggcatcctgaggaaactcttatcagaacattacacctcccagagctgttttgttaggagcctgctataaatttttatcatttcaaaatatttttgtagcaccgcgtcgctccctgtgacgcatcgccctggggtggggccattctctgctgggtttatttctcacccatctcccttgggggtccctgggtgtggcagtgggagacatagctaggctgatgtgaggggtgggtggctgacctgtgctgaccttcctgttgttggcaggatggctgcaggccaggtttggggggcctcaaccctctcctggagcgcctgtgagatggtcagcgtggagcgcaagtgctggacaggtggcccgtgtgccccacagggatggctcaggggactgtccacctcacccctgcacctctcagcctctgccgccgggcacccccccccaggctcctggtgccagatgatgacgacctgggtggaaacctaccctgtgggcacccatgtccgagccccctggcatttctgcaatgcaaataaagagggtactttttctgaa

SEQ ID NO: 190871 - DNA, 2115 bp, Homo sapiens
  Payload ID: 17708
  Gene Name: thioredoxin reductase 2
  Uniprot ID: Q9NNW7
  ENST ID: ENST00000400521
  CDS Start-End: 190-1764
attccccacaccctatcccagtgttccaccctaggtctgaaggcccccgccccgaatccggccgcattcggccccggtctagccagcgctctcacctctcccgcgacggcccgcccgggactggacccgccccggtccggcgcaggcagcgcggcgggcagccctagctgccccagaagccccacgacgatggcggcaatggcggtggcgctgcggggattaggagggcgcttccggtggcggacgcaggccgtggcgggcggggtgcggggcgcggcgcggggcgcagcagcaggtcagcgggactatgatctcctggtggtcggcgggggatctggtggcctggcttgtgccaaggaggccgcccagctgggaaggaaggtggccgtggtggactacgtggaaccttctccccaaggcacccggtggggcctcggcggcacctgcgtcaacgtgggctgcatccccaagaagctgatgcaccaggcggcactgctgggaggcctgatccaagatgcccccaactatggctgggaggtggcccagcccgtgccgcatgactggaggaagatggcagaagctgttcaaaatcacgtgaaatccttgaactggggccaccgtgtccagcttcaggacagaaaagtcaagtactttaacatcaaagccagctttgttgacgagcacacggtttgcggcgttgccaaaggtgggaaagagattctgctgtcagccgatcacatcatcattgctactggagggcggccgagataccccacgcacatcgaaggtgccttggaatatggaatcacaagtgatgacatcttctggctgaaggaatcccctggaaaaacgttggtggtcggggccagctatgtggccctggagtgtgctggcttcctcaccgggattgggctggacaccaccatcatgatgcgcagcatccccctccgcggcttcgaccagcaaatgtcctccatggtcatagagcacatggcatctcatggcacccggttcctgaggggctgtgccccctcgcgggtcaggaggctccctgatggccagctgcaggtcacctgggaggacagcaccaccggcaaggaggacacgggcacctttgacaccgtcctgtgggccataggtcgagtcccagacaccagaagtctgaatttggagaaggctggggtagatactagccccgacactcagaagatcctggtggactcccgggaagccacctctgtgccccacatctacgccattggtgacgtggtggaggggcggcctgagctgacacccatagcgatcatggccgggaggctcctggtgcagcggctcttcggcgggtcctcagatctgatggactacgacaatgttcccacgaccgtcttcaccccgctggagtatggctgtgtggggctgtccgaggaggaggcagtggctcgccacgggcaggagcatgttgaggtctatcacgcccattataaaccactggagttcacggtggctggacgagatgcatcccagtgttatgtaaagatggtgtgcctgagggagcccccacagctggtgctgggcctgcatttccttggccccaacgcaggcgaagttactcaaggatttgctctggggatcaagtgtggggcttcctatgcgcaggtgatgcggaccgtgggtatccatcccacatgctctgaggaggtagtcaagctgcgcatctccaagcgctcaggcctggaccccacggtgacaggctgctgagggtaagcgccatccctgcaggccagggcacacggtgcgcccgccgccagctcctcggaggccagacccaggatggctgcaggccaggtttggggggcctcaaccctctcctggagcgcctgtgagatggtcagcgtggagcgcaagtgctggacaggtggcccgtgtgccccacagggatggctcaggggactgtccacctcacccctgcacctctcagcctctgccgccgggcacccccccccaggctcctggtgccagatgatgacgacctgggtggaaacctaccctgtgggcacccatgtccgagccccctggcatttctgcaatgcaaataaagagggtactttttctgaa

SEQ ID NO: 190872 - DNA, 1874 bp, Homo sapiens
  Payload ID: 17708
  Gene Name: thioredoxin reductase 2
  ENST ID: ENST00000400525
  CDS Start-End: 18-1523
ccagaagccccacgacgatggcggcaatggcggtggcgctgcggggattaggagggcgcttccggtggcggacgcaggccgtggcgggcggggtgcggggcgcggcgcggggcgcagcagccgcccagctgggaaggaaggtggccgtggtggactacgtggaaccttctccccaaggcacccggtggggcctcggcggcacctgcgtcaacgtgggctgcatccccaagaagctgatgcaccaggcggcactgctgggaggcctgatccaagatgcccccaactatggctgggaggtggcccagcccgtgccgcatgactggaggaagatggcagaagctgttcaaaatcacgtgaaatccttgaactggggccaccgtgtccagcttcaggacagaaaagtcaagtactttaacatcaaagccagctttgttgacgagcacacggtttgcggcgttgccaaaggtgggaaagagattctgctgtcagccgatcacatcatcattgctactggagggcggccgagataccccacgcacatcgaaggtgccttggaatatggaatcacaagtgatgacatcttctggctgaaggaatcccctggaaaaacgttggtggtcggggccagctatgtggccctggagtgtgctggcttcctcaccgggattgggctggacaccaccatcatgatgcgcagcatccccctccgcggcttcgaccagcaaatgtcctccatggtcatagagcacatggcatctcatggcacccggttcctgaggggctgtgccccctcgcgggtcaggaggctccctgatggccagctgcaggtcacctgggaggacagcaccaccggcaaggaggacacgggcacctttgacaccgtcctgtgggccataggtcgagtcccagacaccagaagtctgaatttggagaaggctggggtagatactagccccgacactcagaagatcctggtggactcccgggaagccacctctgtgccccacatctacgccattggtgacgtggtggaggggcggcctgagctgacacccatagcgatcatggccgggaggctcctggtgcagcggctcttcggcgggtcctcagatctgatggactacgacaatgttcccacgaccgtcttcaccccgctggagtatggctgtgtggggctgtccgaggaggaggcagtggctcgccacgggcaggagcatgttgaggtctatcacgcccattataaaccactggagttcacggtggctggacgagatgcatcccagtgttatgtaaagatggtgtgcctgagggagcccccacagctggtgctgggcctgcatttccttggccccaacgcaggcgaagttactcaaggatttgctctggggatcaagtgtggggcttcctatgcgcaggtgatgcggaccgtgggtatccatcccacatgctctgaggaggtagtcaagctgcgcatctccaagcgctcaggcctggaccccacggtgacaggctgctgagggtaagcgccatccctgcaggccagggcacacggtgcgcccgccgccagctcctcggaggccagacccaggatggctgcaggccaggtttggggggcctcaaccctctcctggagcgcctgtgagatggtcagcgtggagcgcaagtgctggacaggtggcccgtgtgccccacagggatggctcaggggactgtccacctcacccctgcacctctcagcctctgccgccgggcacccccccccaggctcctggtgccagatgatgacgacctgggtggaaacctaccctgtgggcacccatgtccgagccccctggcatttctgcaatgcaaataaagagggtactttttctgaa

SEQ ID NO: 190873 - DNA, 2024 bp, Homo sapiens
  Payload ID: 17708
  Gene Name: thioredoxin reductase 2
  ENST ID: ENST00000542719
  CDS Start-End: 383-1669
gccctgcctaacaccaggcccaccgaaccttgaggtaaagggccagtgacccccatggggacaattaaaggcaaagaattaggtagtaaatttagaggaatggtactacagagatcgaccgccctgctgcctactgtggaggtagacaagcattgtactgagacagaagaagaggctgggacccatctggattggctcaggtcagcgggactatgatctcctggtggtcggcgggggatctggtggcctggcttgtgccaaggaggccgcccagctgggaaggaaggtggccgtggtggactacgtggaaccttctccccaaggcacccggtggggcctcggcggcacctgcgtcaacgtgggctgcatccccaagaagctgatgcaccaggcggcactgctgggaggcctgatccaagatgcccccaactatggctgggaggtggcccagcccgtgccgcatgactggaggaagatggcagaagctgttcaaaatcacgtgaaatccttgaactggggccaccgtgtccagcttcaggacagaaaagtcaagtactttaacatcaaagccagctttgttgacgagcacacggtttgcggcgttgccaaaggtgggaaagagattctgctgtcagccgatcacatcatcattgctactggagggcggccgagataccccacgcacatcgaaggtgccttggaatatggaatcacaagtgatgacatcttctggctgaaggaatcccctggaaaaacgttggtggtcggggccagctatgtggccctggagtgtgctggcttcctcaccgggattgggctggacaccaccatcatgatgcgcagcatccccctccgcggcttcgaccagcaaatgtcctccatggtcatagagcacatggcatctcatggcacccggttcctgaggggctgtgccccctcgcgggtcaggaggctccctgatggccagctgcaggtcacctgggaggacagcaccaccggcaaggaggacacgggcacctttgacaccgtcctgtgggccataggtcgagtcccagacaccagaagtctgaatttggagaaggctggggtagatactagccccgacactcagaagatcctggtggactcccgggaagccacctctgtgccccacatctacgccattggtgacgtggtggaggggcggcctgagctgacacccatagcgatcatggccgggaggctcctggtgcagcggctcttcggcgggtcctcagatctgatggactacgacaatgttcccacgaccgtcttcaccccgctggagtatggctgtgtggggctgtccgaggaggaggcagtggctcgccacgggcaggagcatgttgaggtctatcacgcccattataaaccactggagttcacggtggctggacgagatgcatcccagtgttatgtaaagatggtgtgcctgagggagcccccacagctggtgctgggcctgcatttccttggccccaacgcaggcgaagttactcaaggatttgctctggggatcaagtgtggggcttcctatgcgcaggtgatgcggaccgtgggtatccatcccacatgctctgaggaggtagtcaagctgcgcatctccaagcgctcaggcctggaccccacggtgacaggctgctgagggtaagcgccatccctgcaggccagggcacacggtgcgcccgccgccagctcctcggaggccagacccaggatggctgcaggccaggtttggggggcctcaaccctctcctggagcgcctgtgagatggtcagcgtggagcgcaagtgctggacaggtggcccgtgtgccccacagggatggctcaggggactgtccacctcacccctgcacctctcagcctctgccgccgggcacccccccccaggctcctggtgccagatgatgacgacctgggtggaaacctaccctgtgggcacccatgtccgagccccctggcatttctgcaatgcaaataaagagggtactttttctgaagtgt

SEQ ID NO: 190874 - DNA, 751 bp, Homo sapiens
  Payload ID: 17708
  Gene Name: thioredoxin reductase 2
  ENST ID: ENST00000475995
  CDS Start-End: 1-514
cggcgttgccaaaggtgggaaagagattctgctgtcagccgatcacatcatcattgctactggagggcggccgagataccccacgcacatcgaaggtgccttggaatatggaatcacaagtgatgacatcttctggctgaaggaatcccctggaaaaacgttggtggtcggggccagctatgtggccctggagtgtgctggcttcctcaccgggattgggctggacaccaccatcatgatgcgcagcatccccctccgcggcttcgaccagcaaatgtcctccatggtcatagagcacatggcatctcatggcacccggttcctgaggggctgtgccccctcgcgggtcaggaggctccctgatggccagctgcaggtcacctgggaggacagcaccaccggcaaggaggacacgggcacctttgacaccgtcctgtgggccatagggctcccccatcctgctggctgccaggcgggttggccgctccccagtgcacctcgagagcaaccgtgaaggcctgtggggcggcactcacactaggctgtgcccatcttgccatccccagcaccttgcatctctgcgtgtctccccaccaccgtgggacatgctggaaaaaaccagagaagagactgagacggcatcagccaggtgtcctcatcgaggatcaactaggcaatcatcctcgccttccctggcccttgagcaattgcttattaaggtttcagcacataaatcctacttgtcaccttc

SEQ ID NO: 190875 - DNA, 810 bp, Homo sapiens
  Payload ID: 17708
  Gene Name: thioredoxin reductase 2
  ENST ID: ENST00000462843
  CDS Start-End: 174-810
tcaagctgcacgtcaggagcacatggaacgctttggggtccctttttagccggggattccagtgaatgaaaacggtagcaggggctcttttgagcttggtcatggggcagccctccgagggcagagtggagggcagcaaacaggagaatgagcaacctacctaggtccttgggatgcccctcaggaggacgagctctagggggaatgctgggcggcctgagctgacacccatagcgatcatggccgggaggctcctggtgcagcggctcttcggcgggtcctcagatctgatggactacgacaatgttcccacgaccgtcttcaccccgctggagtatggctgtgtggggctgtccgaggaggaggcagtggctcgccacgggcaggagcatgttgaggtctatcacgcccattataaaccactggagttcacggtggctggacgagatgcatcccagtgttatgtaaagatggtgtgcctgagggagcccccacagctggtgctgggcctgcatttccttggccccaacgcaggcgaagttactcaaggatttgctctggggatcaagtgtggggcttcctatgcgcaggtgatgcggaccgtgggtatccatcccacatgctctgaggaggtagtcaagctgcgcatctccaagcgctcaggcctggaccccacggtgacaggctgctgagggatggctgcaggccaggtttggggggcctcaaccctctcctggagcgcctgtgagatggtcagcgtggagcgcaagtgctggacaggtggcccgtgtgccccacagggatggctca

SEQ ID NO: 190876 - DNA, 850 bp, Homo sapiens
  Payload ID: 17708
  Gene Name: thioredoxin reductase 2
  ENST ID: ENST00000485358
  CDS Start-End: 76-618
gacgtgcagatcaagctgcacgtcaggagcacatggaacgctttggggtccctttttagccggggattccagtgaatgaaaacggtagcaggggctcttttgagcttggtcatggggcagccctccgaggggcggcctgagctgacacccatagcgatcatggccgggaggctcctggtgcagcggctcttcggcgggtcctcagatctgatggactacgacaatgttcccacgaccgtcttcaccccgctggagtatggctgtgtggggctgtccgaggaggaggcagtggctcgccacgggcaggagcatgttgaggtctatcacgcccattataaaccactggagttcacggtggctggacgagatgcatcccagtgttatgtaaagatggtgtgcctgagggagcccccacagctggtgctgggcctgcatttccttggccccaacgcaggcgaagttactcaaggatttgctctggggatcaagtgtggggcttcctatgcgcaggtgatgcggaccgtgggtatccatcccacatgctctgaggaggtagtcaagctgcgcatctccaagcgctcaggcctggaccccacggtgacaggctgctgagggtaagcgccatccctgcaggccagggcacacggtgcgcccgccgccagctcctcggaggccagacccaggatggctgcaggccaggtttggggggcctcaaccctctcctggagcgcctgtgagatggtcagcgtggagcgcaagtgctggacaggtggcccgtgtgccccacagggatggctcaggggactgtccacctcacccctgcacctctcagcctctgccgccgggcacc

SEQ ID NO: 190877 - DNA, 2238 bp, Homo sapiens
  Payload ID: 17708
  Gene Name: thioredoxin reductase 2
  ENST ID: ENST00000491939
  CDS Start-End: 87-1007
agacagagggggcacagtgcgaggctgcagggcaggatgacctaacaagggccctgctatggcaacaagaaggacaggcacctgccatggaagcaggtcagcgggactatgatctcctggtggtcggcgggggatctggtggcctggcttgtgccaaggaggccgcccagctgggaaggaaggtggccgtggtggactacgtggaaccttctccccaaggcacccggtggggcctcggcggcacctgcgtcaacgtgggctgcatccccaagaagctgatgcaccaggcggcactgctgggaggcctgatccaagatgcccccaactatggctgggaggtggcccagcccgtgccgcatgactggaggaagatggcagaagctgttcaaaatcacgtgaaatccttgaactggggccaccgtgtccagcttcaggacagaaaagtcaagtactttaacatcaaagccagctttgttgacgagcacacggtttgcggcgttgccaaaggtgggaaagagattctgctgtcagccgatcacatcatcattgctactggagggcggccgagataccccacgcacatcgaaggtgccttggaatatggaatcacaagtgatgacatcttctggctgaaggaatcccctggaaaaacgttggtggtcggggccagctatgtggccctggagtgtgctggcttcctcaccgggattgggctggacaccaccatcatgatgcgcagcatccccctccgcggcttcgaccagcaaatgtcctccatggtcatagagcacatggcatctcatggcacccggttcctgaggggctgtgccccctcgcgggtcaggaggctccctgatggccagctgcaggtcacctgggaggacagcaccaccggcaaggaggacacgggcacctttgacaccgtcctgtgggccatagcaccttgcatctctgcgtgtctccccaccaccgtgggacatgctggaaaaaaccagagaagagactgagacggcatcagccaggtgtcctcatcgaggatcaactaggcaatcatcctcgccttccctggcccttgagcaattgcttattaaggtttcagcacataaatcctacttgtcaccttccaggtttaagtcttggtatgtttcttttctttttttttttttttttgagatggagtctcgctctgtcgcccaggctggagtgcagtggcaacctccgcctcccgggttcaagcgattctcctgcctcagcctcctgggtagctggggctacaggcgcccaccactacacctgactaatttttgtatttttagtagagacggggtttcaccatgtaggccaggatggtctcaatctcctgaccttgtgatccacctgccttggcctcccaaagtactgagattacaggtgtgagccaccgcacctggccagtatgtattttttctttagcatattaaatgttttgctgcttcaggctttccagctaggtttttttctttttttgcgtgtgaaacagggtctctctctgttgcctaggaggagtgtggtggtgtgatcatagctcactgcagcctccacctcccaggctcaatcaatcttcccatctcagccttctaagtgctgggattacaggtttgagctactgtgcccagccaagctagtttgttgtttttaacataaaaatgatatggatttgaaagttttaaaaattatggtgacatacacataacatcaaattcatcatcttaagcattttaaagtatatagttcagtggtgttaagtacgttcatattgtacaagcagcatgaccatccatctctagaacttttccattatctccaaactgagctctgtccccattaaacactcactccctgctgcccgggcactcacccttcactgtgtgtctctatggatctgactcctcgagggacttcatgtaagtagaatcatgcagtgtttgtccttttgtgactggctcatttctcttagcacaatgttttcagggtgcatccatgttgcagcatttgttagagttagcatttgtgtagcatgtgccagcatttccttcctgttgaaggctgagttgtatgtgtgtccattatctgtcagtggacacttaggttgcttccgtcttttggctgttgtggatcatgctgctgtgaacatgggtgtgcacaagccgcctgttttcagcacataaaaatgacacagagtttttaaagttctgtcca

SEQ ID NO: 190878 - DNA, 1129 bp, Homo sapiens
  Payload ID: 17708
  Gene Name: thioredoxin reductase 2
  ENST ID: ENST00000462330
  CDS Start-End: 281-778
ggaatgcgcaggctgcgctctgagtttatctccacggatctctatgcatttctggaatgccaaacaacatctgcatttcctgctgccatggtgattggcagcccatcccagaggacggtgctggaacccccaaggctgggcacaccctgggacggagggatctccagcacagcgacattctgatttggaatttgttatggactgtgacgtgcagatcaagctgcacgtcaggagcacatggaacgctttggggtccctttttagccggggattccagtgaatgaaaacggggcggcctgagctgacacccatagcgatcatggccgggaggctcctggtgcagcggctcttcggcgggtcctcagatctgatggactacgacaatgttcccacgaccgtcttcaccccgctggagtatggctgtgtggggctgtccgaggaggaggcagtggctcgccacgggcaggagcatgttgaggtctatcacgcccattataaaccactggagttcacggtggctggacgagatgcatcccagtgttatgtaaagatggtgtgcctgagggagcccccacagctggtgctgggcctgcatttccttggccccaacgcaggcgaagttactcaaggatttgctctggggatcaagtgtggggcttcctatgcgcaggtgatgcggaccgtgggtatccatcccacatgctctgaggaggtagtcaagctgcgcatctccaagcgctcaggcctggaccccacggtgacaggctgctgagggtaagcgccatccctgcaggccagggcacacggtgcgcccgccgccagctcctcggaggccagacccaggatggctgcaggccaggtttggggggcctcaaccctctcctggagcgcctgtgagatggtcagcgtggagcgcaagtgctggacaggtggcccgtgtgccccacagggatggctcaggggactgtccacctcacccctgcacctctcagcctctgccgccgggcacccccccccaggctcctggtgccagatgatgacgacctgggtggaaacctaccctgtgggcacccatgtccgagccccctggcatttctgcaatgcaaataaagagggtactttttctgaa

SEQ ID NO: 190879 - DNA, 1854 bp, Homo sapiens
  Payload ID: 17708
  Gene Name: thioredoxin reductase 2
  ENST ID: ENST00000474308
  CDS Start-End: 5-1396
gacgatggcggcaatggcggtggcgctgcggggattaggagggcgcttccggtggcggacgcaggccgtggcgggcggggtgcggggcgcggcgcggggcgcagcagcaggtcagcgggactatgatctcctggtggtcggcgggggatctggtggcctggcttgtgccaaggagggcacccggtggggcctcggcggcacctgcgtcaacgtgggctgcatccccaagaagctgatgcaccaggcggcactgctgggaggcctgatccaagatgcccccaactatggctgggaggtggcccagcccgtgccgcatgactggaggaagatggcagaagctgttcaaaatcacgtgaaatccttgaactggggccaccgtgtccagcttcaggacagaaaagtcaagtactttaacatcaaagccagctttgttgacgagcacacggtttgcggcgttgccaaaggtgggaaagagattctgctgtcagccgatcacatcatcattgctactggagggcggccgagataccccacgcacatcgaaggtgccttggaatatggaatcacaagtgatgacatcttctggctgaaggaatcccctggaaaaacgttggtggtcggggccagctatgtggccctggagtgtgctggcttcctcaccgggattgggctggacaccaccatcatgatgcgcagcatccccctccgcggcttcgaccagcaaatgtcctccatggtcatagagcacatggcatctcatggcacccggttcctgaggggctgtgccccctcgcgggtcaggaggctccctgatggccagctgcaggtcacctgggaggacagcaccaccggcaaggaggacacgggcacctttgacaccgtcctgtgggccataggtcgagtcccagacaccagaagtctgaatttggagaaggctggggtagatactagccccgacactcagaagatcctggtggactcccgggaagccacctctgtgccccacatctacgccattggtgacgtggtggaggggcggcctgagctgacacccatagcgatcatggccgggaggctcctggtgcagcggctcttcggcgggtcctcagatctgatggactacgacaatgttcccacgaccgtcttcaccccgctggagtatggctgtgtggggctgtccgaggaggaggcagtggctcgccacgggcaggagcatgttgaggtctatcacgcccattataaaccactggagttcacggtggctggacgagatgcatcccagtgttatgtaaagatggtgtgcctgagggagcccccacagctggtgctgggcctgcatttccttggccccaacgcaggcgaagttactcaaggatttgctctggggatcaagtgatgcggaccgtgggtatccatcccacatgctctgaggaggtagtcaagctgcgcatctccaagcgctcaggcctggaccccacggtgacaggctgctgagggtaagcgccatccctgcaggccagggcacacggtgcgcccgccgccagctcctcggaggccagacccaggatggctgcaggccaggtttggggggcctcaaccctctcctggagcgcctgtgagatggtcagcgtggagcgcaagtgctggacaggtggcccgtgtgccccacagggatggctcaggggactgtccacctcacccctgcacctctcagcctctgccgccgggcacccccccccaggctcctggtgccagatgatgacgacctgggtggaaacctaccctgtgggcacccatgtccgagccccctggcatttctgcaatgcaaataaagagggtactttttctgaagtg

SEQ ID NO: 190880 - DNA, 1086 bp, Homo sapiens
  Payload ID: 17708
  Gene Name: thioredoxin reductase 2
  ENST ID: ENST00000634537
  CDS Start-End: 1-1086
cagcaaatgtcctccatggtcatagagcacatggcatctcatggcacccggttcctgaggggctgtgccccctcgcgggtcaggaggctccctgatggccagctgcaggtcacctgggaggacagcaccaccggcaaggaggacacgggcacctttgacaccgtcctgtgggccataggtcgagtcccagacaccagaagtctgaatttggagaaggctggggtagatactagccccgacactcagaagatcctggtggactcccgggaagccacctctgtgccccacatctacgccattggtgacgtggtggaggggcggcctgagctgacacccatagcgatcatggccgggaggctcctggtgcagcggctcttcggcgggtcctcagatctgatggactacgacaatgttcccacgaccgtcttcaccccgctggagtatggctgtgtggggctgtccgaggaggaggcagtggctcgccacgggcaggagcatgttgaggtctatcacgcccattataaaccactggagttcacggtggctggacgagatgcatcccagtgttatgtaaagatggtgtgcctgagggagcccccacagctggtgctgggcctgcatttccttggccccaacgcaggcgaagttactcaaggatttgctctggggatcaagtgtggggcttcctatgcgcaggtgatgcggaccgtgggtatccatcccacatgctctgaggaggtagtcaagctgcgcatctccaagcgctcaggcctggaccccacggtgacaggctgctgagggatggctgcaggccaggtttggggggcctcaaccctctcctggagcgcctgtgagatggtcagcgtggagcgcaagtgctggacaggtggcccgtgtgccccacagggatggctcaggggactgtccacctcacccctgcacctctcagcctctgccgccgggcacccccccccaggctcctggtgccagatgatgacgacctgggtggaaacctaccctgtgggcacccatgtccgagccccctggcatttctgcaatgcaaataaagagggtactttttctgaa

SEQ ID NO: 190881 - DNA, 1131 bp, Homo sapiens
  Payload ID: 17709
  Gene Name: thioredoxin reductase 3
  ENST ID: ENST00000383572
  CDS Start-End: 480-881
gggctcacaaaacagctacttgatgacaccattggaattcaccccacatgtggggaggtgttcacgactttggaaatcacaaagtcgtcaggactagacatcactcagaaaggctgctgaggctaggcctgctgctgtttagttctccttgtcatattctcatttctctcaaagataagaatgctctcggataaaatgagcctgtgctcatgacagctgctctgttactcagggaccagtgcagggctgtcttacgacacttagatgagaaagtagacaaggaaagaggacagcagtgggcatctgccttgtggtcttgctgacagcgagaagcagtgggactgcttccttgacgccttagcttggagccccgttatgaggtcctctcagattgcagcgggatgtttcatgaaagcctagacccggaagaataggaggataggagactgcagcagctgacctctggaagccagagctggatgagggacctgagcgagaggagacttgggcagccggagctgaaagctgagcagcagatgccactggagcctgtgagggcacgattgagtgtggggctggcttgctgctgctcccacaccactgcagaggcgtcctctctggaacatggagacaaggtttttggacaggggtttcccagtcccctggaagagattaagagactactgaagatctccagggcactgcaagccagatctgtaccctccacccaggagaaggcaaaatgtctttctggagagcctgggcagccagaggggaaaggtcaagaaacctatcctggccctgggaaagtggagggtaaggcagagccagccatgagaaaggatgatgtttgcccaggcatgaaatgtatcagcggatgatctctcacatggaagaagccaaagcagctacacccaatggcttagcaataagaaacaccaaaccagacaaacaccactgctgctgggaaagggacctggcagaaggaaaaggctgttcagagagcagaggtatttcgtgtgagccttttagggcttcttgtctctttagaccacatgcacatattacttgtataaaataatgcaccagatacaaacaatgaaatacaagtgctgagttcgatagactcat

SEQ ID NO: 190882 - DNA, 1134 bp, Homo sapiens
  Payload ID: 17709
  Gene Name: thioredoxin reductase 3
  ENST ID: ENST00000519162
  CDS Start-End: 1-126
gggctcacaaaacagctacttgatgacaccattggaattcaccccacatgtggggaggtgttcacgactttggaaatcacaaagtcgtcaggactagacatcactcagaaaggctgctgaggctaggcctgctgctgtttagttctccttgtcatattctcatttctctcaaagataagaatgctctcggataaaatgagcctgtgctcatgacagctgctctgttactcagggaccagtgcagggctgtcttacgacacttagatgagaaagtagacaaggaaagaggacagcagtgggcatctgccttgtggtcttgctgacagcgagaagcagtgggactgcttccttgacgccttagcttggagccccgttatgaggtcctctcagattgcagcgggatgtttcatgaaagcctagacccggaagaataggaggataggagactgcagcagctgacctctggaagccagagctggatgagggacctgagcgagaggagacttgggcagccggagctgaaagctgagcagcagatgccactggagcctgtgagggcacgattgagtgtggggctggcttgctgctgctcccacaccactgcagaggcgtcctctctggaacatggagacaaggtttttggacaggggtttcccagtcccctggaagagattaagagactactgaagatctccagggcactgcaagccagatctgtaccctccacccaggagaaggcaaaatgtctttctggagagcctgggcagccagaggggaaaggtcaagaaacctatcctggccctgggaaagtggagggtaaggcagagccagccatgagaaaggatgatgtttgcccaggcatgaaatgtatcagcggatgatctctcacatggaagaagccaaagcagctacacccaatggcttagcaataagaaacaccaaaccagacaaacaccactgctgctgggaaagggacctggcagaaggaaaaggctgttcagagagcagaggtatttcgtgtgagccttttagggcttcttgtctctttagaccacatgcacatattacttgtataaaataatgcaccagatacaaacaatgaaatacaagtgctgagttcgatagactcataca

SEQ ID NO: 190883 - DNA, 2329 bp, Homo sapiens
  Payload ID: 17709
  Gene Name: thioredoxin reductase 3
  ENST ID: ENST00000523403
  CDS Start-End: 112-1935
gtggccagcgagggcagcgttcgccgcccctcaggccccgtcccggcgccgcagccgcctgcgtttcggtttgtgagcaggcccggccgggccaggagcgagagcgagactctggagcggtcgccgccgcagtcgcccgggccgggaaaggcgggcgatgcccccaaccgccgctcgggccatgtccgaggggcgcgcgtgttgtcgccgccggggcgccgtgcccgcctgtcgtcccccgggcccagccgctcgtccgaggcccgcgaggagctgcgccgccacctcgtgggcctcatcgagcgcagccgggtggtgatcttcagcaagagctactgtccccatagtactcgggtgaaagaactcttttcttctttgggagtcgaatgtaatgtcttggaacttgatcaagttgatgatggggccagggttcaagaagtgctgtcagaaatcactaatcagaaaactgtgcccaatattttcgtgaataaagtgcatgtaggtggatgtgaccaaactttccaggcatatcagagtggtttgttacagaagctccttcaggaagatttggcatatgattatgatctcatcatcatcggtggtggttctggaggcctttcatgtgcgaaggaagctgccattttgggaaagaaagttatggtgctagactttgttgtcccgtcacctcagggcacatcctggggtcttggtggcacttgtgtaaatgtaggttgtattcctaagaaattgatgcatcaggctgcccttttggggcaggcattatgtgactcaaggaaatttggctgggaatataatcaacaagtgaggcacaactgggagacaatgacaaaagcgattcagaaccacatcagctctctaaactggggctacaggttgtctctgagggaaaaggctgtggcctatgtcaattcctatggagaatttgttgaacatcataaaataaaggcaaccaataaaaaaggacaggagacttattatactgctgcacagtttgtcatagcaacgggtgaaaggccacggtatttaggaatccaaggagataaagaatactgtattactagtgatgaccttttttctctgccttattgccctggcaaaacattagtggtgggtgcctcttatgttgccctggagtgtgcagggtttctggctggctttggcctagatgtcacagttatggtacgctcaatccttctccgtggcttcgaccaagaaatggcagaaaaagtgggttcctacatggagcagcatggtgtgaagttcctacggaaattcatacctgtgatggttcaacagttggagaaaggttcacctggaaagctgaaagtgttggctaaatccactgaaggaacagaaacaattgaaggagtctataacacagttttgttagctattggtcgtgactcctgtacaaggaaaataggcttggagaagattggtgtcaaaattaatgagaagagtggaaaaatacctgtaaatgatgtggaacagaccaatgtgccatatgtctatgctgttggtgatattttggaggataagccagagctcactcctgtcgccatacagtcaggcaagctgctagctcagagactttttggggcctctttagaaaagatatatcatactttgttctggcctcttgaatggacagtagctggcagagagaacaacacttgttatgcaaagataatctgcaataaattcgaccatgatcgggtgataggatttcatattcttggaccaaacgccggtgaggttacccaaggatttgcagctgcaatgaaatgtgggctcacaaaacagctacttgatgacaccattggaattcaccccacatgtggggaggtgttcacgactttggaaatcacaaagtcgtcaggactagacatcactcagaaaggctgctgaggctaggcctgctgctgtttagttctccttgtcatattctcatttctctcaaagataagaatgctctcggataaaatgagcctgtgctcatgacagctgctctgttactcagggaccagtgcagggctgtcttacgacacttagatgagaaagtagacaaggaaagaggacagcagtgggcatctgccttgtggtcttgctgacagcgagaagcagtgggactgcttccttgacgccttagcttggagccccgttatgaggtgagccaaggctgactctcgcaagccaggactgagcttccctcggaaagacctttgagtggcaccattcacctaagttagcttttctggtcgctattgtttttatcccctttgctttgttgtttctgtgaaaatatatt

SEQ ID NO: 190884 - DNA, 2950 bp, Homo sapiens
  Payload ID: 17709
  Gene Name: thioredoxin reductase 3
  ENST ID: ENST00000524230
  CDS Start-End: 166-2097
ggtgttggggggcggggcgagcggctgcctcgcggattcgcgcgggtggtgagagtggccagcgagggcagcgttcgccgcccctcaggccccgtcccggcgccgcagccgcctgcgtttcggtttgtgagcaggcccggccgggccaggagcgagagcgagactctggagcggtcgccgccgcagtcgcccgggccgggaaaggcgggcgatgcccccaaccgccgctcgggccatgtccgaggggcgcgcgtgttgtcgccgccggggcgccgtgcccgcctgtcgtcccccgggcccagccgctcgtccgaggcccgcgaggagctgcgccgccacctcgtgggcctcatcgagcgcagccgggtggtgatcttcagcaagagctactgtccccatagtactcgggtgaaagaactcttttcttctttgggagtcgaatgtaatgtcttggaacttgatcaagttgatgatggggccagggttcaagaagtgctgtcagaaatcactaatcagaaaactgtgcccaatattttcgtgaataaagtgcatgtaggtggatgtgaccaaactttccaggcatatcagagtggtttgttacagaagctccttcaggaagatttggcatatgattatgatctcatcatcatcggtggtggttctggaggcctttcatgtgcgaaggaagctgccattttgggaaagaaagttatggtgctagactttgttgtcccgtcacctcagggcacatcctggggtcttggtggcacttgtgtaaatgtaggttgtattcctaagaaattgatgcatcaggctgcccttttggggcaggcattatgtgactcaaggaaatttggctgggaatataatcaacaagtgaggcacaactgggagacaatgacaaaagcgattcagaaccacatcagctctctaaactggggctacaggttgtctctgagggaaaaggctgtggcctatgtcaattcctatggagaatttgttgaacatcataaaataaaggcaaccaataaaaaaggacaggagacttattatactgctgcacagtttgtcatagcaacgggtgaaaggccacggtatttaggaatccaaggagataaagaatactgtattactagtgatgaccttttttctctgccttattgccctggcaaaacattagtggtgggtgcctcttatgttgccctggagtgtgcagggtttctggctggctttggcctagatgtcacagttatggtacgctcaatccttctccgtggcttcgaccaagaaatggcagaaaaagtgggttcctacatggagcagcatggtgtgaagttcctacggaaattcatacctgtgatggttcaacagttggagaaaggttcacctggaaagctgaaagtgttggctaaatccactgaaggaacagaaacaattgaaggagtctataacacagttttgttagctattggtcgtgactcctgtacaaggaaaataggcttggagaagattggtgtcaaaattaatgagaagagtggaaaaatacctgtaaatgatgtggaacagaccaatgtgccatatgtctatgctgttggtgatattttggaggataagccagagctcactcctgtcgccatacagtcaggcaagctgctagctcagagactttttggggcctctttagaaaagtgtgattatattaatgttccgactacagtgtttactcctctggagtatggttgctgtggattatctgaagagaaagctattgaagtatataaaaaagagaatctagaaatatatcatactttgttctggcctcttgaatggacagtagctggcagagagaacaacacttgttatgcaaagataatctgcaataaattcgaccatgatcgggtgataggatttcatattcttggaccaaacgccggtgaggttacccaaggatttgcagctgcaatgaaatgtgggctcacaaaacagctacttgatgacaccattggaattcaccccacatgtggggaggtgttcacgactttggaaatcacaaagtcgtcaggactagacatcactcagaaaggctgctgaggctaggcctgctgctgtttagttctccttgtcatattctcatttctctcaaagataagaatgctctcggataaaatgagcctgtgctcatgacagctgctctgttactcagggaccagtgcagggctgtcttacgacacttagatgagaaagtagacaaggaaagaggacagcagtgggcatctgccttgtggtcttgctgacagcgagaagcagtgggactgcttccttgacgccttagcttggagccccgttatgaggtgagccaaggctgactctcgcaagccaggactgagcttccctcggaaagacctttgagtggcaccattcacctaagttagcttttctggtcgctattgtttttatcccctttgctttgttgtttctgtgaaaatatattttcagttaagaaatgctataaagtagtggttttctagtgcgtgggcctagaattcacacatgctcactggtgaacagtgtctgtgggctgctgtgggctgcatttggatagctgtctgcattagcaggaagctgtacacactgtgtagggttagtcatctcttttcttttttgaggcacatttaacctactgtcaaaacgctgactcatgcttcaccctcacactcactacttggtggtgataaccttgaagctattctcccctaattaatatctcgagactgagcaaaatatctcatgtaagataaaagtacttgaattgctttttcatgttcatcttaatagtattatttccaaaagtttttaatactgtattatgtgaaatctaactaatttatctgtgaaataattccatcacagtctgtttaatgatgataaagttccataaatgaatacaggt

SEQ ID NO: 190885 - DNA, 725 bp, Homo sapiens
  Payload ID: 17709
  Gene Name: thioredoxin reductase 3
  ENST ID: ENST00000518740
  CDS Start-End: 58-309
gaagatcacagtgaaggataatctgatgaaggaacattgacaaatggacagcctagaatgcaccgttaccgtggaaaacgactgcacatcttgcttcccatcttggatcgggtgataggatttcatattcttggaccaaacgccggtgaggttacccaaggatttgcagctgcaatgaaatgtgggctcacaaaacagctacttgatgacaccattggaattcaccccacatgtggggaggtgttcacgactttggaaatcacaaagtcgtcaggactagacatcactcagaaaggctgctgaggctaggcctgctgctgtttagttctccttgtcatattctcatttctctcaaagataagaatgctctcggataaaatgagcctgtgctcatgacagctgctctgttactcagggaccagtgcagggctgtcttacgacacttagatgagaaagtagacaaggaaagaggacagcagtgggcatctgccttgtggtcttgctgacagcgagaagcagtgggactgcttccttgacgccttagcttggagccccgttatgaggtgagccaaggctgactctcgcaagccaggactgagcttccctcggaaagacctttgagtggcaccattcacctaagttagcttttctggtcgctattgtttttatcccctttgctttgttgtttctgtgaaaatatattttcagttaagaaatgctataaa

SEQ ID NO: 190886 - DNA, 738 bp, Homo sapiens
  Payload ID: 17710
  Gene Name: thioredoxin reductase 3 neighbor
  Uniprot ID: Q6F5E7
  ENST ID: ENST00000404489
  CDS Start-End: 94-495
tcagattgcagcgggatgtttcatgaaagcctagacccggaagaataggaggataggagactgcagcagctgacctctggaagccagagctggatgagggacctgagcgagaggagacttgggcagccggagctgaaagctgagcagcagatgccactggagcctgtgagggcacgattgagtgtggggctggcttgctgctgctcccacaccactgcagaggcgtcctctctggaacatggagacaaggtttttggacaggggtttcccagtcccctggaagagattaagagactactgaagatctccagggcactgcaagccagatctgtaccctccacccaggagaaggcaaaatgtctttctggagagcctgggcagccagaggggaaaggtcaagaaacctatcctggccctgggaaagtggagggtaaggcagagccagccatgagaaaggatgatgtttgcccaggcatgaaatgtatcagcggatgatctctcacatggaagaagccaaagcagctacacccaatggcttagcaataagaaacaccaaaccagacaaacaccactgctgctgggaaagggacctggcagaaggaaaaggctgttcagagagcagaggtatttcgtgtgagccttttagggcttcttgtctctttagaccacatgcacatattacttgtataaaataatgcaccagatacaaacaatgaaatacaagtgctgagttcgata

SEQ ID NO: 190887 - DNA, 6894 bp, Homo sapiens
  Payload ID: 17711
  Gene Name: thioredoxin-like 1
  Uniprot ID: O43396
  ENST ID: ENST00000217515
  CDS Start-End: 206-1075
tcccccatccctccccgccccctcggccgctccgctccctggcgtgactcggcactgagagtcccgggagaagactcggcggtcgccacctcttctgtccaggcctcggccttcctgagcatctctccttcctctcccagatcgtcttctccttcagtttcaaagccagtggcgtcgcggccaccctgccgggctctctgtgaggatggtgggggtgaagcccgtcgggagcgacccggatttccagccagagctgagcggcgcgggctccagactcgccgtggtcaagttcaccatgagagggtgtgggccatgtttgaggattgccccagcattcagttctatgagtaataaatatccacaggctgttttcttggaagtcgatgtacatcagtgtcagggaacagctgccaccaacaatatatcagcaacacctacatttttgttttttcgaaacaaagtgagaattgatcaatatcaaggagcagatgctgtgggattagaagaaaaaatcaagcagcacttagaaaatgaccctggaagcaatgaggacacagatattccaaaaggctatatggatttaatgccttttattaacaaagctggttgtgaatgtcttaatgaaagtgatgagcatggatttgacaactgtttacgaaaagacacaaccttcttggaatctgactgtgatgaacagctgcttattactgtggcattcaatcaacctgttaagctttattccatgaaatttcaagggccagataatggtcagggccctaaatatgtaaaaatttttatcaacctaccccgatctatggattttgaagaggcagaaagaagtgaaccaactcaagctctggaactgacagaggatgatattaaagaagatggcattgttccacttcgttatgttaagtttcagaatgttaacagtgtaactatatttgttcagtcgaatcaaggtgaagaggaaacaacaagaatttcatattttacttttattggtactccagtccaggcaacaaatatgaatgacttcaaacgagtagttggcaaaaaaggagaaagccactaaggtacaaaagacactggacaaccatattgcaatcagatctacagctcctggataattgcttgattctcgccagagactgtcaatgtttcattcattgccattaccaataaatcattgcttttgttcagatggtatcactagtgtttccattgtaatcttgacacatgcaattgtaaataaaagtcaccacttttgccaagcttaatttttgtctttctaaatcagtattttctctttccatgtatttgaaaactggttaacttctgattttagtagagacttaagtgtctggtagtatattgattgaaagccagtttctttagaaaaggagaaactgttctagggaattaagaagtacatgtgtacacattcatggcaagttattttgataagtgaacctggaacagctaaccatgttaaattattactgcatttttattaaaggacatttgtatatctgagctatggaaattactcaaattataaattagaagaaataaacaggtttaatgagatttagctactcttacctaaaacttagctaatgggtccacagattctttcttggtatatatcaagattttaatctcttctggtaaactttaaaatttgagtcagcctttttttttttttttttttttttaactaatagaagaatgtggaaatcagacagttggggaaaaaatacagcatagtgaattcagaaaacaggaattggccaggtgtggtggctaatgtctgtaatcccagtactttgggaggccaaggcgggcgaatcaccagaggtcaggagttcgagtccagcttggccaacatggtgaaacctcgtctctactaaaaatacaaaaattagccaggcatggtggcgggtgtctgtaatcccagctacttgggaggctgagacagaagaatcggctgaacccgggaggcagaggttgcagtgagctgagattgcgccattgcgccccagcctgagcgacaagagcaaaactccgtctccaaaaaaaaaagggaattattacccttaatcaagtatttattacctgaactaccaaaacgtgcagtgtaaatatacagagaacatgatttaaggttgaaaatgaggtgctcaaatagaaatgtttaaaaggtctttcacaaaaggctggtaaaatacctattcgttaccttttttatcttaaaattgtaatctaaaaagtattggtagttttaattttaaaatttctgagtattttgaaaactatttttaaagagtacataagactgtaaaattgtgattcagttaaacatttgagggcattcttgtctaggaatatggtagagataccatttgcctttgtgagagcagtgtgtttatacttgtttatgaaaaaattctacagaagttttagtgttgaaagagtccctttctgaaacccaagtgtcattagatagtttagttcatttgtatatgggcacattaactggtctgtgatgatcttaacactccttaaatagaccatctcagattaatcacatctgaaattaaggataagattaatatgcagggttttggtttacagttttgtacacttaacctttctgagtaattgttaaagtgcctcatcctaagtattgctgaccttttcctatttatacttgatagtttgaaaacccagtgaaacaaatttcgtatttgtaaaggattggacatcagatttatattgtctatgtgactcttctataacaattagttgcagtatgcaagtattacataattcaaattgtaaatagtgaaaaatgaacgtttataggtaactataacgtttcacttaatgggaaatcttactattataaatgtgcataattggcatttaaaatatcaaactgaaatgctgttttctcctaaaacagtatatatatatacacacatatgtatatgtaacatttatatataacactgaattttccagatgaataagagcatttgaaaaaatgtaactctagttattttaactgaagttatttattagtgcatctagaaaactggtattcagtttcttgttcattttgtcggacatagcaaaaaagaatttcatgatctctgtattttgatacattgacatcaggtgcttttgatgagaaacaacagtgaaatatcgtgttcataatagaaacgaaagtcaggtattgcagtaggaagtctttgtcagcttaatgctgaagccaagagtagcacaaggtaccacattcttgtgcccacgacaggcttttataatccttctgagttctctttgacatcaagccccacgttgttccccagtctcaatattctgttggaggcagccacgtaacaattagagttgaaacctgccccacgttgttccccagtctcaatatactgttggaggcagccacgtaacaattagagttgaaacctgccccacgttgttccccagtctcaatatactgttggaggcagccacataacaattagagttgaaacctgccccacgttgttccccagtctcaatattctgttggaggcagccacgtaacaattagagttgaaacctgccccacattgttccccagtctcaatattctgttggaggcagccacgtaacaattagagttgaaacctgccccactttgttccccagtctcaatattctgttggaggcagccacgtaacaattagagttgaaacctgccccacattgttccccagtctcaatattctgttggaggcagccacttaacaattagagttgaaacctgtctgccatcctttgtctcaatgtttgaggatgtatgcagtgtttttggcagcgattataggaatgcagttgtttatttggcctcagcagtttatttatggctgcaattaatatccctgatcatgggcttttaaacctaaaatagttcagatcctcccttgttcctcttaatgtctaaaagctttgattctgtaataagaataaagtgttggagttgaataaattagttacaccctttgtaagctttaaaaacatgaaatttaaggcttactcatgttgcttgtattgatactcatatagttcaatttagtaggttaatttttgtgttaggtatatctcttctggaactgataatttgtaatcttagactattttttttttaagataagtaacttagagtaagaaatccagctgggaacagtggctcatgcctgtaatcccagcattttgggaggccgaggcggctggatcacttgaggtcaggagtttgagaccagcctggctaacatggagaaaccctgtctctactaaaaatacaaaaaattagccaggcatggtggcaggtgccacacccagctacttgggaggctgaggcagtagaatcgcttgaacccgggaggcggaggttgcagtgagccaagatcgcatgactgcacactagcccgggcaacagagtgagactgtctcaaaagaaaaaaaaaaaaaatccattcacagaactgctaaagaaaaactagaggaatattttgctcatttagctttaaaactcattattagaggtgtgtattttacagttttgtaaatatagattatgctttataatacacataaagcaagtatatataacatgcatatagtaaataaattttaaaatattgactattccccagttaagcctatacttcttaaggaagactactgatgtcattttaagcatgtttcaaaattcaagttttatttttgatcaataaggtttttttttttttttaacatgctcagcactataggaataagaggacagtggagatttgtaggctaataagatcgcttttaaactttgtggtccatgtaaaattattagttggagaatgtgtaattagagaactataagataaagagataacctttagaatttgaatgtactaaaattgtacacagcttggaatattaaaatcttaaggatatgcaatgttaaaactgctagagtatttttccttcgtgcttgctatgcttctctatgggaagaggaattttattttggaattatttctaagttgaacagaccagaattaattgtgaaaacatgatctgttggtttataattggacacgcatttggagatactggctcatcatactacctaggagcaaaatctctgaagtttgaatccctgctcttccacttgttagctgtgtcatcttgagcaagtaacatccttcagagctcaaatttcttcttgtgtaaaaataggaacatctatctcttagacttgttctgaagatgcgccttactttgtatctggaacaaggataagtatcttctgtatcctgctctcagctgtcactgctttttaggccatcattacttgcttggcatactgcagtgcctcctaattgtctctttgtttctgctctggcctctctcatgtatcccccacatggccgctggttctcttttctttatggggtctttgtaatgtaatctctcctcctctagcctccccatgcccctcatttctccagtgtgctgtgctgtattaccaggtagcagaacgtaccctaatatcgcatgccttcctctgacctaacttttccatctgaccaattcctacttatctacaaggctcagtccaaggaaaactgataccgggaataatcataacaattgtgcacgcctcctcagctgctatgacaccttgccattatttcatccggatacttatcaagctacttgtaatgatctgtagtcttatttggactactagattgtgagctgtaatacaagtattttgtctctagtattaagccagtttatttggtttctatcattaaatacaatgttgaaaaaattctcagggtccaaggggagatgcttgggttgagtcagagataaagtaggaatatgcagttgaggaaggtaaggaagataatttagctgaagtaaaggaaaagtgcatagtgtgttcatagagtgggagttaagtgtaagagacattctagggaagtgaaggagaagctgaaagagcaagtagagacggtaaggtgaagctcctcttgccatgtgaaagagatcaaactttctccttaatttatgggaggagcgagcatagagaagtctgtgatgtctcacaaggttctcacttttacaattgaatatagaagtagctcttaggagaagcagaacgttcagaggggaagatgaatatggttttgggtacattgccttaaattgcatttttggtatttgggtggcgatgtctagtaagtaaaaagccaggaatgtgattttagagcttagagctagaagcaaggaactaggagttgtttagatgatgaaaactgaaatatgtatatgaatgggaatttttagaatataaagggagagaatgaaactaaggagcaaatgttagggaatcctaagaaatattaaagaattgggaaaagaggaacctggaaggtagagtagtaaacaggaaagggaggaaaaacaggaggtggtaataaagtagtgttaatgaatccaagagggagcagtcaccatcttcaaatgtgatattgaaattagctgggatgtccagttgtttaatccattaaattgtggaaacagtctttctagtgcttaattataggaatcattgatcatattaataaactttcagttgaagcatcagcagataattattccaaaaccctctggcaaagaaatgtagatgcttttatagtctaccattgaacacagttttacatgacacttggcaaaacttggagatggatggcactattttgtaagagaatatgaaacactgctttgaagttgtcattaaaggatcttatcaggtgc

SEQ ID NO: 190888 - DNA, 1339 bp, Homo sapiens
  Payload ID: 17711
  Gene Name: thioredoxin-like 1
  Uniprot ID: O43396
  ENST ID: ENST00000590954
  CDS Start-End: 265-1134
ccaagatggagcgaaggatgaagtagcaagtgcacgtctttcttgggagcaggatgttgcgcaagtttacacttctgaccccatcacactgcttcccactgagatgcaagagaggattcctcatcttccagatgtgcaggctgaaatatttatggatgaaattgtcagatgcctagcatttgctccatgataatctgagatcgtcttctccttcagtttcaaagccagtggcgtcgcggccaccctgccgggctctctgtgaggatggtgggggtgaagcccgtcgggagcgacccggatttccagccagagctgagcggcgcgggctccagactcgccgtggtcaagttcaccatgagagggtgtgggccatgtttgaggattgccccagcattcagttctatgagtaataaatatccacaggctgttttcttggaagtcgatgtacatcagtgtcagggaacagctgccaccaacaatatatcagcaacacctacatttttgttttttcgaaacaaagtgagaattgatcaatatcaaggagcagatgctgtgggattagaagaaaaaatcaagcagcacttagaaaatgaccctggaagcaatgaggacacagatattccaaaaggctatatggatttaatgccttttattaacaaagctggttgtgaatgtcttaatgaaagtgatgagcatggatttgacaactgtttacgaaaagacacaaccttcttggaatctgactgtgatgaacagctgcttattactgtggcattcaatcaacctgttaagctttattccatgaaatttcaagggccagataatggtcagggccctaaatatgtaaaaatttttatcaacctaccccgatctatggattttgaagaggcagaaagaagtgaaccaactcaagctctggaactgacagaggatgatattaaagaagatggcattgttccacttcgttatgttaagtttcagaatgttaacagtgtaactatatttgttcagtcgaatcaaggtgaagaggaaacaacaagaatttcatattttacttttattggtactccagtccaggcaacaaatatgaatgacttcaaacgagtagttggcaaaaaaggagaaagccactaaggtacaaaagacactggacaaccatattgcaatcagatctacagctcctggataattgcttgattctcgccagagactgtcaatgtttcattcattgccattaccaataaatcattgcttttgttcagatggtatcactagtgtttccattgtaatcttgacacatgcaattgtaaataaaagtcaccacttttgccaagcttaa

SEQ ID NO: 190889 - DNA, 896 bp, Homo sapiens
  Payload ID: 17711
  Gene Name: thioredoxin-like 1
  ENST ID: ENST00000589329
  CDS Start-End: 815-896
ggagaagcttgaaagcccccttacctgtcacagcttcatctcatgccgcgatgtagcctatcagaccgccggtgggcgccccagccaaggaggacaaggatagggcggaactacggaggatgcggggtgcgtagatcctgctgggataatccgtggggcggcaagcgctatacagccgccgtctccccagtgatactgcaaggtgccggtgccgccgccgccgccactgcagtaaatcagctgacaccagccccaactgccgtgactttcgctgcaactgtcgcaaaaatgagggggcgggaaagactcaccatttccctacttgcaaggcctaagccggcgccgagagagccagccgcgttacgatggagaccgaaagtggagaaaaggccagctgtgggcaaggagtgcacggccgccatcttggttgtgggaagtctcgtctaggctgtcctctctccagttgggaggaccaagatggagcgaaggatgaagtagcaagtgcacgtctttcttgggagcaggatgttgcgcaagtttacacttctgaccccatcacactgcttcccactgagatgcaagagaggattcctcatcttccagatgtgcaggctgaaatatttatggatgaaattgtcagatgcctagcatttgctccatgataatctgagacctgccccgaatacagtacaggagcatcttcaaagtacttccagtgggtgccctggacagcagctaagaaccccgggatcgtcttctccttcagtttcaaagccagtggcgtcgcggccaccctgccgggctctctgtgaggatggtgggggtgaagcccgtcgggagcgacccggatttccagccagagctgagcggcgcgggctccagactcgccgtggtca

SEQ ID NO: 190890 - DNA, 466 bp, Homo sapiens
  Payload ID: 17711
  Gene Name: thioredoxin-like 1
  ENST ID: ENST00000589931
  CDS Start-End: 1-311
atgatattaaagaagatggcattgttccacttcgttatgttaagtttcagaatgttaacagtgtaactatatttgttcagtcgaatcaaggtgaagaggaaacaacaagaatttcatattttacttttattggtactccagtccaggcaacaaatatgaatgacttcaaacgacacctgtctgctctcacccttcccatgttctcgccattgttggtgcaagatttctacagcttctatcatctggatcagccttgttacctagaaaatacacattggcaagttgagagttatcaacctgtgaaacagtagttggcaaaaaaggagaaagccactaaggtacaaaagacactggacaaccatattgcaatcagatctacagctcctggataattgcttgattctcgccagagactgtcaatgtttcattcattgccattaccaataaatcattgcttttgttcaga

SEQ ID NO: 190891 - DNA, 934 bp, Homo sapiens
  Payload ID: 17711
  Gene Name: thioredoxin-like 1
  ENST ID: ENST00000587613
  CDS Start-End: 519-934
cttgaaagcccccttacctgtcacagcttcatctcatgccgcgatgtagcctatcagaccgccggtgggcgccccagccaaggaggacaaggatagggcggaactacggaggatgcggggtgcgtagatcctgctgggataatccgtggggcggcaagcgctatacagccgccgtctccccagtgatactgcaaggtgccggtgccgccgccgccgccactgcagtaaatcagctgacaccagccccaactgccgtgactttcgctgcaactgtcgcaaaaatgagggggcgggaaagactcaccatttccctacttgcaaggcctaagccggcgccgagagagccagccgcgttacgatggagaccgaaagtggagaaaaggccagctgtgggcaaggagtgcacggccgccatcttggttgtgggaagtctcgtctaggctgtcctctctccagttgggaggaccaagatggagcgaaggatgaagtagcaagtgcacgtctttcttgggagcaggatgttgcgcaagtttacacttctgaccccatcacactgcttcccactgagatgcaagaggtgtgggccatgtttgaggattgccccagcattcagttctatgagtaataaatatccacaggctgttttcttggaagtcgatgtacatcagtgtcagggaacagctgccaccaacaatatatcagcaacacctacatttttgttttttcgaaacaaagtgagaattgatcaatatcaaggagcagatgctgtgggattagaagaaaaaatcaagcagcacttagaaaatgaccctggaagcaatgaggacacagatattccaaaaggctatatggatttaatgccttttattaacaaagctggttgtgaatgtcttaatgaaagtgatgagcatggatttgacaactgtttacgaaa

SEQ ID NO: 190892 - DNA, 2035 bp, Homo sapiens
  Payload ID: 17711
  Gene Name: thioredoxin-like 1
  ENST ID: ENST00000587807
  CDS Start-End: 858-1067
aaggcctaagccggcgccgagagagccagccgcgttacgatggagaccgaaagtggagaaaaggccagctgtgggcaaggagtgcacggccgccatcttggttgtgggaagtctcgtctaggctgtcctctctccagttgggaggaccaagatggagcgaaggatgaagtagcaagtgcacgtctttcttgggagcaggatgttgcgcaagtttacacttctgaccccatcacactgcttcccactgagatgcaagagacctgccccgaatacagtacaggagcatcttcaaagtacttccagtgggtgccctggacagcagctaagaaccccggggtaaaacgagtttcctctctactgttacaaatcagaaacctcctccgtaaaagcctcagatctgggaaacgcggatgcatatgccaacttttgagtctcagtctgcgcctgcgcacgtgacctctacacgtctcctctgcgcctgcgccgctcaagttagcgcgaggctactcagtcgagggtgggactacgcttcgcgttttgggattgggcgctgaaggccaaaccggacgacgcggaaatgacgtcacgccgggggccctgccgcgcggtggctgctgggtgccgcacgccttcccatcctcctcctctcccctcccccatccctccccgccccctcggccgctccgctccctggcgtgactcggcactgagagtcccgggagaagactcggcggtcgccacctcttctgtccaggcctcggccttcctgagcatctctccttcctctcccagatcgtcttctccttcagtttcaaagccagtggcgtcgcggccaccctgccgggctctctgtgaggatggtgggggtgaagcccgtcgggagcgacccggatttccagccagagctgagcggcgcgggctccagactcgccgtggtcaagttcaccatgagagggtgtgggccatgtttgaggattgccccagcattcagttctatgagtaataaatatccacaggctgttttcttggaagtcgatgtacatcagtgtcagtacttattcctttgaagataggaagatgttatgttgatgtcattattacagatgtcattatggctgcattagttaagaagagtagcacattattaattgcttcagggaacagctgccaccaacaatatatcagcaacacctacatttttgttttttcgaaacaaagtgagaattgatcaatatcaaggagcagatgctgtgggattagaagaaaaaatcaagcagcacttagaaaatgaccctggaagcaatgaggacacagatattccaaaaggctatatggatttaatgccttttattaacaaagctggttgtgaatgtcttaatgaaagtgatgagcatggatttgacaactgtttacgaaaagacacaaccttcttggaatctgactgtgatgaacagctgcttattactgtggcattcaatcaacctgttaagctttattccatgaaatttcaagggccagataatggtcagggccctaaatatgtaaaaatttttatcaacctaccccgatctatggattttgaagaggcagaaagaagtgaaccaactcaagctctggaactgacagaggatgatattaaagaagatggcattgttccacttcgttatgttaagtttcagaatgttaacagtgtaactatatttgttcagtcgaatcaaggtgaagaggaaacaacaagaatttcatattttacttttattggtactccagtccaggcaacaaatatgaatgacttcaaacgagtagttggcaaaaaaggagaaagccactaaggtacaaaagacactggacaaccatattgcaatcagatctacagctcctggataattgcttgattctcgccagagactgtcaatgtttcattcattgccattaccaataaatcattgcttttgttcagatggtatcactagtgtttccattgtaatcttgacacatgcaattgtaaataaaagtcaccacttttgccaagctt

SEQ ID NO: 190893 - DNA, 3541 bp, Homo sapiens
  Payload ID: 17711
  Gene Name: thioredoxin-like 1
  ENST ID: ENST00000586262
  CDS Start-End: 1-845
agcccgtcgggagcgacccggatttccagccagagctgagcggcgcgggctccagactcgccgtggtcaagttcaccatgagagggtgtgggccatgtttgaggattgccccagcattcagttctatgagtaataaatatccacaggctgttttcttggaagtcgatgtacatcagtgtcagggaacagctgccaccaacaatatatcagcaacacctacatttttgttttttcgaaacaaagtgagaattgatcaatatcaaggagcagatgctgtgggattagaagaaaaaatcaagcagcacttagaaaatgaccctggaagcaatgaggacacagatattccaaaaggctatatggatttaatgccttttattaacaaagctggttgtgaatgtcttaatgaaagtgatgagcatggatttgacaactgtttacgaaaagacacaaccttcttggaatctgactgtgatgaacagctgcttattactgtggcattcaatcaacctgttaagctttattccatgaaatttcaagggccagataatggtcagggccctaaatatgtaaaaatttttatcaacctaccccgatctatggattttgaagaggcagaaagaagtgaaccaactcaagctctggaactgacagaggatgatattaaagaagatggcattgttccacttcgttatgttaagtttcagaatgttaacagtgtaactatatttgttcagtcgaatcaaggtgaagaggaaacaacaagaatttcatattttacttttattggtactccagtccaggcaacaaatatgaatgacttcaaacgagtaagtttgcttaaatgatacttcgggatagtaaaaatataattttaatggaataatttcatgtatctcaactgtcacactttcttttaacaaaataattcaaaattatatcatgtcatgaaattttacaaggctaaactaggatagaaagttcccctaactatatttttagatatccaacaaagtaatctttaataaaaaatgatgtcttaactgataaaagagtcttttaatgaatgacatcaacataagggtaaaaataatggcttggttatagaaagtggttagtaataatggaaaaatgaaagtaaaatcatttgaaagcagttgtgagaattaaataacttagttgatagtaagattctggtgattatttctgatgaaattttaaattacttgaataattttatttaaaaaaaatggactgagttttaatatactgacatgttaactttccaaaccatgtttgtatgctgaaatagcacatttcatcaaataatgatgaacaggcaagttttctgaagtatttttgtatatctttatgtgtgtgcatataattttcttttgaaaagacacaattataaggttagtaaagaattaatagggtacatgggacctttgttaatccagattaattccttctgtacattactggaacgacttctaatgggcaacagttccctagcgtcactcttaaatatacagccagagattatcaaagtgctactgagagctttatcagtacagagcgttagttgctatatactcagtttaaatgtggcagcacagaatacataggtatcccactgtctctaatgattgcatctggcaggcagtctagaacttgaggaagagtttccttaggcctggcaattcctagatgaagaggctcccaagagacccttgttgtggaattgaagatggagaacatcttgagcactctcattctttttggtgcatctacagatcttactttaattcaattatagaaaaatgtattagattgcataacagaggatgatcttacaaaattgtatgctgtttttaccaaattgcaaacctggacaataggtattttaactggttgttttccaattactattttcctgtctcatagcgtgattaccttttggggactgcaggaataattatgcactttagagctgttatgtctagatgtttcacatatgtattatgacaggtcagaagaagcagagattaagcatctacatttttacgatatgaaatatgttttattgggaaaatgtgtgagcaacaaagacgtcttggctgcctgctttacctttttgaattagatgccattggacttggctttaagtgtgccttgtgtggtttattcttaacttagttttttataagatctattactattatcttattattttctcatatcattcattaatttggctctagtttcctgtttcttacctcagtttatgctatttgattttcatttttttctgtaaccaccattctatcttgtttaccttcttaccagctagccattcagttaaagtttctctaatttgcatgaataattatccatctaactatctgcctccacctcgtgtttaacatccccctcacatcccttctagcctagtattttctcttttctgactgtcaaactacgtttttgggggctgtctttaggatagcaaaggtgtaagaccttttttgtttgagagtatttgtgcttgttttataacagccatttattcatttgattttttttaactttaaattaccatatgatagcagttctcaagctttttgatctcaggacctctttatattattaaatactattgaaggccaaaaagaacttttgtttatgtgggctatatttatctgatatttgccatttataagttaaaagtgggaaatataaaaaatatttgtaaataatgaacacatgttaatgaatatttttaaattagaaataagcatattttctaaaagaaaaaccaatttggtaagaagagcattgattcagaattttatgatttttttttttttttttttgagacagggttttgttctgtcacccatgctgcagtgcagaggcacagttatggcttactgcaacctcaaactcctgggctcaagtgatcctccagcctcagcctcacgagtagctgagactacaggcgtgtgccaccacactcggctaatgttttatttttgtgtggggacagggtcttactatgttgcccaggcttctctgtttacgagccttatagtgtcctttccttctcatatctgcttctgcattcagtcagctttcctgtcacacatcatatagcccctggaaaactcccctggatacttgtgaagagaataagagtctaaaaggcaaaaaacgatttagcattatgaaaatagtgttgacctcccagactccttgagagggtcttggagaccacactttgagaactgctacaagaataatttgaataccataatctactcccttgttggtgttctgggcttcttagccccttgcttttaatgtttaataaattttagttgattaagtgattttcttaggtatattaatattgcattttcttgtaatatttctgaatgacatttgtactgtagttattctttgtcttttagggttattctttaaaagtaagctagtatttcattgtttttatattgtacaaagtaacaacttcaatgtagtt

SEQ ID NO: 190894 - DNA, 3504 bp, Homo sapiens
  Payload ID: 17712
  Gene Name: thioredoxin-like 4A
  Uniprot ID: P83876
  ENST ID: ENST00000269601
  CDS Start-End: 202-630
agcacgcacggcgtcggtgcgtgcgcgcccagacgttctgccgggtggcagtcccagcggagtttgcgtgtgcgggcgggaccggatttcgtccgtgggcccgggggcggcgggggccggggagtgaggggccggctgagcccacctcgctgggccctccctggcgccccgccttgggcggcggcgagcgcgcgggccgccatgtcgtacatgctcccgcacctgcacaacggctggcaggtggaccaggccatcctctcggaggaggaccgcgtggtcgtcatccgcttcggccacgactgggatcctacgtgcatgaagatggacgaggtcctgtacagcatcgccgagaaggttaaaaattttgcagttatttatcttgtggatattacagaagtgcctgacttcaacaaaatgtatgagttatacgatccatgtactgtcatgtttttcttcaggaacaagcacatcatgattgacttggggactggcaacaacaacaagattaactgggccatggaggacaagcaggagatggtggacatcatcgagacggtgtaccgcggggcccgcaaaggccgcggcctggtggtgtcccccaaggactactccaccaagtaccgctactgaggcgccctcagtctgcgcggataaatgtcgtggagccctttttgtatggaaacgttttaagctatttaaagcctttggaaaatacaggaagctccagggctggagcacctctgagatggaattgataacatggtcttaactcaccgaaataaacaagcacgtggtgagaggagcaggcctacttgtttgttctcaggaaacttaatgaatagattactgattttcctagtcaaagttaattcttacccttggagtaaaacgaaggtgtttatcctgtgagcctgtgcgttttgcatactgggttggtttgctggggctgcggtgacagcatatgccgcgagctgggctttaacagagatgtgtgctctcacagctttgcaggcgggggtctgagatcagggtgtcgcgggtggggggtcactgctgaggccgtgaggggaatctgctcaggcctgtccctggcttctgggggctgctggtggtattttcagttccttggtgtgtggatacttcgccccatctctgccttcacctgtgtcctccctgtgtgggtgctggtgtccaaaatttccccttttcgtagtgacaccagctgtgttggattggggcccaccctgctccagcatggcctaatcttaactaattacatttgcaaggatcttatgtccacaaaagtcacagtctgaggtgctgggggttaggacttcaatatataaattttgcggttacacaattcaatccatgacagaatccaaaggtttactctggttataaaaacagtacaataaaatattgtttatagccttccctgtaaggaataggagagctattttttattcttcccaagattgtatttgatgtaaacatattttctgtagaagccatggcccttcagttcatatagttagaaaatttccttattggccaggcacggtggctcacacctgtaatcccagcactttgggaggccgaggtgggcagatcacgaagtcaggtgttcgagaccagcctggccaacatggtgaaatcccgtctctactaaaaatacaaaaattagctgggcatggtggcgcgtgcctgtaatcccagctacttggaaggctgaggcaggagaattgcttgaacccgggaggtggaggtttcagtgagccgagatcacaccactgcactccagcctgggcaacagagcaagactccgtctcaaaaaaagaaaagaaaatgtccttattacagtctcaggtttctcttgccctctgtcatcctagcagtgtggatggttggttgggatcttcgtgtcccgtctcagcacactcgagctctgaagtgaaagtgaggaagggcagggatgggggcacttgagcacaccgtgggccctctgacctcagacccaggctctgccccaccaagtgaccttgggcagggtaccttctctgagctttgtttcctccttggtaaaggcggataatagtgtctgccctgcacacagatgtggacgcagaagcacgtggtgcctgccgggcacaggagtggtgcacagggctcgctgctgtcgggagattgattgctgttgtggaaacgggagggtacttacagaatgaagcacattttttacatacagtacaaatgagtgtgtgctttttaaatggatttaaaattcaaatgcaaatctgcagtttaatctcccaagtgctgatttttctatgtataaagtaggagagtgcaacagcgtatcggaatgaggggctagggagaacgtgtatgtgacctcgagtacctggcatgtaacagacactcagtattacactcctgctatttctccagagcaggtgaaacagacggccaggaagcacacgaagagacactcagcatcactgcttgttaaggaaggtgcaaatcaaaaccacagtgagacgccacttcacacctacaagttcggctagatacaaaaagatcgcaacaagcgtttgcaaggatgtggagaaattggagccctcacacactgctggtggcaaagtggtaacacaggcaggcaggtcgtcaaaaagttaaacatgggccgggtgcaggtgtctcaagcctgtaatcccagcactttggaaggctgagacaggcagattgcttgagcccaggagttcacgaccagcctgggcaacctggtgagaccctgtctctacaaaaaatacagaacaattagctgggcatggtggtgcgtgcctgtgggcccagctactcggcgggctgaggcaggaggatcacttaagccccagaggtcaaggctgcagtaagccatggttgtgccactgcactccagcctgggcaactgagcaagaccctgtctcaaaaaaataaaaaaagataaacatggtgttaccatttgacccagcagtttcatacccaggagaattgaacgcatatgtccacatagaaactcgtacacagaagccaaaatgtggaaacccacgtgtccatcaacagatgaacggttaaacaaaatgtccatccatagaacggaatattattcagtcataaacagaatgaagtactgtaagtgaaaagccagttactacatattgtgtgattccatttatacggaatttctagaataggcacatccatagagacggattagtggttgcttaagactgggagggagggggaaataggaggtgacagctaatgggcagttttatttttgatgtaatgaaaatgtgcttacataagccgagcaggcataaacagaaaaagtgccctaagattgtgataatggtacaattctgtcaattgcataattggtggatgatgtgtgaattatgtctcttaggataacagctttactggcgttaccagaaaaagataaaataattacattccaca

SEQ ID NO: 190895 - DNA, 803 bp, Homo sapiens
  Payload ID: 17712
  Gene Name: thioredoxin-like 4A
  ENST ID: ENST00000355491
  CDS Start-End: 145-420
cggagtttgcgtgtgcgggcgggaccggatttcgtccgtgggcccgggggcggcgggggccggggagtgaggggccggctgagcccacctcgctgggccctccctggcgccccgccttgggcggcggcgagcgcgcgggccgccatgtcgtacatgctcccgcacctgcacaacggctggcaggtggaccaggccatcctctcggaggaggaccgcgtggtcgtcatccgcttcggccacgactgggatcctacgtgcatgaagatggacgaggtcctgtacagcatcgccgagaaggttaaaaattttgcagttatttatcttgtggatattacagaagtgcctgacttcaacaaaatgtatgagttatacgatccatgtactgtcatgtttttcttcagttaccatagaggttggtgaattagctacatgagcattagaccattctccaaaagtggagcctcctactcggaacaagcacatcatgattgacttggggactggcaacaacaacaagattaactgggccatggaggacaagcaggagatggtggacatcatcgagacggtgtaccgcggggcccgcaaaggccgcggcctggtggtgtcccccaaggactactccaccaagtaccgctactgaggcgccctcagtctgcgcggataaatgtcgtggagccctttttgtatggaaacgttttaagctatttaaagcctttggaaaatacaggaagctccagggctggagcacctctgagatggaattgataacatggtcttaactcaccgaaataaacaagcac

SEQ ID NO: 190896 - DNA, 752 bp, Homo sapiens
  Payload ID: 17712
  Gene Name: thioredoxin-like 4A
  ENST ID: ENST00000588162
  CDS Start-End: 150-323
cccagcggagtttgcgtgtgcgggcgggaccggatttcgtccgtgggcccgggggcggcgggggccggggagtgaggggccggctgagcccacctcgctgggccctccctggcgccccgccttgggcggcggcgagcgcgcgggccgccatgtcgtacatgctcccgcacctgcacaacggctggcaggtggaccaggccatcctctcggaggaggaccgcgtggtcgtcatccgcttcggccacgactgggatcctacgtgcatgaagatggacgaggtcctgtacagcatcgccgagaaggaacaagcacatcatgattgacttggggactggcaacaacaacaagattaactgggccatggaggacaagcaggagatggtggacatcatcgagacggtgtaccgcggggcccgcaaaggccgcggcctggtggtgtcccccaaggactactccaccaagtaccgctactgaggcgccctcagtctgcgcggataaatgtcgtggagccctttttgtatggaaacgttttaagctatttaaagcctttggaaaatacaggaagctccagggctggagcacctctgagatggaattgataacatggtcttaactcaccgaaataaacaagcacgtggtgagaggagcaggcctacttgtttgttctcaggaaacttaatgaatagattactgattttcctagtcaaagttaattcttacccttggagtaaaacgaaggtgtttatcctgtg

SEQ ID NO: 190897 - DNA, 546 bp, Homo sapiens
  Payload ID: 17712
  Gene Name: thioredoxin-like 4A
  ENST ID: ENST00000592957
  CDS Start-End: 159-374
gcgaagcgagcggcgtgtaagcggggtgaagacaacgccagtcctgaccttggaaggaggatacccaccactggaggctggagccactggaaagaggcgttaaaaattttgcagttatttatcttgtggatattacagaagtgcctgacttcaacaaaatgtatgagttatacgatccatgtactgtcatgtttttcttcaggaacaagcacatcatgattgacttggggactggcaacaacaacaagattaactgggccatggaggacaagcaggagatggtggacatcatcgagacggtgtaccgcggggcccgcaaaggccgcggcctggtggtgtcccccaaggactactccaccaagtaccgctactgaggcgccctcagtctgcgcggataaatgtcgtggagccctttttgtatggaaacgttttaagctatttaaagcctttggaaaatacaggaagctccagggctggagcacctctgagatggaattgataacatggtcttaactcaccgaaataaacaagcacgtggtgagagga

SEQ ID NO: 190898 - DNA, 1185 bp, Homo sapiens
  Payload ID: 17712
  Gene Name: thioredoxin-like 4A
  ENST ID: ENST00000585474
  CDS Start-End: 160-375
gggtgggcagggcgaagactgaagcgagaagggcagcgcgaggtgggcgactaccagagcgaagcgagcggcgtgtaagcggggtgaagacaacgccaggttaaaaattttgcagttatttatcttgtggatattacagaagtgcctgacttcaacaaaatgtatgagttatacgatccatgtactgtcatgtttttcttcaggaacaagcacatcatgattgacttggggactggcaacaacaacaagattaactgggccatggaggacaagcaggagatggtggacatcatcgagacggtgtaccgcggggcccgcaaaggccgcggcctggtggtgtcccccaaggactactccaccaagtaccgctactgaggcgccctcagtctgcgcggataaatgtcgtggagccctttttgtatggaaacgttttaagctatttaaagcctttggaaaatacaggaagctccagggctggagcacctctgagatggaattgataacatggtcttaactcaccgaaataaacaagcacgtggtgagaggagcaggcctacttgtttgttctcaggaaacttaatgaatagattactgattttcctagtcaaagttaattcttacccttggagtaaaacgaaggtgtttatcctgtgagcctgtgcgttttgcatactgggttggtttgctggggctgcggtgacagcatatgccgcgagctgggctttaacagagatgtgtgctctcacagctttgcaggcgggggtctgagatcagggtgtcgcgggtggggggtcactgctgaggccgtgaggggaatctgctcaggcctgtccctggcttctgggggctgctggtggtattttcagttccttggtgtgtggatacttcgccccatctctgccttcacctgtgtcctccctgtgtgggtgctggtgtccaaaatttccccttttcgtagtgacaccagctgtgttggattggggcccaccctgctccagcatggcctaatcttaactaattacatttgcaaggatcttatgtccacaaaagtcacagtctgaggtgctgggggttaggacttcaatatataaattttgcggttacacaattcaatccatgacagaatccaaaggtttactctggttataaaaacagtacaataaaatattgtttatagccttccct

SEQ ID NO: 190899 - DNA, 988 bp, Homo sapiens
  Payload ID: 17712
  Gene Name: thioredoxin-like 4A
  ENST ID: ENST00000585769
  CDS Start-End: 190-354
gtcggtgcgtgcgcgcccagacgttctgccgggtggcagtcccagcggagtttgcgtgtgcgggcgggaccggatttcgtccgtgggcccgggggcggcgggggccggggagtgaggggccggctgagcccacctcgctgggccctccctggcgccccgccttgggcggcggcgagcgcgcgggccgccatgtcgtacatgctcccgcacctgcacaacggctggcaggtggaccaggccatcctctcggaggaggaccgcgtggtcgtcatccgcttcggccacgactgggatcctacgtgcatgaagatggacgaggtcctgtacagcatcgccgagaaggtggtggcataaacatcgggtggtgttcagatcctgctgccggcagctcgaggctaggatggctggagatgtgagggcctttgtctcatcacatccgagcacagctcagcaagatgctcttagctagaaaacagattttatgtgttaatgttaaaaattttgcagttatttatcttgtggatattacagaagtgcctgacttcaacaaaatgtatgagttatacgatccatgtactgtcatgtttttcttcagttaccatagaggttggtgaattagctacatgagcattagaccattctccaaaagtggagcctcctactcggaacaagcacatcatgattgacttggggactggcaacaacaacaagattaactgggccatggaggacaagcaggagatggtggacatcatcgagacggtgtaccgcggggcccgcaaaggccgcggcctggtggtgtcccccaaggactactccaccaagtaccgctactgaggcgccctcagtctgcgcggataaatgtcgtggagccctttttgtatggaaacgttttaagctatttaaagcctttggaaaatacaggaagctccagggctggagcacctctgagatggaattgataacatggtcttaactcaccgaaata

SEQ ID NO: 190900 - DNA, 706 bp, Homo sapiens
  Payload ID: 17712
  Gene Name: thioredoxin-like 4A
  ENST ID: ENST00000586295
  CDS Start-End: 146-406
gcggagtttgcgtgtgcgggcgggaccggatttcgtccgtgggcccgggggcggcgggggccggggagtgaggggccggctgagcccacctcgctgggccctccctggcgccccgccttgggcggcggcgagcgcgcgggccgccatgtcgtacatgctcccgcacctgcacaacggctggcaggtggaccaggccatcctctcggaggaggaccgcgtggtcgtcatccgcttcggccacgactgggatcctacgtgcatgaagatggacgaggtcctgtacagcatcgccgagaagttctgcaggctgtacaggaagtgtggtactggcatttgcttctggggaggcctcaggaccttccaatcatggcagaaggcaaaggggaacaggcacgtcgcacggtgaaagctggggcggagtgtcacacacttggaacaacctcagctcactaccccgaggacagcaccaagaggatgacgctcaaccattgatgagaaattcatcccatgatccagtcgcctcccaccaggcctcacctgcaacgctgggagttacgtttcaacctgagatttgggcagggacaaatatccaaactatatcaaatggttaaaaattttgcagttatttatcttgtggatattacagaagtgcctgacttcaacaaaatgtatgagttatacgatccatgtactgtcatgtttttct

SEQ ID NO: 190901 - DNA, 586 bp, Homo sapiens
  Payload ID: 17712
  Gene Name: thioredoxin-like 4A
  ENST ID: ENST00000586825
  CDS Start-End: 111-275
tccgtgggcccgggggcggcgggggccggggagtgaggggccggctgagcccacctcgctgggccctccctggcgccccgccttgggcggcggcgagcgcgcgggccgccatgtcgtacatgctcccgcacctgcacaacggctggcaggtggaccaggccatcctctcggaggaggaccgcgtggtcgtcatccgcttcggccacgactgggatcctacgtgcatgaagatggacgaggtcctgtacagcatcgccgagaaggtggtggcataaacatcgggtggtgttcagatcctgctgccggcagctcgaggctaggatggctggagatgtgagggcctttgtctcatcacatccgagcacagctcagcaagatgctcttagctagaaaacagattttatgtgttaataaatggcagataatggggactcttccttaccttgttccgagttctgtctggatattccagctgttttaaagttaaaaattttgcagttatttatcttgtggatattacagaagtgcctgacttcaacaaaatgtatgagttatacgatccatgtactgtcatgtttttcttcag

SEQ ID NO: 190902 - DNA, 669 bp, Homo sapiens
  Payload ID: 17712
  Gene Name: thioredoxin-like 4A
  ENST ID: ENST00000591711
  CDS Start-End: 146-457
gcggagtttgcgtgtgcgggcgggaccggatttcgtccgtgggcccgggggcggcgggggccggggagtgaggggccggctgagcccacctcgctgggccctccctggcgccccgccttgggcggcggcgagcgcgcgggccgccatgtcgtacatgctcccgcacctgcacaacggctggcaggtggaccaggccatcctctcggaggaggaccgcgtggtcgtcatccgcttcggccacgactgggatcctacgtgcatgaagatggacgaggtcctgtacagcatcgccgagaaggttaaaaattttgcagttatttatcttgtggatattacagaagtgcctgacttcaacaaaatgtatgagttatacgatccatgtactgtcatgtttttcttcaggtacgttatcttaaagttgttactgaaattgaatattgtcagtttggaagcttaatgtaatcaagatctctttagattattttattttgaaggaagttggttgtacagtcatgtcccaaaatcgtttgtatcaccaggcaatcagtgtgaatctttgaaataattttcaaagtaacaattctagttttagcatttactcagtaacaaattacccttttgaaataactttgcggggaaacctaggtgaagtgtaattcaatgaaagat

SEQ ID NO: 190903 - DNA, 611 bp, Homo sapiens
  Payload ID: 17712
  Gene Name: thioredoxin-like 4A
  ENST ID: ENST00000592837
  CDS Start-End: 277-492
gtgggaggatagcttgagcctgggaggtcgaggctgcagtgagctgattgcaccattgcactctaggatgacagagtgagaccctgtctcaaaaaaacaaaacaaaaattgccctgatccacacaaattcttggttttgtttttataaatgtgcttctataaaatgaaagccaaagtgttctgttatttcagtttttttttttaatctccttttaggttaaaaattttgcagttatttatcttgtggatattacagaagtgcctgacttcaacaaaatgtatgagttatacgatccatgtactgtcatgtttttcttcaggaacaagcacatcatgattgacttggggactggcaacaacaacaagattaactgggccatggaggacaagcaggagatggtggacatcatcgagacggtgtaccgcggggcccgcaaaggccgcggcctggtggtgtcccccaaggactactccaccaagtaccgctactgaggcgccctcagtctgcgcggataaatgtcgtggagccctttttgtatggaaacgttttaagctatttaaagcctttggaaaatacaggaagctccagggctggagcacctctgagatgg

SEQ ID NO: 190904 - DNA, 2556 bp, Homo sapiens
  Payload ID: 17713
  Gene Name: thioredoxin-like 4B
  Uniprot ID: Q9NX01
  ENST ID: ENST00000268483
  CDS Start-End: 323-772
gagcaaggtgggcggtgactagaagctcttccgtttattgggctgttgagcgggggccgaccgacggccaggagtttcttttctgcgcttgtgcgttttctgttcggtttccttcccgctagcggggccacgagggttgctaggcaacagcccctgggtgacttggtcttagggtcctgtccggcttggggctgatgaaaggagctgtccgcgcccgggctcttccgagaagtggttgctgacagccacaaagtgaaagggagtgaggcggcgtggacgagtaaggagtgacagtgaggattcacatttgggttatttcaagatgagcttcctactgcccaagctgactagcaaaaaggaagtagaccaggcgataaaaagtactgctgagaaggtgttggttctcaggtttgggagagatgaagatcctgtctgtctgcagctagatgatattctttctaagacctcttctgacttaagtaaaatggctgctatatacctggtagatgtggaccaaactgcagtttatacacagtattttgacatcagttatattccatctactgtctttttcttcaatgggcagcatatgaaagtggattatggatctccagatcacactaagtttgtgggaagcttcaaaaccaaacaagacttcatagatttgattgaagtaatctatcgaggagcaatgagggggaagcttattgtccaaagtcctattgatcccaagaatattcccaaatatgaccttctctatcaagacatttagtacattaattgctgtcaaagatgaagaagaaggcacatcttgacacagtacctgaatccagctgtgctgtgtttctggagtcctttggaaacatgtgtcccagaggagaagaggtttgacttgcgtgtagaaaacccggcccctgaggaaaagaccccactggttctctgatgacctgggatgcctaactgtctactccctgcaagcctcagagcagccaagtcattggtgttcattttccccacagtgatttttgtaacttctctttctaatgtttttctttatccctttaatacagaaccctcccaaacattggctagtacaacttgatttcatcatgttcatttgatacacaagtgaactggaaagtcacttcccatagaagcaaaagtacttattttctaccctagctgggtgcatgtgtgtgcacacacacacacacacacacccccacacccctttgccggttcctcgactcatacatccctcgtgctttcccatctccagtctgtattactgtaggttctcttcaaataattaattgagcagacaagtttgttttattttggagcctttttggctctggcttttaaacattgtcctggttggctcatttaatttttttttttttttttgagaccgagtcactcttgtcacccaggctggagtgcagtggcgcgatctcggctcactgcaagctccacctcctgggttcatgccattttcctgcttcagcctcctgagtagctgggactacaggcgcccgccaccatgcccagctaattttttgtatttttatagaggcgcagtttcaccgtgttagccaagatggtctcgatctcctgacctcgtgatctgccctcctcagcctcccaggtgctgggattataggcgtgagccaccgcgcgcaccccatttaattattttttatgttataaaatttaatatggaaagtgagaatttgaaccttcaccatccaccactctattcaggtaaaacaatgaatgagccaccttagcaggagcagatttttcccagaagctgctgcctcttcctgaggcagaaaattggattactaaggctcaaaactaaaagagatgtcagcattgttggatagaaatgtcacctatatgggatttgcctgttttaataactttgtaaggaattcttgctcttctaggggtgcctggcgcaaccgtgggcaagttactgctcctctttaaacctcgtggtggttattgaaacagatttattagaaggagagggtaggtgcagagctggagagccatgggtgaggcagcttgtgacctgcctagcagccgctgaccacctctccaacagaagcctagtcctgttcagagcagcactgtcactgcaagtccagccccctttgccaggggctccattccacccctttcctgcagggaggggtgccatgagtcttgcttttggctcatacaggagagagggaaggctgccaggcactgcttgtatccctgctgataagaggagggagtcactccaggaataagacaaaaggagaggaggaggccatcacctctggcctcttccatcgtacacttcctgtctctggtttaatcatgatgcatggagctacaacagccatcttaggtccccgaggtgcccagcatcacgtaaaacatcgatatgctaagaagaacaaaaagagcccaatctctgatgttattgagctcctgcatgaactctggacctgcctgcctcagacttctgtgaaagaataaaatttctttttgcctaagtca

SEQ ID NO: 190905 - DNA, 965 bp, Homo sapiens
  Payload ID: 17713
  Gene Name: thioredoxin-like 4B
  Uniprot ID: Q9NX01
  ENST ID: ENST00000426362
  CDS Start-End: 276-725
gagatcgcccaccagattgcctggtataaatgacactgtgagagagcagaggaagacacaaggagtcctactcgggctcggtgacagtctggggtgggttaaagcggaggcctgggagagggaccaaggccactccaggcagcatccctggatctcagcgaggccgctccaggcagcaggatttgaccagagcaaggaggaaggccaaggcggccaggacggatgcagcatccctgaggagtgacagtgaggattcacatttgggttatttcaagatgagcttcctactgcccaagctgactagcaaaaaggaagtagaccaggcgataaaaagtactgctgagaaggtgttggttctcaggtttgggagagatgaagatcctgtctgtctgcagctagatgatattctttctaagacctcttctgacttaagtaaaatggctgctatatacctggtagatgtggaccaaactgcagtttatacacagtattttgacatcagttatattccatctactgtctttttcttcaatgggcagcatatgaaagtggattatggatctccagatcacactaagtttgtgggaagcttcaaaaccaaacaagacttcatagatttgattgaagtaatctatcgaggagcaatgagggggaagcttattgtccaaagtcctattgatcccaagaatattcccaaatatgaccttctctatcaagacatttagtacattaattgctgtcaaagatgaagaagaaggcacatcttgacacagtacctgaatccagctgtgctgtgtttctggagtcctttggaaacatgtgtcccagaggagaagaggtttgacttgcgtgtagaaaacccggcccctgaggaaaagaccccactggttctctgatgacctgggatgcctaactgtctactccctgcaagcctcagagcagccaagtcattggtgttcattttc

SEQ ID NO: 190906 - DNA, 2490 bp, Homo sapiens
  Payload ID: 17713
  Gene Name: thioredoxin-like 4B
  Uniprot ID: Q9NX01
  ENST ID: ENST00000423037
  CDS Start-End: 263-712
acgcccgattcctggatccaagtgtggaacggtacgccaacaggctctcaaggcctcctctggggctctgatcagacacttccgagtctccttgtgaccaatcactcttagcctaagagactacatcccgcctctagtctgggggcaggaaaaggaggggaaaaaggtcgaccatctttaatacgggcggaggtgacgcctagcttccggtcagagccgagcaaggagtgacagtgaggattcacatttgggttatttcaagatgagcttcctactgcccaagctgactagcaaaaaggaagtagaccaggcgataaaaagtactgctgagaaggtgttggttctcaggtttgggagagatgaagatcctgtctgtctgcagctagatgatattctttctaagacctcttctgacttaagtaaaatggctgctatatacctggtagatgtggaccaaactgcagtttatacacagtattttgacatcagttatattccatctactgtctttttcttcaatgggcagcatatgaaagtggattatggatctccagatcacactaagtttgtgggaagcttcaaaaccaaacaagacttcatagatttgattgaagtaatctatcgaggagcaatgagggggaagcttattgtccaaagtcctattgatcccaagaatattcccaaatatgaccttctctatcaagacatttagtacattaattgctgtcaaagatgaagaagaaggcacatcttgacacagtacctgaatccagctgtgctgtgtttctggagtcctttggaaacatgtgtcccagaggagaagaggtttgacttgcgtgtagaaaacccggcccctgaggaaaagaccccactggttctctgatgacctgggatgcctaactgtctactccctgcaagcctcagagcagccaagtcattggtgttcattttccccacagtgatttttgtaacttctctttctaatgtttttctttatccctttaatacagaaccctcccaaacattggctagtacaacttgatttcatcatgttcatttgatacacaagtgaactggaaagtcacttcccatagaagcaaaagtacttattttctaccctagctgggtgcatgtgtgtgcacacacacacacacacacacccccacacccctttgccggttcctcgactcatacatccctcgtgctttcccatctccagtctgtattactgtaggttctcttcaaataattaattgagcagacaagtttgttttattttggagcctttttggctctggcttttaaacattgtcctggttggctcatttaatttttttttttttttttgagaccgagtcactcttgtcacccaggctggagtgcagtggcgcgatctcggctcactgcaagctccacctcctgggttcatgccattttcctgcttcagcctcctgagtagctgggactacaggcgcccgccaccatgcccagctaattttttgtatttttatagaggcgcagtttcaccgtgttagccaagatggtctcgatctcctgacctcgtgatctgccctcctcagcctcccaggtgctgggattataggcgtgagccaccgcgcgcaccccatttaattattttttatgttataaaatttaatatggaaagtgagaatttgaaccttcaccatccaccactctattcaggtaaaacaatgaatgagccaccttagcaggagcagatttttcccagaagctgctgcctcttcctgaggcagaaaattggattactaaggctcaaaactaaaagagatgtcagcattgttggatagaaatgtcacctatatgggatttgcctgttttaataactttgtaaggaattcttgctcttctaggggtgcctggcgcaaccgtgggcaagttactgctcctctttaaacctcgtggtggttattgaaacagatttattagaaggagagggtaggtgcagagctggagagccatgggtgaggcagcttgtgacctgcctagcagccgctgaccacctctccaacagaagcctagtcctgttcagagcagcactgtcactgcaagtccagccccctttgccaggggctccattccacccctttcctgcagggaggggtgccatgagtcttgcttttggctcatacaggagagagggaaggctgccaggcactgcttgtatccctgctgataagaggagggagtcactccaggaataagacaaaaggagaggaggaggccatcacctctggcctcttccatcgtacacttcctgtctctggtttaatcatgatgcatggagctacaacagccatcttaggtccccgaggtgcccagcatcacgtaaaacatcgatatgctaagaagaacaaaaagagcccaatctctgatgttattgagctcctgcatgaactctggacctgcctgcctcagacttctgtgaaagaataaaatttctttttgcct

SEQ ID NO: 190907 - DNA, 581 bp, Homo sapiens
  Payload ID: 17713
  Gene Name: thioredoxin-like 4B
  ENST ID: ENST00000562153
  CDS Start-End: 229-581
gttttctgttcggtttccttcccgctagcggggccacgagggttgctaggcaacagcccctgggtgacttggtcttagggtcctgtccggcttggggctgatgaaaggagctgtccgcgcccgggctcttccgagaagtggttgctgacagccacaaagtgaaagggagtgaggcggcgtggacgagtaaggagtgacagtgaggattcacatttgggttatttcaagatgagcttcctactgcccaagctgactagcaaaaaggaagtagaccaggcgataaaaagtactgctgagaaggtgttggttctcaggtttgggagagatgaagatcctgtctgtctgcagctagatgatattctttctaagacctcttctgacttaagtaaaatggctgctatatacctggtagatgtggaccaaactgcagtttatacacagtattttgacatcagttatattccatctactgtctttttcttcaatgggcagcatatgaaagtggattatggtggagaagatccagccctcagaagcataaaagctgtccgcagaaccagccctgcaggtactttaggaga

SEQ ID NO: 190908 - DNA, 684 bp, Homo sapiens
  Payload ID: 17713
  Gene Name: thioredoxin-like 4B
  ENST ID: ENST00000565171
  CDS Start-End: 224-397
ctgttcggtttccttcccgctagcggggccacgagggttgctaggcaacagcccctgggtgacttggtcttagggtcctgtccggcttggggctgatgaaaggagctgtccgcgcccgggctcttccgagaagtggttgctgacagccacaaagtgaaagggagtgaggcggcgtggacgagtaaggagtgacagtgaggattcacatttgggttatttcaagatgagcttcctactgcccaagctgactagcaaaaaggaagtagaccaggcgataaaaagtactgctgagaaggtgttggttctcaggtttgggagagatgaagatcctgtctgtctgcagctagatgatatttgtgctgcctccagtatgtgcctgatgcagagagagacctaacccagaactaagacctcttaccgccatttctactgctaccatcccgtctttctaagacctcttctgacttaagtaaaatggctgctatatacctggtagatgtggaccaaactgcagtttatacacagtattttgacatcagttatattccatctactgtctttttcttcaatgggcagcatatgaaagtggattatggatctccagatcacactaagtttgtgggaagcttcaaaaccaaacaagacttcatagatttgattgaagtaatctatcgaggagcaatg

SEQ ID NO: 190909 - DNA, 546 bp, Homo sapiens
  Payload ID: 17713
  Gene Name: thioredoxin-like 4B
  ENST ID: ENST00000569767
  CDS Start-End: 263-546
acgcccgattcctggatccaagtgtggaacggtacgccaacaggctctcaaggcctcctctggggctctgatcagacacttccgagtctccttgtgaccaatcactcttagcctaagagactacatcccgcctctagtctgggggcaggaaaaggaggggaaaaaggtcgaccatctttaatacgggcggaggtgacgcctagcttccggtcagagccgagcaaggagtgacagtgaggattcacatttgggttatttcaagatgagcttcctactgcccaagctgactagcaaaaaggaagtagaccaggcgataaaaagtactgctgagaaggtgttggttctcaggtttgggagagatgaagatcctgtctgtctgcagctagatgatattctttctaagacctcttctgacttaagtaaaatggctgctatatacctggtagatgtggaccaaactgcagtttatacacagtattttgacatcagttatattccatctactgtctttttcttcaatgggcagcatatgaaagtggattatgg

SEQ ID NO: 190910 - DNA, 3995 bp, Homo sapiens
  Payload ID: 17714
  Gene Name: thioredoxin-related transmembrane protein 1
  Uniprot ID: Q9H3N1
  ENST ID: ENST00000457354
  CDS Start-End: 126-968
atgcgcattgagagtcctctagacaggcgctcctcgcagcaccgtagtgcgcttgcgctgagcagcccgcgagggcggaagtgggagctgcgaccgcgctccctgtgaggtgggcaagcggcgaaatggcgccctccgggagtcttgcagttcccctggcagtcctggtgctgttgctttggggtgctccctggacgcacgggcggcggagcaacgttcgcgtcatcacggacgagaactggagagaactgctggaaggagactggatgatagaattttatgccccgtggtgccctgcttgtcaaaatcttcaaccggaatgggaaagttttgctgaatggggagaagatcttgaggttaatattgcgaaagtagatgtcacagagcagccaggactgagtggacggtttatcataactgctcttcctactatttatcattgtaaagatggtgaatttaggcgctatcagggtccaaggactaagaaggacttcataaactttataagtgataaagagtggaagagtattgagcccgtttcatcatggtttggtccaggttctgttctgatgagtagtatgtcagcactctttcagctatctatgtggatcaggacttgccataactactttattgaagaccttggattgccagtgtggggatcatatactgtttttgctttagcaactctgttttccggactgttattaggactctgtatgatatttgtggcagattgcctttgtccttcaaaaaggcgcagaccacagccgtacccatacccttcaaaaaaattattatcagaatctgcacaacctttgaaaaaagtggaggaggaacaagaggcggatgaagaagatgtttcagaagaagaagctgaaagtaaagaaggaacaaacaaagactttccacagaatgccataagacaacgctctctgggtccatcattggccacagataaatcctagttaaattttatagttatcttaatattatgattttgataaaaacagaagattgatcattttgtttggtttgaagtgaactgtgacttttttgaatattgcagggttcagtctagattgtcattaaattgaagagtctacattcagaacataaaagcactaggtatacaagtttgaaatatgatttaagcacagtatgatggtttaaatagttctctaatttttgaaaaatcgtgccaagcaataagatttatgtatatttgtttaataataacctatttcaagtctgagttttgaaaatttacatttcccaagtattgcattattgaggtatttaagaagattattttagagaaaaatatttctcatttgatataatttttctctgtttcactgtgtgaaaaaaagaagatatttcccataaatgggaagtttgcccattgtctcaagaaatgtgtatttcagtgacaatttcgtggtctttttagaggtatattccaaaatttccttgtatttttaggttatgcaactaataaaaactaccttacattaattaattacagttttctacacatggtaatacaggatatgctactgatttaggaagtttttaagttcatggtattctcttgattccaacaaagtttgattttctcttgtatttttcttacttactatgggttacattttttatttttcaaattggatgataatttcttggaaacattttttatgttttagtaaacagtatttttttgttgtttcaaactgaagtttactgagagatccatcaaattgaacaatctgttgtaatttaaaattttggccacttttttcagattttacatcattcttgctgaacttcaacttgaaattgtttttttttttttttctttttggatgtgaaggtgaacattcctgatttttgtctgatgtgaaaaagccttggtattttacattttgaaaattcaaagaagcttaatataaaagtttgcattctactcaggaaaaagcatcttcttgtatatgtcttaaatgtatttttgtcctcatatacagaaagttcttaattgattttacagtctgtaatgcttgatgttttaaaataataacatttttatattttttaaaagacaaacttcatattatcctgtgttctttcctgactggtaatattgtgtgggatttcacaggtaaaagtcagtaggatggaacattttagtgtatttttactccttaaagagctagaatacatagttttcaccttaaaagaagggggaaaatcataaatacaatgaatcaactgaccattacgtagtagacaatttctgtaatgtccccttctttctaggctctgttgctgtgtgaatccattagatttacagtatcgtaatatacaagttttctttaaagccctctcctttagaatttaaaatattgtaccattgaagagtttggatgtgtaacttgtgatgccttagaaaaatatcctaagcacaaaataaacctttctaaccacttcattaaagctgaagaccagtatgatttctggttgctttttgaaggtatgctttattactttgtatttaacgatgttcagatgagtagttgtgtgttcctatatatgtacttgatatgtgtaatcaaaagactgccttctttttctattgagatgtttaaggacagtaatgctcattaatcaagcattttttttttttagtgttctagtatatgtgacatggccaatttttttattagaaaatatgtgaccagaaagattctatagagtaaaaaatcaaagcaaaacaaaaaccacaaaaagacccctgtactatagaaaatgtaaagttggctgaacagatagggtcttgaaatttcaggaaacatataatctcacggttcttaaagattgtcactgtagacatctgagtaattaattttcagttagtaacaggcttatagaaactttgggattatttacaaatggtttaggaaagaataaggtatagtaaaagtaatatcctggagaattctgggccacctacccaccataatcaattcagctgtactactgaagtattgtaaaatctgatctctagaggaaaatacagtattctaccttacgttgtgtaaatacttaatgattatcagaaagactgaaaaaagttttaatgaagaattctggctacatctaacagctgccatttaccaagtacctactggagctttgttgttttcttgtatttattaatttagtcctaatgacaactgcaagacaggtaagcattgcacatctttcaggtgagtcagcccagaggtgtggtacaaataggtaaaatttgaatctaattcttgttccaaatctttttttgtttgtttttgtttttgttttttttcttcagtgtgggtacatgaaattcagcaatctcttattttggtcttttttttttttttgagacagagtttcactcttgttgcccaggctggagtgcaatggcatgatcttggctcactgcaacctccacctcctgggttcaagcagttcttctgcctcagcctcccaagtagctgggattacaggcatgtgccaccatgcccggctattattttggtcttaaaatttcactcctgtcagaatgtaggagtgaataaatgctattcataaataaccataattattcagtatttgcagtctcgtgatgttggttattgcataaagtaagttattgcagtaaatgatgctttagaaagcaattttctctcatcagtttcgtccttattcagccttacacaaaaaaaggcatagttctgggcttaattgtgatgtaattaaaattattgagtgaacattttggctcatattttatgacattgtagttcatccccatggtcaatttaaggtagagttcttacaatatattactttcaatataggtattttattaataagaatttatttcagttggacttattaaatgagtggttttgctgagtgtatgagtctataaataaaattttaattgaacatca

SEQ ID NO: 190911 - DNA, 2117 bp, Homo sapiens
  Payload ID: 17714
  Gene Name: thioredoxin-related transmembrane protein 1
  ENST ID: ENST00000556683
  CDS Start-End: 44-361
gggagctgcgaccgcgctccctgtgaggtgggcaagcggcgaaatggcgccctccgggagtcttgcagttcccctggcagtcctggtgctgttgctttggggtgctccctggacgcacgggcggcggagcaacgttcgcgtcatcacggacgagaactggagagaactgctggaaggagactggatgatagaattttatgccccgtggtgccctgcttgtcaaaatcttcaaccggaatgggaaagttttgctgaatggggagaagatcttgaggttaatattgcgaaagtagatgtcacagagcagccaggactgagtggacggtttatcataactgctcttcctactatttatcagtaagtatttgaagattctaaattatggagaaggatgcattatagtgtaatcagaagtagtaggcctctggcttggatcatgctggaagagctgagttgtaaagatggtgaatttaggcgctatcagggtccaaggactaagaaggacttcataaactttataagtgataaagagtggaagagtattgagcccgtttcatcatggtttggtccaggttctgttctgatgagtagtatgtcagcactctttcagctatctatgtggatcaggacttgccataactactttattgaagaccttggattgccagtgtggggatcatatactgtttttgctttagcaactctgttttccggactgttattaggactctgtatgatatttgtggcagattgcctttgtccttcaaaaaggcgcagaccacagccgtacccatacccttcaaaaaaattattatcagaatctgcacaacctttgaaaaaagtggaggaggaacaagaggcggatgaagaagatgtttcagaagaagaagctgaaagtaaagaaggaacaaacaaagactttccacagaatgccataagacaacgctctctgggtccatcattggccacagataaatcctagttaaattttatagttatcttaatattatgattttgataaaaacagaagattgatcattttgtttggtttgaagtgaactgtgacttttttgaatattgcagggttcagtctagattgtcattaaattgaagagtctacattcagaacataaaagcactaggtatacaagtttgaaatatgatttaagcacagtatgatggtttaaatagttctctaatttttgaaaaatcgtgccaagcaataagatttatgtatatttgtttaataataacctatttcaagtctgagttttgaaaatttacatttcccaagtattgcattattgaggtatttaagaagattattttagagaaaaatatttctcatttgatataatttttctctgtttcactgtgtgaaaaaaagaagatatttcccataaatgggaagtttgcccattgtctcaagaaatgtgtatttcagtgacaatttcgtggtctttttagaggtatattccaaaatttccttgtatttttaggttatgcaactaataaaaactaccttacattaattaattacagttttctacacatggtaatacaggatatgctactgatttaggaagtttttaagttcatggtattctcttgattccaacaaagtttgattttctcttgtatttttcttacttactatgggttacattttttatttttcaaattggatgataatttcttggaaacattttttatgttttagtaaacagtatttttttgttgtttcaaactgaagtttactgagagatccatcaaattgaacaatctgttgtaatttaaaattttggccacttttttcagattttacatcattcttgctgaacttcaacttgaaattgtttttttttttttttctttttggatgtgaaggtgaacattcctgatttttgtctgatgtgaaaaagccttggtattttacattttgaaaattcaaagaagcttaatataaaagtttgcattctactcaggaaaaagcatcttcttgtatatgtcttaaatgtatttttgtcctcatatacagaaagttcttaattgattttacagtctgtaatgcttgatgttttaaaataataacatttttatattttttaaaagacaaa

SEQ ID NO: 190912 - DNA, 1631 bp, Homo sapiens
  Payload ID: 17715
  Gene Name: thioredoxin-related transmembrane protein 2
  Uniprot ID: Q9Y320
  ENST ID: ENST00000278422
  CDS Start-End: 13-903
acggccgaaaagatggcggtcttggcacctctaattgctctcgtgtattcggtgccgcgactttcacgatggctcgcccaaccttactaccttctgtcggccctgctctctgctgccttcctactcgtgaggaaactgccgccgctctgccacggtctgcccacccaacgcgaagacggtaacccgtgtgactttgactggagagaagtggagatcctgatgtttctcagtgccattgtgatgatgaagaaccgcagatccatcactgtggagcaacatataggcaacattttcatgtttagtaaagtggccaacacaattcttttcttccgcttggatattcgcatgggcctactttacatcacactctgcatagtgttcctgatgacgtgcaaaccccccctatatatgggccctgagtatatcaagtacttcaatgataaaaccattgatgaggaactagaacgggacaagagggtcacttggattgtggagttctttgccaattggtctaatgactgccaatcatttgcccctatctatgctgacctctcccttaaatacaactgtacagggctaaattttgggaaggtggatgttggacgctatactgatgttagtacgcggtacaaagtgagcacatcacccctcaccaagcaactccctaccctgatcctgttccaaggtggcaaggaggcaatgcggcggccacagattgacaagaaaggacgggctgtctcatggaccttctctgaggagaatgtgatccgagaatttaacttaaatgagctataccagcgggccaagaaactatcaaaggctggagacaatatccctgaggagcagcctgtggcttcaacccccaccacagtgtcagatggggaaaacaagaaggataaataagatcctcactttggcagtgcttcctctcctgtcaattccaggctctttccataaccacaagcctgaggctgcagccttttatttatgttttccctttggctgtgactgggtggggcagcatgcagcttctgattttaaagaggcatctagggaattgtcaggcaccctacaggaaggcctgccatgctgtggccaactgtttcactggagcaagaaagagatctcataggacggagggggaaatggtttccctccaagcttgggtcagtgtgttaactgcttatcagctattcagacatctccatggtttctccatgaaactctgtggtttcatcattccttcttagttgacctgcacagcttggttagacctagatttaaccctaaggtaagatgctggggtatagaacgctaagaattttcccccaaggactcttgcttccttaagcccttctggcttcgtttatggtcttcattaaaagtataagcctaactttgtcgctagtcctaaggagaaacctttaaccacaaagtttttatcattgaagacaatattgaacaaccccctattttgtggggattgagaaggggtgaatagaggcttgagactttcctttgtgtggtaggacttggaggagaaatcccctggactttcactaaccctctgacatactccccacacccagttgatggctttccgtaataaaaagattgggatttccttttga

SEQ ID NO: 190913 - DNA, 1521 bp, Homo sapiens
  Payload ID: 17715
  Gene Name: thioredoxin-related transmembrane protein 2
  Uniprot ID: Q9Y320
  ENST ID: ENST00000378312
  CDS Start-End: 17-793
cgttacggccgaaaagatggcggtcttggcacctctaattgctctcgtgtattcggtgccgcgactttcacgatggctcgcccaaccttactaccttctgtcggccctgctctctgctgccttcctactcgtgaggaaactgccgccgctctgccacggtctgcccacccaacgcgaagacggtaacccgtgtgactttgactggagagaagtggagatcctgatgtttctcagtgccattgtgatgatgaagaaccgcagatccatgttcctgatgacgtgcaaaccccccctatatatgggccctgagtatatcaagtacttcaatgataaaaccattgatgaggaactagaacgggacaagagggtcacttggattgtggagttctttgccaattggtctaatgactgccaatcatttgcccctatctatgctgacctctcccttaaatacaactgtacagggctaaattttgggaaggtggatgttggacgctatactgatgttagtacgcggtacaaagtgagcacatcacccctcaccaagcaactccctaccctgatcctgttccaaggtggcaaggaggcaatgcggcggccacagattgacaagaaaggacgggctgtctcatggaccttctctgaggagaatgtgatccgagaatttaacttaaatgagctataccagcgggccaagaaactatcaaaggctggagacaatatccctgaggagcagcctgtggcttcaacccccaccacagtgtcagatggggaaaacaagaaggataaataagatcctcactttggcagtgcttcctctcctgtcaattccaggctctttccataaccacaagcctgaggctgcagccttttatttatgttttccctttggctgtgactgggtggggcagcatgcagcttctgattttaaagaggcatctagggaattgtcaggcaccctacaggaaggcctgccatgctgtggccaactgtttcactggagcaagaaagagatctcataggacggagggggaaatggtttccctccaagcttgggtcagtgtgttaactgcttatcagctattcagacatctccatggtttctccatgaaactctgtggtttcatcattccttcttagttgacctgcacagcttggttagacctagatttaaccctaaggtaagatgctggggtatagaacgctaagaattttcccccaaggactcttgcttccttaagcccttctggcttcgtttatggtcttcattaaaagtataagcctaactttgtcgctagtcctaaggagaaacctttaaccacaaagtttttatcattgaagacaatattgaacaaccccctattttgtggggattgagaaggggtgaatagaggcttgagactttcctttgtgtggtaggacttggaggagaaatcccctggactttcactaaccctctgacatactccccacacccagttgatggctttccgtaataaaaagattgggatttccttttga

SEQ ID NO: 190914 - DNA, 829 bp, Homo sapiens
  Payload ID: 17715
  Gene Name: thioredoxin-related transmembrane protein 2
  ENST ID: ENST00000528110
  CDS Start-End: 6-317
aaaagatggcggtcttggcacctctaattgctctcgtgtattcggtgccgcgactttcacgatggctcgcccaaccttactaccttctgtcggccctgctctctgctgccttcctactcgtgaggaaactgccgccgctctgccacggtctgcccacccaacgcgaagacggtaacccgtgtgactttgactggagagaagtggagatcctgatgtttctcagtgccattgtgatgatgaagaaccgcagatccagaggaactagaacgggacaagagggtcacttggattgtggagttctttgccaattggtctaatgactgccaatcatttgcccctatctatgctgacctctcccttaaatacaactgtacagggctaaattttgggaaggtggatgttggacgctatactgatgttagtacgcggtacaaagtgagcacatcacccctcaccaagcaactccctaccctgatcctgttccaaggtggcaaggaggcaatgcggcggccacagattgacaagaaaggacgggctgtctcatggaccttctctgaggagaatgtgatccgagaatttaacttaaatgagctataccagcgggccaagaaactatcaaaggctggagacaatatccctgaggagcagcctgtggcttcaacccccaccacagtgtcagatggggaaaacaagaaggataaataagatcctcactttggcagtgcttcctctcctgtcaattccaggctctttccataaccacaagcctgaggctgcagccttttatttatgttttccctttggctgtgactgggtggggcagcatgca

SEQ ID NO: 190915 - DNA, 703 bp, Homo sapiens
  Payload ID: 17715
  Gene Name: thioredoxin-related transmembrane protein 2
  ENST ID: ENST00000525035
  CDS Start-End: 8-355
cgaaaagatggcggtcttggcacctctaattgctctcgtgtattcggtgccgcgactttcacgatggctcgcccaaccttactaccttctgtcggccctgctctctgctgccttcctactcgtgaggaaactgccgccgctctgccacggtctgcccacccaacgcgaagacggtaacccgtgtgactttgactggagagaagtggagatcctgatgtttctcagtgccattgtgatgatgaagaaccgcagatccatgccccatgaagagggacaaagaatgggatataggagtgcacagcccagcctgacctgtgacatctctgtgtttcagtcactgtggagcaacatataggcaacattttcatgtttagtaaagtggccaacacaattcttttcttccgcttggatattcgcatgggcctactttacatcacactctgcataggaggaactagaacgggacaagagggtcacttggattgtggagttctttgccaattggtctaatgactgccaatcatttgcccctatctatgctgacctctcccttaaatacaactgtacagggctaaattttgggaaggtggatgttggacgctatactgatgttagtacgcggtacaaagtgagcacatcacccctcaccaagcaactccctaccctgatcctgttccaaggtggcaaggaggcaatgcggcgg

SEQ ID NO: 190916 - DNA, 560 bp, Homo sapiens
  Payload ID: 17715
  Gene Name: thioredoxin-related transmembrane protein 2
  ENST ID: ENST00000533602
  CDS Start-End: 6-260
aaaagatggcggtcttggcacctctaattgctctcgtgtattcggtgccgcgactttcacgatggctcgcccaaccttactaccttctgtcggccctgctctctgctgccttcctactcgtgaggaaactgccgccgctctgccacggtctgcccacccaacgcgaagacggtaacccgtgtgactttgactggagagaagtggagatcctgatgtttctcagtgccattgtgatgatgaagaaccgcagatccagctgaatttgaacttggacttctatcccctccctgtctcctatttcaaagtgccccatgaagagggacaaagaatgggatataggagtgcacagcccagcctgacctgtgacatctctgtgtttcagtcactgtggagcaacatataggcaacattttcatgtttagtaaagtggccaacacaattcttttcttccgcttggatattcgcatgggcctactttacatcacactctgcatagtgttcctgatgacgtgcaaaccccccctatatatgggccctgagtatatcaagtacttcaatga

SEQ ID NO: 190917 - DNA, 663 bp, Homo sapiens
  Payload ID: 17715
  Gene Name: thioredoxin-related transmembrane protein 2
  ENST ID: ENST00000530114
  CDS Start-End: 13-273
acggccgaaaagatggcggtcttggcacctctaattgctctcgtgtattcggtgccgcgactttcacgatggctcgcccaaccttactaccttctgtcggccctgctctctgctgccttcctactcgtgaggaaactgccgccgctctgccacggtctgcccacccaacgcgaagacggtaacccgtgtgactttgactggagagaagtggagatcctgatgtttctcagtgccattgtgatgatgaagaaccgcagatccagtacaaagtgagcacatcacccctcaccaagcaactccctaccctgatcctgttccaaggtggcaaggaggcaatgcggcggccacagattgacaagaaaggacgggctgtctcatggaccttctctgaggagaatgtgatccgagaatttaacttaaatgagctataccagcgggccaagaaactatcaaaggctggagacaatatccctgaggagcagcctgtggcttcaacccccaccacagtgtcagatggggaaaacaagaaggataaataagatcctcactttggcagtgcttcctctcctgtcaattccaggctctttccataaccacaagcctgaggctgcagccttttatttatgttttccctttggctgtgactgggtggggcagcatgca

SEQ ID NO: 190918 - DNA, 1697 bp, Homo sapiens
  Payload ID: 17715
  Gene Name: thioredoxin-related transmembrane protein 2
  ENST ID: ENST00000529403
  CDS Start-End: 6-353
aaaagatggcggtcttggcacctctaattgctctcgtgtattcggtgccgcgactttcacgatggctcgcccaaccttactaccttctgtcggccctgctctctgctgccttcctactcgtgaggaaactgccgccgctctgccacggtctgcccacccaacgcgaagacggtaacccgtgtgactttgactggagagaagtggagatcctgatgtttctcagtgccattgtgatgatgaagaaccgcagatccatgccccatgaagagggacaaagaatgggatataggagtgcacagcccagcctgacctgtgacatctctgtgtttcagtcactgtggagcaacatataggcaacattttcatgtttagtaaagtggccaacacaattcttttcttccgcttggatattcgcatgggcctactttacatcacactctgcatagtgttcctgatgacgtgcaaaccccccctatatatgggccctgagtatatcaagtacttcaatgataaaaccattgatgaggaactagaacgggacaagagggtcacttggattgtggagttctttgccaattggtctaatgactgccaatcatttgcccctatctatgctgacctctcccttaaatacaactgtacagggctaaattttgggaaggtggatgttggacgctatactgatgttagtacgcggtacaaagtgagcacatcacccctcaccaagcaactccctaccctgatcctgttccaaggtggcaaggaggcaatgcggcggccacagattgacaagaaaggacgggctgtctcatggaccttctctgaggagaatgtgatccgagaatttaacttaaatgagctataccagcgggccaagaaactatcaaaggctggagacaatatccctgaggagcagcctgtggcttcaacccccaccacagtgtcagatggggaaaacaagaaggataaataagatcctcactttggcagtgcttcctctcctgtcaattccaggctctttccataaccacaagcctgaggctgcagccttttatttatgttttccctttggctgtgactgggtggggcagcatgcagcttctgattttaaagaggcatctagggaattgtcaggcaccctacaggaaggcctgccatgctgtggccaactgtttcactggagcaagaaagagatctcataggacggagggggaaatggtttccctccaagcttgggtcagtgtgttaactgcttatcagctattcagacatctccatggtttctccatgaaactctgtggtttcatcattccttcttagttgacctgcacagcttggttagacctagatttaaccctaaggtaagatgctggggtatagaacgctaagaattttcccccaaggactcttgcttccttaagcccttctggcttcgtttatggtcttcattaaaagtataagcctaactttgtcgctagtcctaaggagaaacctttaaccacaaagtttttatcattgaagacaatattgaacaaccccctattttgtggggattgagaaggggtgaatagaggcttgagactttcctttgtgtggtaggacttggaggagaaatcccctggactttcactaaccctctgacatactccccacacccagttgatggctttccgtaataaaaagattgggatttcctt

SEQ ID NO: 190919 - DNA, 696 bp, Homo sapiens
  Payload ID: 17715
  Gene Name: thioredoxin-related transmembrane protein 2
  ENST ID: ENST00000524972
  CDS Start-End: 20-331
ggccgttacggccgaaaagatggcggtcttggcacctctaattgctctcgtgtattcggtgccgcgactttcacgatggctcgcccaaccttactaccttctgtcggccctgctctctgctgccttcctactcgtgaggaaactgccgccgctctgccacggtctgcccacccaacgcgaagacggtaacccgtgtgactttgactggagagaagtggagatcctgatgtttctcagtgccattgtgatgatgaagaaccgcagatccagaggaactagaacgggacaagagggtcacttggattgtggagttctttgccaattggtctaatgactgccaatcatttgcccctatctatgctgacctctcccttaagtgagtagtgcaaagggagggatggtggaaatggagatgctgtgccttccctctcactgtttttggcttttctttttcttttggccttgattttcacacatggtaaccaaaggcatctccctctcccctcttaaatatctatacttccactttccttgatccattattttttttcagcatattaaataatatattcttttcagatacaactgtacagggctaaattttgggaaggtggatgttggacgctatactgatgttagtacgcggtacaaagtgagcacatcacccctcaccaagcaactccctaccctgatcct

SEQ ID NO: 190920 - DNA, 4927 bp, Homo sapiens
  Payload ID: 17716
  Gene Name: thioredoxin-related transmembrane protein 3
  Uniprot ID: Q96JJ7
  ENST ID: ENST00000299608
  CDS Start-End: 318-1682
accgttttccctagtaaagcccttaagcagggttcccacgctcctgggcgtggaggggggcaccgagagcgcaaaggattcttaagacatgactgcgcaggcgctgtcgcatgcgccgcactcccctcgcatgcgccgcactcccgcgcatagccggagacggagactggccgggtagccccgcccccgtagttagcgcggtgcttctcttccgctccgggtcggctccgtttccctttccgggcgggcaggcggcggaccccagtgtctttatccctcttttgcacagtcagcttctgcagctctcccgggctagcatggcagcgtggaagagttggacggccctgcggctctgcgccacagttgttgtacttgatatggtcgtctgtaaaggatttgtagaagatttagatgaatcgtttaaagaaaatcgaaatgatgacatttggcttgtagatttttatgcgccatggtgtggccattgtaaaaagctggaaccaatttggaatgaagttggtcttgagatgaaaagcattggttctccagttaaggttggaaagatggatgctacttcctattctagcattgcttcagagtttggagttcgaggttatccaacaattaagctattaaaaggggacttggcatataattatagaggaccacgaacaaaagatgatattattgagtttgctcacagagtatctggggctctaattcggccacttccaagtcaacaaatgtttgaacatatgcagaagagacaccgtgtatttttcgtttatgtaggtggagaatcacctttgaaagagaaatacatagatgctgcttcagaattgattgtatatacatacttcttttctgcctcagaagaagtggttcctgagtatgtgacactaaaagagatgccagctgtgcttgttttcaaagatgaaacttactttgtttatgatgagtatgaagatggtgatctgtcatcatggatcaacagggaaaggtttcagaattaccttgctatggatggcttcctcttgtatgaacttggagacacaggaaagcttgtggctcttgcagttattgatgagaaaaatacatcagttgaacataccagattgaagtcaattattcaggaagttgcaagagattacagagacctcttccatagggattttcagtttggccacatggatggaaatgactacataaataccttgctgatggatgaattgacagtcccaactgtagttgtactgaatacttcaaaccagcaatatttcttgctagatagacagattaagaatgttgaagacatggtccagtttattaataacattttggatggcacagtagaagcccaaggaggtgatagcattttgcagagattgaaaagaatagtatttgatgccaaatctactattgtgtctatattcaagagctcaccactgatgggctgctttctctttggcctgccactgggtgtcatcagtatcatgtgctatggaatctacacagccgacacagatggaggttatatagaagaacgatatgaagtgtctaaaagtgaaaatgaaaaccaagaacagatagaagagagcaaagaacagcaggagcccagcagtggaggatctgtagtgcctacagtgcaggagcccaaggatgtattagaaaagaagaaagattgagacttgatgactataaaatatttgttaggacttcaaattattaaagagtctatttattgaatttagacatttaatcatgatctttacagaaaagaacatgttattcgtattttgctaatatcaactgcatggattaaagtagtccctccatacatggggaagtgtttggagcaaagagatgaacagtttgtctgaaacaaacacagagcactccatcaaaatttacctgatctttgtgattagaacagaacaattctatttgcatgtttctctatctgaatattctgtgacaaaaagttaagattcttgggcagaatatttaaattggtcagtcaggtagaagatacatgtgtgatatagaaaaataatgcctctcctgctgccatccgtttccctcatatattttggacaagatttatatggacaaaattaagtctttaaaatttaggcactttaaggagaactaataactttttccatgtatcaagattatgaggttaaaaataatgtggttttatatagcatagtggttttattttgttagttatttttaaaggagaagaaatgttactttttaactttatactcagttgcattatcataaaattttcatatatgcctagataatggggaaaaaaagtcttgtgattgactttcgcaaaataaacaggatttactgagtagaggtttcagcccattccttggaatactaacaggtatttcatcagtcattgtaggttgggaagggtctctgttaatcctactctgctttagccagaatagcctagtattttatttctattttatatattgagatttcttctaacatttcctttgataaaaatcttctgctttttgaaaagtggtatgtatcatatttttatgtttctggtgtgtgaactttatggtaacttctactctagaatacgtacgtatgcacccacagacacacacagtttattgacacatctattatgtaatgctgtagacctgtccgtgtctgcttcataaggagtaacgactgacattagcatgtccagtgacaagtcacatccggtgtaaaaaaaagagatcagccagttaccttctccattgtcttagttctgtcacccatttcgtcaagtgacctctcatcttctataaactaatacaggaattctttccaaagcaatgtctaaaaactcttttttttaaagtaacagtttggtatgtttattgtagataaattatttttgaggccttcattttagctaagtttagaatttatattaggcaactatgatttgagtggttattcattgagtaattttccactataaagaattttattgaacatttattaaaaaataatgtaatgcatggtcaaaaaatatgtaattcatggtctggacactgacgttgtttagggatttagtcatcaaggacagccctctgttgtttctaatgccgtactaatcaagactgtatggacacttgcatcttaagtactaaggaattactagtgattgttttattttatccatgtactcttttagtatttaataattaaatacctattcttagtgtttgacactccatatttcttttttttggaaatgaaacaaatatgcagtccaaaattcaggaactactagagtgaaatgatattaagtggaaaccagagataaatgctgttaatttaacaagtagattcttctccaaagaatgatgagtgattcttgggaagataaatgttaatgttcccaatagtcaagcttgttttgcagtagtgaaaagcttagatgagtacggatacctcatttgaaactcagcctagtaaggaagtgaaaacttagcagtcagtgacatggggaaatagttatagaaaatgtcactgaattttttcatatttataattagtcatttacatatttttgtcttgttgatcattacctgtaaatgaaagaccttaataggaaaaaaagagtaaagctcagtgtgaatgcaaacatccacaaaatatgatcttcgtttatattctgtgatgttgtttataaatgaatgcctcagttctctgctacccttttcacagctttgtactgtttgccttatattctatttgtgcttttaaagtgtgtctgttgggaaaacaaaatgtgtaggtggtttgtaagtgaataatttttatttcttcttgtattaaaattttgtttttttctctactttgggagatgtttatttacattgtcagactattcacaaaacagattctaaaatttgtttgctcgtatgctgttcccttcaatgtgatatcagagattactatgaatgttagtttcattccgtgaaacattacttccatataaagacagatctcttaataagtgaatctagtggaagaacataggtatcattctaattccatggtaaattttgtcatgattctatatgaataatggggtccttcaggaagttggaatttttgccttctcttttaattgcagtgaagttctctttataacttctaaaattcggaattctagatccttgcttttgcagaatttggtgctcagacaatatttaaggacatttcagcgagacaaagtgcatgtttttatcgagtaccctgtgcaccacattatatctggcaattctttttgtttcattatgtgcatcaatatttttctcagctactattacctgaaacttgtttaacatgtattagacctagaattttcattttctttctcacatagttgcttcctggtatctgatttagaaataacatttaaatgccaagtatctgggggattgaaggaagggtctatatgagcaggtgaattagcagtactgtttttgtttagtggatattgttagtgactttttgtgtgtgttttgctttgggacctttttattttggtgttgcaaaaagtaacatattttcatcattgcttcatacgacatggagttaggacagggaaaaatcattcaacactccttatgcattaaatgatcaaataaaccagtgtaggatattaagactatcaattggtgggattaggcttgacattttatttttataaatatatattttttctgaatgtgtctgagtccaagagtgggcaaaaaataattttctactttggactaatctatagaggtttttgaaagtctgcattactaacttgttgaattcatgatattctgcctatggcacaaattgtaaacctttgtttttctaaaataaagtaattgaaaacctgcaa

SEQ ID NO: 190921 - DNA, 913 bp, Homo sapiens
  Payload ID: 17716
  Gene Name: thioredoxin-related transmembrane protein 3
  ENST ID: ENST00000443099
  CDS Start-End: 77-670
gggcgggcaggcggcggaccccagtgtctttatccctcttttgcacagtcagcttctgcagctctcccgggctagcatggcagcgtggaagagttggacggccctgcggctctgcgccacagttgttgtacttgatatggtcgtctgtaaaggatttgtagaagatttagatgaatcgtttaaagaaaatcgaaatgatgacatttggcttgtagatttttatgcgccatggtgtggccattgtaaaaagctggaaccaatttggaatgaagttggtcttgagatgaaaagcattggttctccagttaaggttggaaagatggatgctacttcctattctagcattgcttcagagtttggagttcgaggttatccaacaattaagctggctctaattcggccacttccaagtcaacaaatgtttgaacatatgcagaagagacaccgtgtatttttcgtttatgtaggtggagaatcacctttgaaagagaaatacatagatgctgcttcagaattgattgtatatacatacttcttttctgcctcagaagaagtggttcctgagtatgtgacactaaaagagatgccagctgtgcttgttttcaaagatgaaacttactttgtttatgatggtaagttccaaatctttaactcatgtaaaacattttaaaattaaaatgtctgttatacaacttaggtgtaaagattatgtaaatgcttctactgttcaatgagaataacagttctcatgacttgaatgcctgatgttttgggttttttttcacccttcaacttataattgttagttatttttattctgagctttacctacacaacattctttttgttgttgtttgttaaattatatgcgtttttgaggaataaattctatgtgatttttatacattacttt

SEQ ID NO: 190922 - DNA, 710 bp, Homo sapiens
  Payload ID: 17716
  Gene Name: thioredoxin-related transmembrane protein 3
  ENST ID: ENST00000565918
  CDS Start-End: 89-475
gtttccctttccgggcgggcaggcggcggaccccagtgtctttatccctcttttgcacagtcagcttctgcagctctcccgggctagcatggcagcgtggaagagttggacggccctgcggctctgcgccacagttgttgtacttgatatggtcgtctgtaaaggatttgtagaagatttagatgaatcgtttaaagaaaatcgaaatgatgacatttggcttgtagatttttatgcgccatggtgtggccattgtaaaaagctggaaccaatttggaatgaagttggtcttgagatgaaaagcattggttctccagttaaggttggaaagatggatgctacttcctattctagcattgcttcagagtttggagttcgaggttatccaacaattaagcttagattccctggaggattgaagattggggtttggccattcttcataggtgaaattaaaaggggacttggcatataattatagaggaccacgaacaaaagatgatattattgagtttgctcacagagtatctggggctctaattcggccacttccaagtcaacaaatgtttgaacatatgcagaagagacaccgtgtatttttcgtttatgtaggtggagaatcacctttgaaagagaaatacatagatgctgcttcagaattgattgtatatacatacttcttttctgcctcagaagaagtggttcctgag

SEQ ID NO: 190923 - DNA, 530 bp, Homo sapiens
  Payload ID: 17716
  Gene Name: thioredoxin-related transmembrane protein 3
  ENST ID: ENST00000564008
  CDS Start-End: 85-276
ccctttccgggcgggcaggcggcggaccccagtgtctttatccctcttttgcacagtcagcttctgcagctctcccgggctagcatggcagcgtggaagagttggacggccctgcggctctgcgccacagttgttgtacttgatatggtcgtctgtaaaggatttgtagaagatttagatgaatcgtttaaagaaaatcgaaatgatgacatttggcttgtagatgcattgcttcagagtttggagttcgaggttatccaacaattaagctattaaaaggggacttggcatataattatagaggaccacgaacaaaagatgatattattgagtttgctcacagagtatctggggctctaattcggccacttccaagtcaacaaatgtttgaacatatgcagaagagacaccgtgtatttttcgtttatgtaggtggagaatcacctttgaaagagaaatacatagatgctgcttcagaattgattgtatatacatacttcttttctgcctcagaagaagtggttcctgag

SEQ ID NO: 190924 - DNA, 1509 bp, Homo sapiens
  Payload ID: 17716
  Gene Name: thioredoxin-related transmembrane protein 3
  ENST ID: ENST00000564631
  CDS Start-End: 97-366
tcggctccgtttccctttccgggcgggcaggcggcggaccccagtgtctttatccctcttttgcacagtcagcttctgcagctctcccgggctagcatggcagcgtggaagagttggacggccctgcggctctgcgccacagttgttgtacttgatatggtcgtctgtaaaggatttgtagaagatttagatgaatcgtttaaagaaaatcgaaatgatgacatttggcttgtagatttttatgcgccatggtgtggccattgtaaaaagctggaaccaatttggaatgaagttggtcttgagatgaaaagcattggttctccagttaaggttggaaagatggatgctacttcctattctaattaaaaggggacttggcatataattatagaggaccacgaacaaaagatgatattattgagtttgctcacagagtatctggggctctaattcggccacttccaagtcaacaaatgtttgaacatatgcagaagagacaccgtgtatttttcgtttatgtaggtggagaatcacctttgaaagagaaatacatagatgctgcttcagaattgattgtatatacatacttcttttctgcctcagaagaagtggttcctgagtatgtgacactaaaagagatgccagctgtgcttgttttcaaagatgaaacttactttgtttatgatgagtatgaagatggtgatctgtcatcatggatcaacagggaaaggtttcagaattaccttgctatggatggcttcctcttgtatgaacttggagacacaggaaagcttgtggctcttgcagttattgatgagaaaaatacatcagttgaacataccagattgaagtcaattattcaggaagttgcaagagattacagagacctcttccatagggattttcagtttggccacatggatggaaatgactacataaataccttgctgatggatgaattgacagtcccaactgtagttgtactgaatacttcaaaccagcaatatttcttgctagatagacagattaagaatgttgaagacatggtccagtttattaataacattttggatggcacagtagaagcccaaggaggtgatagcattttgcagagattgaaaagaatagtatttgatgccaaatctactattgtgtctatattcaagagctcaccactgatgggctgctttctctttggcctgccactgggtgtcatcagtatcatgtgctatggaatctacacagccgacacagatggaggttatatagaagaacgatatgaagtgtctaaaagtgaaaatgaaaaccaagaacagatagaagagagcaaagaacagcaggagcccagcagtggaggatctgtagtgcctacagtgcaggagcccaaggatgtattagaaaagaagaaagattgagacttgatgactataaaatatttgttaggacttcaaattattaaagagtctatttattgaatttagacatttaatcatgatctttacagaaaag

SEQ ID NO: 190925 - DNA, 582 bp, Homo sapiens
  Payload ID: 17716
  Gene Name: thioredoxin-related transmembrane protein 3
  ENST ID: ENST00000569982
  CDS Start-End: 196-405
ctcccgtcagcatggagtgccctcattctcactggggtccgctcacttaacaaccttttagagcccactctgtgtcaggcactgccgtgtaataagtattagagttgcagctcgactttcttcctacgtatctatttgaggggaaatattttgaatggcatttggagtttttacggaagagttgttgtacttgatatggtcgtctgtaaaggatttgtagaagatttagatgaatcgtttaaagaaaatcgaaatgatgacatttggcttgtagatttttatgcgccatggtgtggccattgtaaaaagctggaaccaatttggaatgaagttggtcttgagatgaaaagcattggttctccagttaaggttggaaagatggatgctacttcctattctaattaaaaggggacttggcatataattatagaggaccacgaacaaaagatgatattattgagtttgctcacagagtatctggggctctaattcggccacttccaagtcaacaaatgtttgaacatatgcagaagagacaccgtgtatttttcgtttatgtaggtggagaatcacctttgaaag

SEQ ID NO: 190926 - DNA, 937 bp, Homo sapiens
  Payload ID: 17716
  Gene Name: thioredoxin-related transmembrane protein 3
  Uniprot ID: Q96JJ7
  ENST ID: ENST00000562706
  CDS Start-End: 78-665
cgggcgggcaggcggcggaccccagtgtctttatccctcttttgcacagtcagcttctgcagctctcccgggctagcatggcagcgtggaagagttggacggccctgcggctctgcgccacagttgttgtacttgatatggtcgtctgtaaaggatttgtagaagatttagatgaatcgtttaaagaaaatcgaaatgatgacatttggcttgtagatttttatgcgccatggtgtggccattgtaaaaagctggaaccaatttggaatgaagttggtcttgagatgaaaagcattggttctccagttaaggttggaaagatggatgctacttcctattctagcattgcttcagagtttggagttcgaggttatccaacaattaagctattaaaaggggacttggcatataattatagaggaccacgaacaaaagatgatattattgagtttgctcacagagtatctggggctctaattcggccacttccaagtcaacaaatgtttgaacatatgcagaagagacaccgtgtatttttcgtttatgtaggtggagaatcacctttgaaagagaaatacatagatgctgcttcagaattgattgtatatacatacttcttttctgcctcagaagaagtggttcctgaggtaatatttaaaatttgattttaacgacacaattttatttattaaattattacttgatttaataaactaaattgtgattttattacttgattaaattattgattttaatatcagatttatttactgtgatatgtttggaaaaagtaaacatgctgattctttactactggtattagattgctttttattaataaataccatcagattcgtagcatttagggatttacattagtgcttcttgttttttaaaataaaagtagtgatgacaagtgatacctcaaactcctaaa

SEQ ID NO: 190927 - DNA, 940 bp, Homo sapiens
  Payload ID: 17716
  Gene Name: thioredoxin-related transmembrane protein 3
  ENST ID: ENST00000569053
  CDS Start-End: 55-324
agtgtctttatccctcttttgcacagtcagcttctgcagctctcccgggctagcatggcagcgtggaagagttggacggccctgcggctctgcgccacagttgttgtacttgatatggtcgtctgtaaaggatttgtagaagatttagatgaatcgtttaaagaaaatcgaaatgatgacatttggcttgtagatttttatgcgccatggtgtggccattgtaaaaagctggaaccaatttggaatgaagttggtcttgagatgaaaagcattggttctccagttaaggttggaaagatggatgctacttcctattctaattaaaaggggacttggcatataattatagaggaccacgaacaaaagatgatattattgagtttgctcacagagtatctggggctctaattcggccacttccaagtcaacaaatgtttgaacatatgcagaagagacaccgtgtatttttcgtttatgtaggtggagaatcacctttgaaagagaaatacatagatgctgcttcagaattgattgtatatacatacttcttttctgcctcagaagaagtggttcctgagtatgtgacactaaaagagatgccagctgtgcttgttttcaaagatgaaacttactttgtttatgatgataataactacacacttatgctgtcatataaaaggtactatctacatacttgacattttcattttatttacaaagtaatctgtgaggtaggtaataaggcagatagattaataccccaggattacaaaggatatagctaagaatgttagataaggagacaggtgtgtaattaaatagcaggtttatcatatgcttattcagccatccattaattggatgtttattgaatgtctgtattagacgttgggcttataaaagaacttcagagaaacttgtgtatttgaaaatatgagaa

SEQ ID NO: 190928 - DNA, 6169 bp, Homo sapiens
  Payload ID: 17717
  Gene Name: thioredoxin-related transmembrane protein 4
  Uniprot ID: Q9H1E5
  ENST ID: ENST00000246024
  CDS Start-End: 217-1266
ggaggcgggagggggcgtggcctcgacgggcaagcggcgataagaggtggcgtcctccgcggcattgcgagcaccgccagtctgcgccgctaggcgtaggcggggtggcccttgcgtctcccgcttccttgaaaaacccggcgggcgagcgaggctgcgggccggccgctgcccttccccacactccccgccgagaagcctcgctcggcgcccaacatggcgggtgggcgctgcggcccgcagctaacggcgctcctggccgcctggatcgcggctgtggcggcgacggcaggccccgaggaggccgcgctgccgccggagcagagccgggtccagcccatgaccgcctccaactggacgctggtgatggagggcgagtggatgctgaaattttacgccccatggtgtccatcctgccagcagactgattcagaatgggaggcttttgcaaagaatggtgaaatacttcagatcagtgtggggaaggtagatgtcattcaagaaccaggtttgagtggccgcttctttgtcaccactctcccagcattttttcatgcaaaggatgggatattccgccgttatcgtggcccaggaatcttcgaagacctgcagaattatatcttagagaagaaatggcaatcagtcgagcctctgactggctggaaatccccggcttctctaacgatgtctggaatggctggtctttttagcatctctggcaagatatggcatcttcacaactatttcacagtgactcttggaattcctgcttggtgttcttatgtctttttcgtcatagccaccttggtttttggcctttttatgggtctggtcttggtggtaatatcagaatgtttctatgtgccacttccaaggcatttatctgagcgttctgagcagaatcggagatcagaggaggctcatagagctgaacagttgcaggatgcggaggaggaaaaagatgattcaaatgaagaagaaaacaaagacagccttgtagatgatgaagaagagaaagaagatcttggcgatgaggatgaagcagaggaagaagaggaggaggacaacttggctgctggtgtggatgaggagagaagtgaggccaatgatcaggggcccccaggagaggacggtgtgacccgggaggaagtagagcctgaggaggctgaagaaggcatctctgagcaaccctgcccagctgacacagaggtggtggaagactccttgaggcagcgtaaaagtcagcatgctgacaagggactgtagatttaatgatgcgttttcaagaatacacaccaaaacaatatgtcagcttccctttggcctgcagtttgtaccaaatccttaatttttcctgaatgagcaagcttctcttaaaagatgctctctagtcatttggtctcatggcagtaagcctcatgtatactaaggagagtcttccaggtgtgacaatcaggatatagaaaaacaaacgtagtgttgggatctgtttggagactgggatgggaacaagttcatttacttaggggtcagagagtctcgaccagaggaggccattcccagtcctaatcagcaccttccagagacaaggctgcaggccctgtgaaatgaaagccaagcaggagccttggctcctgagcatccccaaagtgtaacgtagaagccttgcatccttttcttgtgtaaagtatttatttttgtcaaattgcaggaaacatcaggcaccacagtgcatgaaaaatctttcacagctagaaattgaaagggccttgggtatagagagcagctcagaagtcatcccagccctctgaatctcctgtgctatgttttatttcttacctttaatttttccagcatttccaccatgggcattcaggctctccacactcttcactattatctcttggtcagaggactccaataacagccaggtttacatgaactgtgtttgttcattctgacctaaggggtttagataatcagtaaccataacccctgaagctgtgactgccaaacatctcaaatgaaatgttgtggccatcagagactcaaaaggaagtaaggattttacaagacagattaaaaaaaaattgttttgtccaaaatatagttgttgttgatttttttttaagttttctaagcaatatttttcaagccagaagtcctctaagtcttgccagtacaaggtagtcttgtgaagaaaagttgaatactgttttgttttcatctcaaggggttccctgggtcttgaactactttaataataactaaaaaaccacttctgattttccttcagtgatgtgcttttggtgaaagaattaatgaactccagtacctgaaagtgaaagatttgattttgtttccatcttctgtaatcttccaaagaattatatctttgtaaatctctcaatactcaatctactgtaagtacccagggaggctaatttccttaaaaaaaaaaaatctatccatctacttctctcttacctgatttatgtgttagaataaattcatgaaattcgattccaagcatacgaaagatgcctaaagttgattctatgctccttagatccagacagaataatgagtacaggtttatgaaattctaaaagtttctgtcgtctttaaaaaggaacgtgcagtatatttctatctggctgtttagataaccctttccttgtattaattgtgagcacggagctcactggtgggggaggttctgaaactctctgccctcctgtggttgaatgaagatgttgcaagacttgcacaaaggaggttattcttctgacagcatcaacttttagagatggttctttttcatctttccaattcagttacttgacagtctccttccccagtatgctgaagtttgttaagagtcaccagtaattgtgcttttcagacagtagtgcagcttcaaaatcgaggccatcactgggctgatgggctgggagaaccttgccatgtgcctgcctgtttcctgcccccttagtcactgcccatttcctgcccccttggtcgctgacacaccttcacccaaagtgccatggttctgatggtggcagttccatctccctgacatcaggaagcttttctcgatcagagcagagcggggcctgcctgccctcgtgtcactggatttctttctcttataatcagctgaaacagagttctcaaagaacagtaaactcaggttcagaggtattatggaataagaatggtttcatagtttggcttttctatataattcctccctctcaaactgaaatattcatttttttagtggagtatttgactagagagaaggtaaggcagaaatacagtctacactggcttttaaaaatgtaaagccaatttccaaccggaccccaaatagtacaggttgaacattccgttccaacaatccaaaaccccaaatgctccaaaatcttaaactttgagttccagcattccgtcagaagtggaaaattttacacctgacctcatttgacaggtggcagttacagtgcaatcaaaactttgttccatgcccaagattattaaaaatattggataaaattaccttcaagctatgttgtataaggtgtatataaaacaaatgaattttgtgtttagacttgggtctactcccaagatacctcattatatatatacaaaaatccccaaatccaaaaacatttgaaacacttctggtcccacacattttggataagggatatttgacctatatctaattatataataagaaaaatgtattttcttttttttttttttttgagatggagtttcactcttgttgtcgcccaggctgcaatggcacaatcttggcttactacaacctccgcctccctagttcaagggattctcctgcctcagcctcccaggtagctgggattacaggcatgtgccaccatgcctggctaattttgtatttttagtagagacggggtttcgccatgttggtcagactggtcttgaactcctgacctcaggtgatccgcccgcctcagcctcccaacgtgctgggattacaggtgtgagccaccgtacctggcagaaaatgtactttctttctcagaaatacttttaaaaaaaattgaagggtgaggagaaaaacatcttggagaagaggacccattaaaactttaaatatctgtgggaaccatttttcctgattttcccttttttaacatcatggcaaagatgggtttttttccaacaaaatttaatttaatatctttccacttgaagattttaggtttgttttcaatacttaatgaatataaaactaaaggagaaaagccaacctgaaataatttaaactttatatgaacatttcgataagagtttgtggattttttctgtagataatatatttgatccggaactcaagtgcatggaaacatgattttgatttttaaaatctaaaaaaaaaaaaaattaaaatcatgcttccctctattgcagtatcagttatttagtcacagaatggtattttatgtaaattaaaattaggtgaatgcaatgcaggtaactggttttggaatgggaatgtgcagtgctttatgtttggggagttggagcagggtatcttttcatcaattagaaggaaagtttgaaacttctgattacctttatgttggtttctcttattatttgtctcttgctagatctgctaaaccaacccagcttgctcagagatctcatattgaagcaacatacaggcaatccacatctttctttccctttgaagtatagtcattggatgggatgagggacagggcctgttgggttcacagggccttgcactgcatgggcacatacttaaaagctcttgtgcatggaatccctgtctgttagccacaggcctctttagctctatacattcaaaataactactgtagtagaaaatagataagcttcagctgagttggcttttgatagtggaaaaaaaacaaaatttgactttttatggccaaaattccttgttgacagctgtgatgttctaatatgatttgggaatatgtcagtctacagaacctgcatcctgtaaaaacacctttggggtagacgataaaagtcatttttaaggcaaatacttaccatgtgactttttattaccaaatgcatcagtagtggagctggtatgttgtttcataggatggaaacattagaagtccagagaaaaataaattttaaaaaaaggtggaaaagttacggcaaacctgagatttcagcataaaatctttagtatgaagtgagagaaagaagagggaggctggttctgttgctcgtatcaataggttatctgtgtccctcatcttggtgttacagtgttatttctgtcagtattatgaatatgtggttgacccatcctgtcaaatgtaccaacattttcgaaagaattcattcaaatctcttatgccaacagaaaagttccttcttgtttaatatctctttacctcagtcctacattttgattctctggaggagattttagcttgtcttaaaaagccaaatttggagtcatcaagcctgctgaacctgatggggcagctttttgaacagctttctggaagtaagaacttcagttgaaaagccctttgatcgcttcagcccgggacatgcccttcagatggcttattctcagtaaagctttatgtagactgtgacactgtatatgtgtgactcgtacaactttgacgtgtttctgaagtggtttaatcgtatttgttattagcttctttgtggaaatgcaatttttatactaaaaacattgcttatttgcaatgcaatatgttataaatttgttgtttatattactggtattagtcttagcctaatgaacctaattatttttctttctgtattctttgcttcctcaaatagcatctgcagcaattggaatgagaaatccagatatgtgtttcaagtagtacattgcctgaatcacaaatcacttgatcacagtattgtatataatccctgatcctatttgtttcattttattgtaaattcccatttgcatcaaaacctaatgatagtgattggtaagtaaaaacaaatggtgtattgcttttcatacaagtgttttcacaaaagccatttgcctaggcagcaaaaaatattaatttgttaaaaaaaattttccttcgtgtccatcctc

SEQ ID NO: 190929 - DNA, 873 bp, Homo sapiens
  Payload ID: 17717
  Gene Name: thioredoxin-related transmembrane protein 4
  ENST ID: ENST00000462384
  CDS Start-End: 34-273
ctccccgccgagaagcctcgctcggcgcccaacatggcgggtgggcgctgcggcccgcagctaacggcgctcctggccgcctggatcgcggctgtggcggcgacggcaggccccgaggaggccgcgctgccgccggagcagagccgggtccagcccatgaccgcctccaactggacgctggtgatggagggcgagtggatgctgaaattatacagatatgtattggaagagaaaggacattcagtgacatccacgtgcagtatgaatacgtagcacaggctaagcaagttacctgttgaagaaattgcagcacggtgaaggcaggccatttgtgtcgtagtcttccgtttgaagacctggagatgtcattgtgagaataaaacataaatatggatgccttttaaattttacagtatgatttcaaataaatgttgatacttattataacttgtaaagttacgccccatggtgtccatcctgccagcagactgattcagaatgggaggcttttgcaaagaatggtgaaatacttcagatcagtgtggggaaggtagatgtcattcaagaaccaggtttgagtggccgcttctttgtcaccactctcccagcattttttcatgcaaaggatgggatattccgccgttatcgtggcccaggaatcttcgaagacctgcagaattatatcttagagaagaaatggcaatcagtcgagcctctgactggctggaaatccccggcttctctaacgatgtctggaatggctggtctttttagcatctctggcaagatatggcatcttcacaactatttcacagtgactcttggaattcctgcttggtgttcttatgtctttttcgtcatagccaccttggt

SEQ ID NO: 190930 - DNA, 787 bp, Homo sapiens
  Payload ID: 17717
  Gene Name: thioredoxin-related transmembrane protein 4
  ENST ID: ENST00000527925
  CDS Start-End: 193-787
gacgggcaagcggcgataagaggtggcgtcctccgcggcattgcgagcaccgccagtctgcgccgctaggcgtaggcggggtggcccttgcgtctcccgcttccttgaaaaacccggcgggcgagcgaggctgcgggccggccgctgcccttccccacactccccgccgagaagcctcgctcggcgcccaacatggcgggtgggcgctgcggcccgcagctaacggcgctcctggccgcctggatcgcggctgtggcggcgacggcaggccccgaggaggccgcgctgccgccggagcagagccgggtccagcccatgaccgcctccaactggacgctggtgatggagggcgagtggatgctgaaattttacgccccatggtgtccatcctgccagcagactgattcagaatgggaggcttttgcaaagaatggtgaaatacttcagatcagtgtggggaaggtagatgtcattcaagaaccaggaatcttcgaagacctgcagaattatatcttagagaagaaatggcaatcagtcgagcctctgactggctggaaatccccggcttctctaacgatgtctggaatggctggtctttttagcatctctggcaagatatggcatcttcacaactatttcacagtgactcttggaattcctgcttggtgttcttatgtctttttcgtcatagccaccttggtttttggcctttttatgggtctggtcttggtggtaatatcagaatgtttctatgtgccacttccaaggcatttatctgagcgttctg

SEQ ID NO: 190931 - DNA, 1211 bp, Homo sapiens
  Payload ID: 17718
  Gene Name: thiosulfate sulfurtransferase (rhodanese)
  Uniprot ID: Q16762
  ENST ID: ENST00000249042
  CDS Start-End: 150-1043
ggcggcgcagggtccccctctggcggtggcgcgatggtgcgcgccgcctggggagctgcggccgggggtttgaaccggccaacttctccagccggccggggcgagcgccagcgcggcgtccggggcgagtgacacgcagagctgaagccatggttcatcaggtgctctaccgggcgctggtctccaccaagtggctggcggagtccatcaggactggcaagctggggcccggcctgcgggtgctggacgcgtcctggtactcaccaggcacccgagaggcccgcaaggagtacctcgagcgccacgtacccggcgcctctttctttgacatagaagagtgccgggacacggcgtcgccctacgagatgatgctgcccagcgaggctggcttcgccgagtatgtgggccgcctgggcatcagcaaccacacgcacgtggtggtgtatgatggtgaacacctgggcagcttctatgctccccgggtctggtggatgttccgtgtgtttggccaccgcaccgtatcagtgctcaatggtggcttccggaactggctgaaggagggccacccggtgacatccgagccctcacgcccagaaccggccgtcttcaaagccacactggaccgctccctgctcaagacctacgagcaggtgctggagaaccttgaatctaagaggttccagctggtggattcaaggtctcaagggcggttcctgggcaccgagccggagccggatgcagtaggactggactcgggccatatccgtggtgccgtcaacatgcctttcatggacttcctgactgaggatggcttcgagaagggcccagaagagctccgtgctctgttccagaccaagaaggtggatctctcgcagcctctcattgccacgtgccgcaagggagtcaccgcctgccacgtggccttggctgcctacctctgcggcaagcctgatgtggccgtgtacgatggctcctggtccgagtggtttcgccgggcccccccagagagccgtgtgtcccagggaaagtctgagaaggcctgagccgtgacctcttctgcttactgtaactgcggccggtttagtgaccccatgacttacagccggttcttacctcttaggtgaaggagatgacatgtttttagaattgctgtgcaaggctcaccctctctctgtcaacactggaataaactttgccttttctgagtagtg

SEQ ID NO: 190932 - DNA, 1797 bp, Homo sapiens
  Payload ID: 17718
  Gene Name: thiosulfate sulfurtransferase (rhodanese)
  Uniprot ID: Q16762
  ENST ID: ENST00000403892
  CDS Start-End: 736-1629
gccgggggtttgaaccggccaacttctccagccggccggggcgagcgccagcgcggcgtccggggcgagtgagtgcggggcgggggcagcggccgggcgcctgggccgccggtcgggccacctgctgcccggggaaggatagcgttgcgagagtgggacggggtgccccgggaacccctgatccacctagggcagagggcagcgagctacgggccggactcgggcactctggaggcgggcgagctcgggctgcctggggaggccgcaggcgatggcgtgtgcgcggctcgcggagcttcctagccgtgcgcccaccccctctgccttggaaggaaaggggattctaagcccaagatgccatcgccccccatcccgggcatgctttcattgctctttcctggcgggatcgagtactgtaacttctaggagccagatccccgccccaggaagcgcccctacttggagtcctcggaaactcttgccccacccgcttctgcgctgggcccccgggccggctgggaggggcggggccggctttccagagggaatctgcaaacttatcccgctgcacgccccagcctcgctggcttgctgtaaacaaggaacccgggggagtgcggagggagaaagagcttctcccaggcctcaccctactgcacacaccgacttccttcctcacgcctgtctctctttcctggttcccacccgtgccaggtgacacgcagagctgaagccatggttcatcaggtgctctaccgggcgctggtctccaccaagtggctggcggagtccatcaggactggcaagctggggcccggcctgcgggtgctggacgcgtcctggtactcaccaggcacccgagaggcccgcaaggagtacctcgagcgccacgtacccggcgcctctttctttgacatagaagagtgccgggacacggcgtcgccctacgagatgatgctgcccagcgaggctggcttcgccgagtatgtgggccgcctgggcatcagcaaccacacgcacgtggtggtgtatgatggtgaacacctgggcagcttctatgctccccgggtctggtggatgttccgtgtgtttggccaccgcaccgtatcagtgctcaatggtggcttccggaactggctgaaggagggccacccggtgacatccgagccctcacgcccagaaccggccgtcttcaaagccacactggaccgctccctgctcaagacctacgagcaggtgctggagaaccttgaatctaagaggttccagctggtggattcaaggtctcaagggcggttcctgggcaccgagccggagccggatgcagtaggactggactcgggccatatccgtggtgccgtcaacatgcctttcatggacttcctgactgaggatggcttcgagaagggcccagaagagctccgtgctctgttccagaccaagaaggtggatctctcgcagcctctcattgccacgtgccgcaagggagtcaccgcctgccacgtggccttggctgcctacctctgcggcaagcctgatgtggccgtgtacgatggctcctggtccgagtggtttcgccgggcccccccagagagccgtgtgtcccagggaaagtctgagaaggcctgagccgtgacctcttctgcttactgtaactgcggccggtttagtgaccccatgacttacagccggttcttacctcttaggtgaaggagatgacatgtttttagaattgctgtgcaaggctcaccctctctctgtcaacactggaataaactttgccttttctgagtagtg

SEQ ID NO: 190933 - DNA, 451 bp, Homo sapiens
  Payload ID: 17718
  Gene Name: thiosulfate sulfurtransferase (rhodanese)
  ENST ID: ENST00000438203
  CDS Start-End: 80-451
ccgcgccacccggcgtccccctcagacccccgcgggtcccggaggccccgcgcgcgaggtgacacgcagagctgaagccatggttcatcaggtgctctaccgggcgctggtctccaccaagtggctggcggagtccatcaggactggcaagctggggcccggcctgcgggtgctggacgcgtcctggtactcaccaggcacccgagaggcccgcaaggagtacctcgagcgccacgtacccggcgcctctttctttgacatagaagagtgccgggacacggcgtcgccctacgagatgatgctgcccagcgaggctggcttcgccgagtatgtgggccgcctgggcatcagcaaccacacgcacgtggtggtgtatgatggtgaacacctgggcagcttctatgctccccgggtctggtggatgttccgtgtgtttggccaccgcaccgta

SEQ ID NO: 190934 - DNA, 1105 bp, Homo sapiens
  Payload ID: 17718
  Gene Name: thiosulfate sulfurtransferase (rhodanese)
  Uniprot ID: Q16762
  ENST ID: ENST00000622841
  CDS Start-End: 44-937
tgtctcttcctggggcctctgggtgacacgcagagctgaagccatggttcatcaggtgctctaccgggcgctggtctccaccaagtggctggcggagtccatcaggactggcaagctggggcccggcctgcgggtgctggacgcgtcctggtactcaccaggcacccgagaggcccgcaaggagtacctcgagcgccacgtacccggcgcctctttctttgacatagaagagtgccgggacacggcgtcgccctacgagatgatgctgcccagcgaggctggcttcgccgagtatgtgggccgcctgggcatcagcaaccacacgcacgtggtggtgtatgatggtgaacacctgggcagcttctatgctccccgggtctggtggatgttccgtgtgtttggccaccgcaccgtatcagtgctcaatggtggcttccggaactggctgaaggagggccacccggtgacatccgagccctcacgcccagaaccggccgtcttcaaagccacactggaccgctccctgctcaagacctacgagcaggtgctggagaaccttgaatctaagaggttccagctggtggattcaaggtctcaagggcggttcctgggcaccgagccggagccggatgcagtaggactggactcgggccatatccgtggtgccgtcaacatgcctttcatggacttcctgactgaggatggcttcgagaagggcccagaagagctccgtgctctgttccagaccaagaaggtggatctctcgcagcctctcattgccacgtgccgcaagggagtcaccgcctgccacgtggccttggctgcctacctctgcggcaagcctgatgtggccgtgtacgatggctcctggtccgagtggtttcgccgggcccccccagagagccgtgtgtcccagggaaagtctgagaaggcctgagccgtgacctcttctgcttactgtaactgcggccggtttagtgaccccatgacttacagccggttcttacctcttaggtgaaggagatgacatgtttttagaattgctgtgcaaggctcaccctctctctgtcaacactggaataaactttgccttttctgagtagtg

SEQ ID NO: 190935 - DNA, 626 bp, Homo sapiens
  Payload ID: 17719
  Gene Name: thiosulfate sulfurtransferase (rhodanese)-like domain containing 1
  Uniprot ID: Q8NFU3
  ENST ID: ENST00000318289
  CDS Start-End: 49-378
gggcgggccagggccgcactccggagactcgcggttgctacgcgcaccatggctggagcgcccacggtctcgcttcctgaactccgttcactcctagcctccggacgggcccggctcttcgacgtgcgctctcgcgaggaggcggcagctgggaccatcccaggggcgctcaacatcccggtgtccgagttggagagtgctctgcagatggagccagctgccttccaggctttatattctgctgagaagccaaagctggaagatgagcatctcgttttcttctgtcagatgggcaagcggggcctccaggccacgcagctggcccggagtcttggatacactgggtacggggaggtgtggctgctagctgggaggtgatggggactgcctgtcattcctgtcagtctctcacgcttctttgtctccacagggctcgcaactacgctggagcctatagagaatggttggagaaagagagttaggcaggaggcagcttactgattgccaccccctggccccttaatggccaccttaactaagggtgtgaacgggctgacttggtgaattgggcaactccttatagtgttgtgcacacaaaagcatcaaataaagaacatttaatcaaa

SEQ ID NO: 190936 - DNA, 574 bp, Homo sapiens
  Payload ID: 17719
  Gene Name: thiosulfate sulfurtransferase (rhodanese)-like domain containing 1
  Uniprot ID: Q8NFU3
  ENST ID: ENST00000368023
  CDS Start-End: 62-430
gcaggcgccgagagggcgggccagggccgcactccggagactcgcggttgctacgcgcaccatggctggaggctgtcgcgccccttcctcagcgcccacggtctcgcttcctgaactccgttcactcctagcctccggacgggcccggctcttcgacgtgcgctctcgcgaggaggcggcagctgggaccatcccaggggcgctcaacatcccggtgtccgagttggagagtgctctgcagatggagccagctgccttccaggctttatattctgctgagaagccaaagctggaagatgagcatctcgttttcttctgtcagatgggcaagcggggcctccaggccacgcagctggcccggagtcttggatacactggggctcgcaactacgctggagcctatagagaatggttggagaaagagagttaggcaggaggcagcttactgattgccaccccctggccccttaatggccaccttaactaagggtgtgaacgggctgacttggtgaattgggcaactccttatagtgttgtgcacacaaaagcatcaaataaagaacatttaatcaaa

SEQ ID NO: 190937 - DNA, 457 bp, Homo sapiens
  Payload ID: 17719
  Gene Name: thiosulfate sulfurtransferase (rhodanese)-like domain containing 1
  Uniprot ID: Q8NFU3
  ENST ID: ENST00000368024
  CDS Start-End: 89-313
cagctctgggagggaacgggagatgttgcaggcgccgagagggcgggccagggccgcactccggagactcgcggttgctacgcgcaccatggctggagtgtccgagttggagagtgctctgcagatggagccagctgccttccaggctttatattctgctgagaagccaaagctggaagatgagcatctcgttttcttctgtcagatgggcaagcggggcctccaggccacgcagctggcccggagtcttggatacactggggctcgcaactacgctggagcctatagagaatggttggagaaagagagttaggcaggaggcagcttactgattgccaccccctggccccttaatggccaccttaactaagggtgtgaacgggctgacttggtgaattgggcaactccttatagtgttgtgcacacaaaagcatcaaataaagaacatttaatcaaa

SEQ ID NO: 190938 - DNA, 593 bp, Homo sapiens
  Payload ID: 17719
  Gene Name: thiosulfate sulfurtransferase (rhodanese)-like domain containing 1
  Uniprot ID: Q8NFU3
  ENST ID: ENST00000423014
  CDS Start-End: 102-449
ccggatccggtctcagctctgggagggaacgggagatgttgcaggcgccgagagggcgggccagggccgcactccggagactcgcggttgctacgcgcaccatggctggagcgcccacggtctcgcttcctgaactccgttcactcctagcctccggacgggcccggctcttcgacgtgcgctctcgcgaggaggcggcagctgggaccatcccaggggcgctcaacatcccggtgtccgagttggagagtgctctgcagatggagccagctgccttccaggctttatattctgctgagaagccaaagctggaagatgagcatctcgttttcttctgtcagatgggcaagcggggcctccaggccacgcagctggcccggagtcttggatacactggggctcgcaactacgctggagcctatagagaatggttggagaaagagagttaggcaggaggcagcttactgattgccaccccctggccccttaatggccaccttaactaagggtgtgaacgggctgacttggtgaattgggcaactccttatagtgttgtgcacacaaaagcatcaaataaagaacatttaatcaaa

SEQ ID NO: 190939 - DNA, 477 bp, Homo sapiens
  Payload ID: 17719
  Gene Name: thiosulfate sulfurtransferase (rhodanese)-like domain containing 1
  ENST ID: ENST00000466967
  CDS Start-End: 206-394
ggcggccgtgactcctaggccccctcttcctgaaggctgtcgcgccccttcctcagcgcccacggtctcgcttcctgaactccgttcactcctagcctccggacgggcccggctcttcgacgtgcgctctcgcgaggaggcggcagctgggaccatcccaggggcgctcaacatcccggtgtccgagttggagagtgctctgcagatggagccagctgccttccaggctttatattctgctgagaagccaaagctggaagatgagcatctcgttttcttctgtcagatgggcaagcggggcctccaggccacgcagctggcccggagtcttggatacactggggctcgcaactacgctggagcctatagagaatggttggagaaagagagttaggcaggaggcagcttactgattgccaccccctggccccttaatggccaccttaactaagggtgtgaacgggctgacttggtgaa

SEQ ID NO: 190940 - DNA, 4320 bp, Homo sapiens
  Payload ID: 17720
  Gene Name: thiosulfate sulfurtransferase (rhodanese)-like domain containing 2
  Uniprot ID: Q5T7W7
  ENST ID: ENST00000341170
  CDS Start-End: 384-1934
cgcagaaagtgccgccgctttggccactcagagcccccgggccgcggtcgtcgtacgcctgaaggcgggtcgtgccggcggccgctctagtctccgcctccgctcaggccggtcctccggggcttctcaatggtttcccggtggcctctcaatggttttcccggcggcccttgcgccgacgccaggagacttccggagcttggtgacgtcacgagcgagcttttctacccaaatacgcggcgggggaataggctcgagggcggtgagcagtgacaattgctaggcggagacagtgcagggaagagagaccttagaaaggatcaggactggcgggaggtatttaactgaaaggaatatctgcttcactgttgcaaccaaaccagatgccttcttccacttcaccagaccaaggagatgacctggagaactgcattttaagattttctgacctggatttaaaagatatgagtcttattaatcccagcagcagtcttaaagcagaattagatggcagtacaaaaaagaaatactcgtttgcaaagaaaaaggcctttgccctttttgtcaaaaccaaagaagttccaacaaaaaggagttttgaatgtaaagaaaaattgtggaaatgctgtcggcagctattcacagaccaaaccagcatccatagacatgtggcaacacaacatgctgatgaaatttatcaccagacagcttctattttaaagcaactggctgtgacattgagcacctcaaagagtctttcgtctgcagatgaaaagaaccctttaaaagagtgccttccacatagccatgacgtgtctgcttggctccctgatataagctgctttaaccctgatgagctgataagtggccagggcagtgaagaaggggaggtgctcctttattactgctaccatgacctggaggatccccaatggatctgtgcctggcagacagctctgtgtcagcacctgcacctcacaggcaagattcgaattgctgcagaaggaatcaatgggacagttggtggaagcaaattggctaccagactttatgtggaagtcatgctttccttcccattgtttaaggatgacctgtgtaaagatgattttaagaccagcaaaggaggagctcactgttttccagaattgcgtgttggtgtatttgaagaaatcgtgcccatggggatcagccccaaaaagatctcctacaagaagcctggaatccatttatccccaggtgaatttcataaagaagtagaaaagtttttatctcaggcaaatcaagaacaaagtgatactatccttcttgattgcagaaacttctatgaaagcaaaataggacgattccaaggctgcttagccccagacatcaggaaattcagttacttccctagctacgttgacaaaaatctagaacttttcagagagaagagagtgctgatgtactgtaccgggggcatccgctgtgagcggggttcagcctacctcaaagccaagggagtgtgcaaggaggtgttccagctcaagggtggcatccacaagtacctggaagagtttcctgatggcttttacaaagggaagttgtttgtttttgatgaacgctatgctctgtcctacaacagtgatgtggtgtcagagtgttcatactgtggagcccgctgggaccagtataaactctgctctactccccagtgccgccagctcgttttgacctgccctgcctgtcaaggacaaggattcacagcctgttgtgtcacatgtcaagacaaggggagcaggaaagtttcaggccctatgcaagacagctttaaagaggaatgcgagtgcacagcccgacggccacgcatacctagggaactcttgcagcatgtgcgacagcctgtgagcccagagccagggcctgatgctgatgaggatgggccagtgcttatgtgagcagcacctttggcattttcccaggccctcggtaaaagtaggtttggggtgactatacagagaaagcatggcaagactgcagaaacagagaaatcgggaacttcagttctggccgctgccaccgtggcagccgtctacacttcacagcgggaggggaggagtcacgttgtctaccacttacctgagacattctgatttggatgatgctagagcacagaaaataggtgagctgcatgggatcccaaagctgctgagggatagagcctgagcctggtggccacagcatatgccctttctgttccatgcagctggggctgttagtagtcattgcccttgtcagcagaccttctaccctggtggcaaacacatgaaagctgtggccctgggagtggcctcctaaaacaagccacttaggtcatctgccatctacccttaacctctgtctctcgcctgaggggaatctgcaagctgtgcattgggcttacctcctgcttttgtagaaataaccatcctttggtatacatggaggatagttccagaacgcctgagtatacaaaaacccaatgcatactcaagtcccacagtgggccctacagaacccacgtatgtgataaatcagccctccatgtacgcaggtttcgccccctgccaatactgtattttcaacctgtatggttgaaaaaaatccatatataagtgcagccatgcagttcaaacccatattgttcaagggtcaactgtatagtttattgaacagccacacccattcctttacacatgatctatggcagagttgaatagttgcaacagacactatgtggcctgcaaaatcggaaatttttactgtctggccttttacagaaaagtttgccagcccctgatctagaccagcagctcatctgatagaggcagaggtggccttaaagatgtggccttcttcattttctgttggtttggtttcgtttctatgagagatttcctctgatagctctgctttccccagcacttactctctgagcttttaaatgttctctctgggagcttcatataagctcggtgacatttgagccacagtttttagatcagcacctggaatacatgacacattcttactgaggtcatccagcactgccatggtggctgcccagtcttctggccagtgtgccaggcacatgtccctgtcacacaggttccaagaaacacatacgcagccatgcatagaccaacagatttaatattatattgcagttttcagcgatgcagaatgcagctgcaattgtgttttaaggagaagccaaatggggatggttgtccctgcaacatggtgccactcctgggccatgtgcagcctcagtggacactcttccatagcgctgaggccctggccccgcctccagttaccctgtactgcccactgccttacagttcagtgcgcaggccttcaccttttcatcaccagcctctctgctcagtgctctggagttcttgaccttgtcctttatcatgagatttgctgaaatcactaatgaaaataactcccaaaagcaacaaacaaaaatattagtttaactggcactgtggtatattaaaaggcacaagggcattgtggcttaacacttttgctggatcccaagagacgcacatgatgttaaaaagagatctggcagcagtactaatactacatttcagtgtaatcatcttggggtggtttggccaggatttcccaattccttgatatctggagtttcttcaccattgtccggcatcctgcggaggcttaatatacaggcgtaaggtcagcagcaatttgtctaataagtgatgagatcagtagctgaagtctctaagctgggccattactaaataccatagccatgttgatctggaaatttatccctctagtgtcttacctcacataagccatttgcccactgtgcaatatagaaaggtgttttcaaaagtatttggccgtagattttcacatccatcataaggttggcattcaataaggaaaaagttctaactccagtattaaattgtacataaatcccaaatgttcttaaagaacactcagggacatgtttgttgcctgggattggtaatgaaaggttggtttttgaaacttgaaatttcaccattggtttttttcctatcatttctgcatatccagcaaaaggaatctcatgttgactcctggcagagttcagtggcttcagtctgtctatctgttctgaggggaaaattgtgttctggatccagtaatcaatttggcaactttaatcgaggttttcaaaattccaaggagggttaataaagaatgataatcagttttatttgctaatagctaagacaaatttgtaataaagtgttttataatacttcaaaa

SEQ ID NO: 190941 - DNA, 1612 bp, Homo sapiens
  Payload ID: 17720
  Gene Name: thiosulfate sulfurtransferase (rhodanese)-like domain containing 2
  ENST ID: ENST00000375165
  CDS Start-End: 1-22
gaaaaaggtagaattcttatgaatgtttcatgatcatgtatgtgtggttaacgcagatacatttggaagtcggttatcaaggttgctctccagctcaaggcctttgccctttttgtcaaaaccaaagaagttccaacaaaaaggagttttgaatgtaaagaaaaattgtggaaatgctgtcggcagctattcacagaccaaaccagcatccatagacatgtggcaacacaacatgctgatgaaatttatcaccagacagcttctattttaaagcaactggctgtgacattgagcacctcaaagagtctttcgtctgcagatgaaaagaaccctttaaaagagtgccttccacatagccatgacgtgtctgcttggctccctgatataagctgctttaaccctgatgagctgataagtggccagggcagtgaagaaggggaggtgctcctttattactgctaccatgacctggaggatccccaatggatctgtgcctggcagacagctctgtgtcagcacctgcacctcacaggcaaggaatccatttatccccaggtgaatttcataaagaagtagaaaagtttttatctcaggcaaatcaagaacaaagtgatactatccttcttgattgcagaaacttctatgaaagcaaaataggacgattccaaggctgcttagccccagacatcaggaaattcagttacttccctagctacgttgacaaaaatctagaacttttcagagagaagagagtgctgatgtactgtaccgggggcatccgctgtgagcggggttcagcctacctcaaagccaagggagtgtgcaaggaggtgttccagctcaagggtggcatccacaagtacctggaagagtttcctgatggcttttacaaagggaagttgtttgtttttgatgaacgctatgctctgtcctacaacagtgatgtggtgtcaggtaggtcagcacaggctcagagcccaaactgaaatgaagcacattgtcagttcactattctagaaaaatgacacagggaagacaggccagtgctcattactgagcactgaataagcagggaaaataagtacattgtgccaccattttcccagctgtggagctgagagaaccctagcccaggagtcaggaggcctgggttgggatcctggcttcaccattgctagctggacaagcccattaacatggggatcatctcacctgccctgcctgcctgtctacctgccaagagctgtactactgggctaattcagggctcttaacctggaattggtacatagatttcagggattctgtgaatttggatggaaaaataattgtatctttgttttcaataacacctcactaaaatgaagcatttcctttagttatgaatgtaggcaacaaagtaccagttgtattaatgtacctgtgactttgtcttcagtaggattcacaatactttcatatcatgttctagttgcctcagatatctcaaaatagtatttatactcatcactgcttcaaaatgaaaatagttattaggcccaccactaagagttgatatataatgtgttaataaatggcacgtcttattatatattacagattttgaaaaaga

SEQ ID NO: 190942 - DNA, 1503 bp, Homo sapiens
  Payload ID: 17720
  Gene Name: thiosulfate sulfurtransferase (rhodanese)-like domain containing 2
  ENST ID: ENST00000375172
  CDS Start-End: 110-289
aattgctaggcggagacagtgcagggaagagagaccttagaaaggatcaggactggcgggaggtatttaactgaaaggaatatctgcttcactgttgcaaccaaaccagatgccttcttccacttcaccagaccaaggagatgacctggagaactgcattttaagattttctgacctggatttaaaagatatgagtcttattaatcccagcagcagtcttaaagcagaattagatggcagtacaaaaaagaaatactcgtttgcaaagaaaaaggtagaattcttatgaatgtttcatgatcatgtatgtgtggttaacgcagatacatttggaagtcggttatcaaggttgctctccagctcaaggcctttgccctttttgtcaaaaccaaagaagttccaacaaaaaggagttttgaatgtaaagaaaaattgtggaaatgctgtcggcagctattcacagaccaaaccagcatccatagacatgtggcaacacaacatgctgatgaaatttatcaccagacagcttctattttaaagcaactggctgtgacattgagcacctcaaagagtctttcgtctgcagatgaaaagaaccctttaaaagagtgccttccacatagccatgacgtgtctgcttggctccctgatataagctgctttaaccctgatgagctgataagtggccagggcagtgaagaaggggaggtgctcctttattactgctaccatgacctggaggatccccaatggatctgtgcctggcagacagctctgtgtcagcacctgcacctcacaggcaagattcgaattgctgcagaaggaatcaatgggacagttggtggaagcaaattggctaccagactttatgtggaagtcatgctttccttcccattgtttaaggatgacctgtgtaaagatgattttaagaccagcaaaggaggagctcactgttttccagaattgcgtgttggtgtatttgaagaaatcgtgcccatggggatcagccccaaaaagatctcctacaagaagcctggaatccatttatccccaggtgaatttcataaagaagtagaaaagtttttatctcaggcaaatcaagaacaaagtgatactatccttcttgattgcagaaacttctatgaaagcaaaataggacgattccaaggctgcttagccccagacatcaggaaattcagttacttccctagctacgttgacaaaaatctagaacttttcagagagaagagagtgctgatgtactgtaccgggggcatccgctgtgagcggggttcagcctacctcaaagccaagggagtgtgcaaggaggtgttccagctcaagggtggcatccacaagtacctggaagagtttcctgatggcttttacaaagggaagttgtttgtttttgatgaacgctatgctctgtcctacaacagtgatgtggtgtcagagtgttcatactgtggagcccgctgggaccagtataaactctgctctact

SEQ ID NO: 190943 - DNA, 2087 bp, Homo sapiens
  Payload ID: 17721
  Gene Name: THO complex 1
  Uniprot ID: Q96FV9
  ENST ID: ENST00000261600
  CDS Start-End: 9-1982
ccgagaagatgtctccgacgccgccgctcttcagtttgcccgaagcgcggacgcggtttacgaagtctaccagagaggccttgaacaacaaaaacatcaagccattgttaagtaccttcagccaggtacctggcagtgaaaatgaaaaaaaatgtacccttgaccaagctttcagaggtattctagaagaagaaattataaatcattcatcatgtgaaaacgttttagctattatttctcttgctattgggggagtaactgaaggtatttgtaccgcatctacaccttttgtattgttgggagatgttttggattgtcttcctttggatcagtgtgacacaatattcacttttgtggaaaaaaatgttgctacttggaaatcaaatacattctattctgctgggaaaaattacttactacgtatgtgcaatgatctcctaagaagattgtctaaatcccagaatacagtcttctgtggacggattcagctctttttggccaggcttttccctctgtctgagaaatcaggtcttaacttgcagagtcagtttaatctggaaaatgtcactgttttcaatacaaatgagcaggaaagcaccctgggtcagaagcacactgaagatagagaagaaggaatggatgtagaagaaggcgaaatgggagacgaggaagctccaacaacgtgctctattccaattgattacaacctgtatcgaaaattctggtcacttcaggattacttcaggaaccctgtgcaatgctatgagaagatttcatggaaaacttttctcaagtattctgaagaagttttagctgtttttaagagttataaattagatgatactcaggcctcaagaaaaaagatggaagaattgaaaacaggaggagaacatgtatattttgcaaaatttttaacaagtgaaaagctgatggatttacaactgagtgacagtaactttcgtcgacacatcctgttgcagtatctcattttattccaatatctcaaggggcaggtcaaattcaaaagttcaaactatgttttaactgatgagcaatcactttggattgaagatactacaaaatcagtttatcaactactatctgaaaacccccccgatggagaaagattttcaaagatggtagagcatatattaaacactgaagaaaactggaactcgtggaaaaatgaaggttgcccaagttttgtgaaagaaagaacatcagataccaaacctacgagaataattcggaagagaacagcacccgaggacttcctagggaaaggacccaccaaaaaaattctgatgggaaatgaggagttaacaaggctttggaatctttgccctgataatatggaagcctgtaaatcagagacaagggaacacatgcccactttggaggaattctttgaagaagccattgaacaggcagaccctgaaaatatggtggaaaatgaatataaggctgtgaacaattcaaattatggttggagagccctgagactattagcacggagaagccctcacttcttccagccaaccaaccagcagtttaaaagtttaccagaatatcttgaaaatatggtaataaagctagccaaggaattaccgcctccttctgaagaaataaaaacaggtgaggatgaagatgaggaagataatgatgctctactgaaggaaaatgaaagtcctgatgttcggcgagacaaacctgtaacaggagaacaaatagaggtatttgccaacaagctgggtgaacaatggaagattctggctccctacttggaaatgaaagactcagaaattaggcagattgagtgtgacagtgaagacatgaagatgagagctaagcagctcctggttgcctggcaagatcaagagggagttcatgcaacacctgagaatctgattaatgcactgaataagtctggattaagtgaccttgcagaaagtctaactaatgacaatgagacaaatagttagcttcttttttttttctttttattaaaactgtgatagattttgttaccaagcagcatttgataagaggtccactggttttggtaaacaataaacatttttataaca

SEQ ID NO: 190944 - DNA, 588 bp, Homo sapiens
  Payload ID: 17721
  Gene Name: THO complex 1
  ENST ID: ENST00000581116
  CDS Start-End: 27-287
agtggcgggcacgcgcagccgagaagatgtctccgacgccgccgctcttcagtttgcccgaagcgcggacgcggtttacgaagtctaccagagaggccttgaacaacaaaaacatcaagccattgttaagtaccttcagccaggtacctggcagtgaaaatgaaaaaaaatgtacccttgaccaagctttcagaggtattctagaagaagaaattataaatcattcatcatgtgaaaacgttttagctattatttctcttgctattgggggagtaactgaagcttagtggtgaagaaaacagactgtggagccagactgcctgggtatttgtaccgcatctacaccttttgtattgttgggagatgttttggattgtcttcctttggatcagtgtgacacaatattcacttttgtggaaaaaaatgttgctacttggaaatcaaatacattctattctgctgggaaaaattacttactacgtatgtgcaatgatctcctaagaagattgtctaaatcccagaatacagtcttctgtggacggattcagctctttttggccaggcttttccctctgtctgagaaatcag

SEQ ID NO: 190945 - DNA, 2033 bp, Homo sapiens
  Payload ID: 17721
  Gene Name: THO complex 1
  ENST ID: ENST00000580038
  CDS Start-End: 4-759
aagatgtctccgacgccgccgctcttcagtttgcccgaagcgcggacgcggtttacgaagtctaccagagaggccttgaacaacaaaaacatcaagccattgttaagtaccttcagccaggtacctggcagtgaaaatgaaaaaaaatgtacccttgaccaagctttcagaggtattctagaagaagaaattataaatcattcatcatgtgaaaacgttttagctattatttctcttgctattgggggagtaactgaaggtatttgtaccgcatctacaccttttgtattgttgggagatgttttggattgtcttcctttggatcagtgtgacacaatattcacttttgtggaaaaaaatgttgctacttggaaatcaaatacattctattctgctgggaaaaattacttactacgtatgtgcaatgatctcctaagaagattgtctaaatcccagaatacagtcttctgtggacggattcagctctttttggccaggcttttccctctgtctgagaaatcaggtcttaacttgcagagtcagtttaatctggaaaatgtcactgttttcaatacaaatgagcaggaaagcaccctgggtcagaagcacactgaagatagagaagaaggaatggatgtagaagaaggcgaaatgggagacgaggaagctccaacaacgtggattacttcaggaaccctgtgcaatgctatgagaagatttcatggaaaacttttctcaagtattctgaagaagttttagctgtttttaagagttataaattagatgatactcaggcctcaagaaaaaagatggaagaattgaaaacaggaggagaacatgtatattttgcaaaatttttaacaagtgaaaagctgatggatttacaactgagtgacagtaactttcgtcgacacatcctgttgcagtatctcattttattccaatatctcaaggggcaggtcaaattcaaaagttcaaactatgttttaactgatgagcaatcactttggattgaagatactacaaaatcagtttatcaactactatctgaaaacccccccgatggagaaagattttcaaagatggtagagcatatattaaacactgaagaaaactggaactcgtggaaaaatgaaggttgcccaagttttgtgaaagaaagaacatcagataccaaacctacgagaataattcggaagagaacagcacccgaggacttcctagggaaaggacccaccaaaaaaattctgatgggaaatgaggagttaacaaggctttggaatctttgccctgataatatggaagcctgtaaatcagagacaagggaacacatgcccactttggaggaattctttgaagaagccattgaacaggcagaccctgaaaatatggtggaaaatgaatataaggctgtgaacaattcaaattatggttggagagccctgagactattagcacggagaagccctcacttcttccagccaaccaaccagcagtttaaaagtttaccagaatatcttgaaaatatggtaataaagctagccaaggaattaccgcctccttctgaagaaataaaaacaggtgaggatgaagatgaggaagataatgatgctctactgaaggaaaatgaaagtcctgatgttcggcgagacaaacctgtaacaggagaacaaatagaggtatttgccaacaagctgggtgaacaatggaagattctggctccctacttggaaatgaaagactcagaaattaggcagattgagtgtgacagtgaagacatgaagatgagagctaagcagctcctggttgcctggcaagatcaagagggagttcatgcaacacctgagaatctgattaatgcactgaataagtctggattaagtgaccttgcagaaagtctaactaatgacaatgagacaaatagttagcttcttttttttttctttttattaaaactgtgatagattttgttaccaagcagcatttgataagaggtccactggttttggtaaacaataaacatttttataaca

SEQ ID NO: 190946 - DNA, 559 bp, Homo sapiens
  Payload ID: 17721
  Gene Name: THO complex 1
  ENST ID: ENST00000581269
  CDS Start-End: 32-397
agcgcagtggcgggcacgcgcagccgagaagatgtctccgacgccgccgctcttcagtttgcccgaagcgcggacgcggtttacgaagtctaccagagaggccttgaacaacaaaaacatcaagccattgttaagtaccttcagccaggtacctggcagtgaaaatgaaaaaaaatgtacccttgaccaagctttcagaggtattctagaagaagaaattgtatttgtaccgcatctacaccttttgtattgttgggagatgttttggattgtcttcctttggatcagtgtgacacaatattcacttttgtggaaaaaaatgttgctacttggaaatcaaatacattctattctgctgggaaaaattacttactacgtatgtgcaatgatctcctaagaagattgtctaaatcccagaatacagtcttctgtggacggattcagctctttttggccaggcttttccctctgtctgagaaatcaggtcttaacttgcagagtcagtttaatctggaaaatgtcactgttttcaatacaaatgagcaggaaagcaccctgg

SEQ ID NO: 190947 - DNA, 815 bp, Homo sapiens
  Payload ID: 17721
  Gene Name: THO complex 1
  ENST ID: ENST00000579891
  CDS Start-End: 1-815
tttttaagagttataaattagatgatactcaggcctcaagaaaaaagatggaagaattgaaaacaggaggagaacatgtatattttgcaaaatttttaacaagtgaaaagctgatggatttacaactgagtgacagtaactttcgtcgacacatcctgttgcagtatctcattttattccaatatctcaaggggcaggtcaaattcaaaagttcaaactatgttttaactgatgagcaatcactttggattgaagatactacaaaatcagtttatcaactactatctgaaaacccccccgatggagaaagattttcaaagatggtagagcatatattaaacactgaagaaaactggaactcgtggaaaaatgaaggttgcccaagttttgtgaaagaaagtgtatgttttgttcacgacagaacatcagataccaaacctacgagaataattcggaagagaacagcacccgaggacttcctagggaaaggacccaccaaaaaaattctgatgggaaatgaggagttaacaaggctttggaatctttgccctgataatatggaagcctgtaaatcagagacaagggaacacatgcccactttggaggaattctttgaagaagccattgaacaggcagaccctgaaaatatggtggaaaatgaatataaggctgtgaacaattcaaattatggttggagagccctgagactattagcacggagaagccctcacttcttccagccaaccaaccagcagtttaaaagtttaccagaatatcttgaaaatatggtaataaagctagccaaggaattaccg

SEQ ID NO: 190948 - DNA, 536 bp, Homo sapiens
  Payload ID: 17721
  Gene Name: THO complex 1
  ENST ID: ENST00000584642
  CDS Start-End: 1-286
agaaggcgaaatgggagacgaggaagctccaacaacgtgctctattccaattgattacaacctgtatcgaaaattctggtcacttcaggattacttcaggaaccctgtgcaatgctatgagaagatttcatggaaaacttttctcaagtattctgaagaagttttagctgtttttaagagttataaattagatgatactcaggcctcaagaaaaaagatggaagaattgaaaacaggaggagaacatgtatattttgcaaaatttttaacaagtgaaaaggtataagtttttctttttcattaagcataataagaaatggtcttgttttatttccgtttagctgacagcctttctaagttaaactgaatagaaatgtttcttattttactttgggttaaagctgattgattaatgttagtttgaaagtcccatttcttcctttcagaagtaggactaatttggtttcaaaggtgaaagtagttctacattaagtctgttttgtaaactaattttggaataaatgcagtttaattac

SEQ ID NO: 190949 - DNA, 2078 bp, Homo sapiens
  Payload ID: 17721
  Gene Name: THO complex 1
  ENST ID: ENST00000616322
  CDS Start-End: 1-1974
atgtctccgacgccgccgctcttcagtttgcccgaagcgcggacgcggtttacgaagtctaccagagaggccttgaacaacaaaaacatcaagccattgttaagtaccttcagccaggtacctggcagtgaaaatgaaaaaaaatgtacccttgaccaagctttcagaggtattctagaagaagaaattataaatcattcatcatgtgaaaacgttttagctattatttctcttgctattgggggagtaactgaaggtatttgtaccgcatctacaccttttgtattgttgggagatgttttggattgtcttcctttggatcagtgtgacacaatattcacttttgtggaaaaaaatgttgctacttggaaatcaaatacattctattctgctgggaaaaattacttactacgtatgtgcaatgatctcctaagaagattgtctaaatcccagaatacagtcttctgtggacggattcagctctttttggccaggcttttccctctgtctgagaaatcaggtcttaacttgcagagtcagtttaatctggaaaatgtcactgttttcaatacaaatgagcaggaaagcaccctgggtcagaagcacactgaagatagagaagaaggaatggatgtagaagaaggcgaaatgggagacgaggaagctccaacaacgtgctctattccaattgattacaacctgtatcgaaaattctggtcacttcaggattacttcaggaaccctgtgcaatgctatgagaagatttcatggaaaacttttctcaagtattctgaagaagttttagctgtttttaagagttataaattagatgatactcaggcctcaagaaaaaagatggaagaattgaaaacaggaggagaacatgtatattttgcaaaatttttaacaagtgaaaagctgatggatttacaactgagtgacagtaactttcgtcgacacatcctgttgcagtatctcattttattccaatatctcaaggggcaggtcaaattcaaaagttcaaactatgttttaactgatgagcaatcactttggattgaagatactacaaaatcagtttatcaactactatctgaaaacccccccgatggagaaagattttcaaagatggtagagcatatattaaacactgaagaaaactggaactcgtggaaaaatgaaggttgcccaagttttgtgaaagacagaacatcagataccaaacctacgagaataattcggaagagaacagcacccgaggacttcctagggaaaggacccaccaaaaaaattctgatgggaaatgaggagttaacaaggctttggaatctttgccctgataatatggaagcctgtaaatcagagacaagggaacacatgcccactttggaggaattctttgaagaagccattgaacaggcagaccctgaaaatatggtggaaaatgaatataaggctgtgaacaattcaaattatggttggagagccctgagactattagcacggagaagccctcacttcttccagccaaccaaccagcagtttaaaagtttaccagaatatcttgaaaatatggtaataaagctagccaaggaattaccgcctccttctgaagaaataaaaacaggtgaggatgaagatgaggaagataatgatgctctactgaaggaaaatgaaagtcctgatgttcggcgagacaaacctgtaacaggagaacaaatagaggtatttgccaacaagctgggtgaacaatggaagattctggctccctacttggaaatgaaagactcagaaattaggcagattgagtgtgacagtgaagacatgaagatgagagctaagcagctcctggttgcctggcaagatcaagagggagttcatgcaacacctgagaatctgattaatgcactgaataagtctggattaagtgaccttgcagaaagtctaactaatgacaatgagacaaatagttagcttcttttttttttctttttattaaaactgtgatagattttgttaccaagcagcatttgataagaggtccactggttttggtaaacaataaacatttttataac

SEQ ID NO: 190950 - DNA, 1083 bp, Homo sapiens
  Payload ID: 17721
  Gene Name: THO complex 1
  ENST ID: ENST00000621904
  CDS Start-End: 1-1083
tttaagtctaccagagaggccttgaacaacaaaaacatcaagccattgttaagtaccttcagccaggtacctggcagtgaaaatgaaaaaaaatgtacccttgaccaagctttcagaggtattctagaagaagaaattataaatcattcatcatgtgaaaacgttttagctattatttctcttgctattgggggagtaactgaaggtatttgtaccgcatctacaccttttgtattgttgggagatgttttggattgtcttcctttggatcagtgtgacacaatattcacttttgtggaaaaaaatgttgctacttggaaatcaaatacattctattctgctgggaaaaattacttactacgtatgtgcaatgatctcctaagaagattgtctaaatcccagaatacagtcttctgtggacggattcagctctttttggccaggcttttccctctgtctgagaaatcaggtcttaacttgcagagtcagtttaatctggaaaatgtcactgttttcaatacaaatgagcaggaaagcaccctgggtcagaagcacactgaagatagagaagaaggaatggatgtagaagaaggcgaaatgggagacgaggaagctccaacaacgtgctctattccaattgattacaacctgtatcgaaaattctggtcacttcaggattacttcaggaaccctgtgcaatgctatgagaagatttcatggaaaacttttctcaagtattctgaagaagttttagctgtttttaagagttataaattagatgatactcaggcctcaagaaaaaagatggaagaattgaaaacaggaggagaacatgtatattttgcaaaatttttaacaagtgaaaagctgatggatttacaactgagtgacagtaactttcgtcgacacatcctgttgcagtatctcattttattccaatatctcaaggggcaggtcaaattcaaaagttcaaactatgttttaactgatgagcaatcactttggattgaagatactacaaaatcagtttatcaagtaagttcaacacgcaacaaacccatgattgaaaaaatggaaatttag

SEQ ID NO: 190951 - DNA, 2011 bp, Homo sapiens
  Payload ID: 17721
  Gene Name: THO complex 1
  ENST ID: ENST00000631280
  CDS Start-End: 1-366
atgtctccgacgccgccgctcttcagtttgcccgaagcgcggacgcggtttacgaagtctaccagagaggccttgaacaacaaaaacatcaagccattgttaagtaccttcagccaggtacctggcagtgaaaatgaaaaaaaatgtacccttgaccaagctttcagaggtattctagaagaagaaattgtatttgtaccgcatctacaccttttgtattgttgggagatgttttggattgtcttcctttggatcagtgtgacacaatattcacttttgtggaaaaaaatgttgctacttggaaatcaaatacattctattctgctgggaaaaattacttactacgtatgtgcaatgatctcctaagaagattgtctaaatcccagaatacagtcttctgtggacggattcagctctttttggccaggcttttccctctgtctgagaaatcaggtcttaacttgcagagtcagtttaatctggaaaatgtcactgttttcaatacaaatgagcaggaaagcaccctgggtcagaagcacactgaagatagagaagaaggaatggatgtagaagaaggcgaaatgggagacgaggaagctccaacaacgtgctctattccaattgattacaacctgtatcgaaaattctggtcacttcaggattacttcaggaaccctgtgcaatgctatgagaagatttcatggaaaacttttctcaagtattctgaagaagttttagctgtttttaagagttataaattagatgatactcaggcctcaagaaaaaagatggaagaattgaaaacaggaggagaacatgtatattttgcaaaatttttaacaagtgaaaagctgatggatttacaactgagtgacagtaactttcgtcgacacatcctgttgcagtatctcattttattccaatatctcaaggggcaggtcaaattcaaaagttcaaactatgttttaactgatgagcaatcactttggattgaagatactacaaaatcagtttatcaactactatctgaaaacccccccgatggagaaagattttcaaagatggtagagcatatattaaacactgaagaaaactggaactcgtggaaaaatgaaggttgcccaagttttgtgaaagaaagaacatcagataccaaacctacgagaataattcggaagagaacagcacccgaggacttcctagggaaaggacccaccaaaaaaattctgatgggaaatgaggagttaacaaggctttggaatctttgccctgataatatggaagcctgtaaatcagagacaagggaacacatgcccactttggaggaattctttgaagaagccattgaacaggcagaccctgaaaatatggtggaaaatgaatataaggctgtgaacaattcaaattatggttggagagccctgagactattagcacggagaagccctcacttcttccagccaaccaaccagcagtttaaaagtttaccagaatatcttgaaaatatggtaataaagctagccaaggaattaccgcctccttctgaagaaataaaaacaggtgaggatgaagatgaggaagataatgatgctctactgaaggaaaatgaaagtcctgatgttcggcgagacaaacctgtaacaggagaacaaatagaggtatttgccaacaagctgggtgaacaatggaagattctggctccctacttggaaatgaaagactcagaaattaggcagattgagtgtgacagtgaagacatgaagatgagagctaagcagctcctggttgcctggcaagatcaagagggagttcatgcaacacctgagaatctgattaatgcactgaataagtctggattaagtgaccttgcagaaagtctaactaatgacaatgagacaaatagttagcttcttttttttttctttttattaaaactgtgatagattttgttaccaagcagcatttgataagaggtccactggttttggtaaacaataaacatttttataac

SEQ ID NO: 190952 - DNA, 5609 bp, Homo sapiens
  Payload ID: 17722
  Gene Name: THO complex 2
  Uniprot ID: Q8NI27
  ENST ID: ENST00000245838
  CDS Start-End: 33-4814
acatccgggcttctgctactagtgagaggaagatggcggccgcggctgtggtggttcccgcagagtggataaagaactgggagaaatcagggagaggcgaatttttgcatttatgtcggatcctcagtgaaaataaaagccatgatagttcaacatacagagatttccagcaagctctctatgagttgtcatatcatgtaattaaaggaaatctaaagcatgaacaggcatctaatgttcttagtgacattagtgaatttcgtgaggatatgccctccattcttgctgatgtattctgcatattagacattgagacaaattgtttagaagaaaaaagcaagagagactattttacacagttggtattagcatgtttgtatttagtttcagacacagttctaaaggaacgcctggatccagaaacactggaatcattagggcttatcaaacaatcacagcaattcaatcaaaagtcagttaaaatcaagacaaaactcttttataagcagcaaaaattcaatttgttaagagaagagaatgaaggttatgccaagctgattgctgaattggggcaagatttatctggaagtattactagtgatttaatcttagaaaatatcaaatctttaataggatgctttaatctggatcccaatagagttttggatgtcattttagaagtgtttgaatgcaggccagaacacgatgacttctttatatctttgttagaatcttacatgagtatgtgtgaaccgcaaacactgtgtcatattcttgggttcaaattcaagttttaccaggaaccaaatggcgagacaccatcatctttatacagagttgcagcagtacttctacaatttaatcttattgatttagatgatctttatgtacatcttcttccggctgataattgcattatggatgaacacaaacgagaaattgcggaagctaagcaaattgttagaaagcttacgatggttgtgttgtcttctgaaaaaatggatgagcgagagaaagaaaaggaaaaagaagaggagaaagtagagaaaccacctgataaccaaaaacttggcttgttggaagccttattaaagattggtgattggcaacatgcacagaacattatggatcagatgcctccatactatgcagcttcacacaagctaatagcccttgctatttgcaagctcattcatataactattgagcctctctaccgaagagttggagttcctaaaggtgctaaaggctcacctgttaatgctttgcaaaacaagagagcaccaaaacaagctgagagctttgaagatttgaggagagacgtgttcaatatgttctgttaccttggtcctcacctttctcacgatcccattttatttgcaaaagtggtgcgcataggcaagtcatttatgaaggagtttcagtctgatggaagcaaacaagaagataaagaaaaaacggaagttatccttagctgtttgcttagcattactgaccaggtactacttccatctctttctttgatggactgcaatgcttgtatgtctgaggaactatggggaatgtttaaaacatttccatatcagcatagatatcgtctgtatggccagtggaagaatgaaacttataacagtcacccacttttagtaaaagttaaagctcaaacaatagacagagccaaatatatcatgaagcgcctaaccaaggaaaatgtgaagccttctggaagacaaattgggaagttgagccacagcaatccaaccattttgtttgattatatcttgtcacaaatacagaagtatgataacttaataacacctgtagtagattcattgaaatacctcacttcactgaattatgatgtcttggcctattgtatcattgaagctttagctaatccagaaaaggaaagaatgaaacatgatgacacaaccatctcaagctggcttcagagtctggctagtttctgtggtgcagtttttcgtaaatatccaattgatcttgctggtcttcttcagtatgttgccaatcagctaaaggcgggcaaaagttttgacctgcttatattgaaagaagtggtacaaaaaatggcaggaatagaaattacagaggaaatgacaatggagcaactagaggctatgactggtggagagcagctaaaagctgagggtggttattttggtcagatcagaaacactaaaaaatcctctcagagattaaaggatgctctattggaccatgatcttgcccttcctctctgtctgcttatggctcagcagagaaatggggtaatctttcaggaaggtggagagaaacatttgaaacttgtgggaaagctctatgaccagtgtcatgataccctggtgcagtttggtgggtttttagcatctaatctgagcacagaagattatataaagcgagtgccttcaattgatgtactctgtaatgaatttcatacaccccatgatgcagcatttttcctgtctaggccaatgtatgcccatcatatttcgtcaaagtatgatgaacttaaaaaatcagaaaagggaagtaaacagcaacataaagttcataagtacattacatcatgtgagatggtgatggcgcctgtccatgaagcagtggtctccttacatgtttccaaagtctgggatgacatcagccctcaattctatgctacattctggtcattgacaatgtatgaccttgcagttccacacaccagctatgaacgagaagtcaataaacttaaagtccagatgaaagcaattgatgacaatcaggaaatgcccccaaataaaaagaaaaaagagaaggagcgctgtactgcccttcaggacaagcttcttgaagaagaaaagaaacagatggaacatgtacagagagttctacagagattgaaactggaaaaggacaactggcttttagcaaaatctaccaaaaatgagaccatcacaaaatttctacagctgtgtatatttcctcgatgtattttttcagcaattgatgctgtttactgtgctcgttttgttgaattggtacatcaacagaaaactccaaatttttccacacttctttgctatgatcgagttttctctgacataatttacacagttgcaagctgtactgaaaatgaagccagtcgatacggaaggtttctttgctgcatgttagagactgtgaccaggtggcatagtgatagagccacatatgaaaaggaatgtggaaactatccaggattccttaccatattacgggcaactggatttgatggtggaaataaggctgatcaattagactatgaaaattttcgacatgttgtacataaatggcattacaaactaaccaaggcatcggtacattgccttgaaacaggcgaatatactcacatcaggaatatcttgattgtgctaacaaaaatacttccttggtacccaaaagttttgaatctgggtcaagctttggaaagaagagtacacaaaatctgccaagaagaaaaagagaagaggccagatctatatgcattggctatgggctactctgggcagttgaaaagtagaaagtcatacatgatacctgaaaatgagtttcatcacaaagacccccctccgaggaatgcagttgccagtgtgcaaaatgggcctggtggtgggccttcttcatcatcaataggaagtgcatctaaatcggatgaaagcagtactgaggagactgataaatcaagggagagatctcagtgtggtgtgaaagctgttaataaagcttctagtaccacacctaaagggaattcaagcaatggaaatagtggctctaacagcaacaaagctgttaaagaaaatgacaaagaaaaagggaaagagaaagaaaaagagaaaaaagaaaagactccagctactactccagaggccagggtacttggtaaagatggtaaagaaaaaccaaaggaagagcggccaaataaagatgaaaaagcaagagagaccaaggaaagaacgccgaagtctgacaaagagaaagaaaaattcaagaaggaagaaaaagctaaagatgagaaatttaagaccactgtccccaacgcagaatcaaaatcaactcaagaaagggaaagagagaaggagccatccagagaaagagatatagcaaaggaaatgaaatcaaaggaaaatgttaaaggaggagaaaaaacaccagtttctgggtccttgaaatcacctgttcccagatcagatattccagagcctgaaagggaacaaaaacgccgcaaaattgatactcacccttctccatcacattcctccacagtaaaggacagtctcatcgaactcaaggaatcttcagcaaagctctacattaatcatactcctccaccactgtccaagagtaaggagagagaaatggacaagaaagatttggacaagtcaagggaaagatccagagaaagagagaaaaaagatgaaaaggacaggaaagagcggaaaagggatcactcaaacaacgaccgtgaagtgccaccggacttaaccaagagacgtaaagaggagaatggaacaatgggggtttcaaaacataaaagtgaaagtccttgtgaatctccttatccaaatgagaaagacaaggaaaaaaataagtcaaaatcttcaggcaaagaaaaaggcagtgattcatttaaatctgagaagatggataaaatctcctccggtggcaaaaaggagtccaggcatgataaagaaaagatagaaaagaaagagaaacgggacagttcaggaggaaaggaagagaagaaacatcataagtcctcggacaagcacagataatgaagactttccatcaaggtgagatcggactggaactgttcggctgcgaccagaaatttattttcctgagtaaattgccgagaattaagaatgaagagggccatttgcatctccttaaattattcagttacctgctttattgctccatgtggaaaacttaaaattgttaagttgtgcattactgtattttaacttgttgcttagtttctacatgtttattttcagtaatggctgaaagtgttaactgttccatacttttagcacaatgtgctgcataaggttacctgtgtacagagttttactttagattaactaaatattgcctgggttcagtttttatttccattctgaaatgcttcctttttattgtttgaaactgaaaataaacaattgttgaacccttttgattttacctcattttaaaactgttttaatttattatttggcttgttcttaatattagtcactaaaagcagtgggagcattgtcttatgaaatgcttaggaatcattttatatagtacatgtacaacattaaacgtgtttaaaaaagaaaaaggtaccagcgatcacttgtcccttgccattttttcttgtaattatgttagacaaatcttggcggcggggggatcaaaacataattgttttaattctacagctgtaggagctttgtattgctgaactttcatctggaaaagtttcacagtgacatttttaaaagagaatttttttatctgccgaattctaccagtgtaaccttttttctaaataaacaatagttttctcaaatggttgt

SEQ ID NO: 190953 - DNA, 4930 bp, Homo sapiens
  Payload ID: 17722
  Gene Name: THO complex 2
  Uniprot ID: Q8NI27
  ENST ID: ENST00000355725
  CDS Start-End: 35-4816
acacatccgggcttctgctactagtgagaggaagatggcggccgcggctgtggtggttcccgcagagtggataaagaactgggagaaatcagggagaggcgaatttttgcatttatgtcggatcctcagtgaaaataaaagccatgatagttcaacatacagagatttccagcaagctctctatgagttgtcatatcatgtaattaaaggaaatctaaagcatgaacaggcatctaatgttcttagtgacattagtgaatttcgtgaggatatgccctccattcttgctgatgtattctgcatattagacattgagacaaattgtttagaagaaaaaagcaagagagactattttacacagttggtattagcatgtttgtatttagtttcagacacagttctaaaggaacgcctggatccagaaacactggaatcattagggcttatcaaacaatcacagcaattcaatcaaaagtcagttaaaatcaagacaaaactcttttataagcagcaaaaattcaatttgttaagagaagagaatgaaggttatgccaagctgattgctgaattggggcaagatttatctggaagtattactagtgatttaatcttagaaaatatcaaatctttaataggatgctttaatctggatcccaatagagttttggatgtcattttagaagtgtttgaatgcaggccagaacacgatgacttctttatatctttgttagaatcttacatgagtatgtgtgaaccgcaaacactgtgtcatattcttgggttcaaattcaagttttaccaggaaccaaatggcgagacaccatcatctttatacagagttgcagcagtacttctacaatttaatcttattgatttagatgatctttatgtacatcttcttccggctgataattgcattatggatgaacacaaacgagaaattgcggaagctaagcaaattgttagaaagcttacgatggttgtgttgtcttctgaaaaaatggatgagcgagagaaagaaaaggaaaaagaagaggagaaagtagagaaaccacctgataaccaaaaacttggcttgttggaagccttattaaagattggtgattggcaacatgcacagaacattatggatcagatgcctccatactatgcagcttcacacaagctaatagcccttgctatttgcaagctcattcatataactattgagcctctctaccgaagagttggagttcctaaaggtgctaaaggctcacctgttaatgctttgcaaaacaagagagcaccaaaacaagctgagagctttgaagatttgaggagagacgtgttcaatatgttctgttaccttggtcctcacctttctcacgatcccattttatttgcaaaagtggtgcgcataggcaagtcatttatgaaggagtttcagtctgatggaagcaaacaagaagataaagaaaaaacggaagttatccttagctgtttgcttagcattactgaccaggtactacttccatctctttctttgatggactgcaatgcttgtatgtctgaggaactatggggaatgtttaaaacatttccatatcagcatagatatcgtctgtatggccagtggaagaatgaaacttataacagtcacccacttttagtaaaagttaaagctcaaacaatagacagagccaaatatatcatgaagcgcctaaccaaggaaaatgtgaagccttctggaagacaaattgggaagttgagccacagcaatccaaccattttgtttgattatatcttgtcacaaatacagaagtatgataacttaataacacctgtagtagattcattgaaatacctcacttcactgaattatgatgtcttggcctattgtatcattgaagctttagctaatccagaaaaggaaagaatgaaacatgatgacacaaccatctcaagctggcttcagagtctggctagtttctgtggtgcagtttttcgtaaatatccaattgatcttgctggtcttcttcagtatgttgccaatcagctaaaggcgggcaaaagttttgacctgcttatattgaaagaagtggtacaaaaaatggcaggaatagaaattacagaggaaatgacaatggagcaactagaggctatgactggtggagagcagctaaaagctgagggtggttattttggtcagatcagaaacactaaaaaatcctctcagagattaaaggatgctctattggaccatgatcttgcccttcctctctgtctgcttatggctcagcagagaaatggggtaatctttcaggaaggtggagagaaacatttgaaacttgtgggaaagctctatgaccagtgtcatgataccctggtgcagtttggtgggtttttagcatctaatctgagcacagaagattatataaagcgagtgccttcaattgatgtactctgtaatgaatttcatacaccccatgatgcagcatttttcctgtctaggccaatgtatgcccatcatatttcgtcaaagtatgatgaacttaaaaaatcagaaaagggaagtaaacagcaacataaagttcataagtacattacatcatgtgagatggtgatggcgcctgtccatgaagcagtggtctccttacatgtttccaaagtctgggatgacatcagccctcaattctatgctacattctggtcattgacaatgtatgaccttgcagttccacacaccagctatgaacgagaagtcaataaacttaaagtccagatgaaagcaattgatgacaatcaggaaatgcccccaaataaaaagaaaaaagagaaggagcgctgtactgcccttcaggacaagcttcttgaagaagaaaagaaacagatggaacatgtacagagagttctacagagattgaaactggaaaaggacaactggcttttagcaaaatctaccaaaaatgagaccatcacaaaatttctacagctgtgtatatttcctcgatgtattttttcagcaattgatgctgtttactgtgctcgttttgttgaattggtacatcaacagaaaactccaaatttttccacacttctttgctatgatcgagttttctctgacataatttacacagttgcaagctgtactgaaaatgaagccagtcgatacggaaggtttctttgctgcatgttagagactgtgaccaggtggcatagtgatagagccacatatgaaaaggaatgtggaaactatccaggattccttaccatattacgggcaactggatttgatggtggaaataaggctgatcaattagactatgaaaattttcgacatgttgtacataaatggcattacaaactaaccaaggcatcggtacattgccttgaaacaggcgaatatactcacatcaggaatatcttgattgtgctaacaaaaatacttccttggtacccaaaagttttgaatctgggtcaagctttggaaagaagagtacacaaaatctgccaagaagaaaaagagaagaggccagatctatatgcattggctatgggctactctgggcagttgaaaagtagaaagtcatacatgatacctgaaaatgagtttcatcacaaagacccccctccgaggaatgcagttgccagtgtgcaaaatgggcctggtggtgggccttcttcatcatcaataggaagtgcatctaaatcggatgaaagcagtactgaggagactgataaatcaagggagagatctcagtgtggtgtgaaagctgttaataaagcttctagtaccacacctaaagggaattcaagcaatggaaatagtggctctaacagcaacaaagctgttaaagaaaatgacaaagaaaaagggaaagagaaagaaaaagagaaaaaagaaaagactccagctactactccagaggccagggtacttggtaaagatggtaaagaaaaaccaaaggaagagcggccaaataaagatgaaaaagcaagagagaccaaggaaagaacgccgaagtctgacaaagagaaagaaaaattcaagaaggaagaaaaagctaaagatgagaaatttaagaccactgtccccaacgcagaatcaaaatcaactcaagaaagggaaagagagaaggagccatccagagaaagagatatagcaaaggaaatgaaatcaaaggaaaatgttaaaggaggagaaaaaacaccagtttctgggtccttgaaatcacctgttcccagatcagatattccagagcctgaaagggaacaaaaacgccgcaaaattgatactcacccttctccatcacattcctccacagtaaaggacagtctcatcgaactcaaggaatcttcagcaaagctctacattaatcatactcctccaccactgtccaagagtaaggagagagaaatggacaagaaagatttggacaagtcaagggaaagatccagagaaagagagaaaaaagatgaaaaggacaggaaagagcggaaaagggatcactcaaacaacgaccgtgaagtgccaccggacttaaccaagagacgtaaagaggagaatggaacaatgggggtttcaaaacataaaagtgaaagtccttgtgaatctccttatccaaatgagaaagacaaggaaaaaaataagtcaaaatcttcaggcaaagaaaaaggcagtgattcatttaaatctgagaagatggataaaatctcctccggtggcaaaaaggagtccaggcatgataaagaaaagatagaaaagaaagagaaacgggacagttcaggaggaaaggaagagaagaaacatcataagtcctcggacaagcacagataatgaagactttccatcaaggtaatgcacttaatgctttatgtgagatttaaaaagtattttacccatcttaaataaattgtgtttccatcatagtggatacagtgttcagaccct

SEQ ID NO: 190954 - DNA, 1365 bp, Homo sapiens
  Payload ID: 17722
  Gene Name: THO complex 2
  ENST ID: ENST00000448128
  CDS Start-End: 1-569
gggaacaaaaacgccgcaaaattgatactcacccttctccatcacattcctccacagtaaaggacagtctcatcgaactcaaggaatcttcagcaaagctctacattaatcatactcctccaccactgtccaagagtaaggagagagaaatggacaagaaagatttggacaagtcaagggaaagatccagagaaagagagaaaaaagatgaaaaggacaggaaagagcggaaaagggatcactcaaacaacgaccgtgaagtgccaccggacttaaccaagagacgtaaagaggagaatggaacaatgggggtttcaaaacataaaagtgaaagtccttgtgaatctccttatccaaatgagaaagacaaggaaaaaaataagtcaaaatcttcaggcaaagaaaaaggcagtgattcatttaaatctgagaagatggataaaatctcctccggtggcaaaaaggagtccaggcatgataaagaaaagatagaaaagaaagagaaacgggacagttcaggaggaaaggaagagaagaaacatcataagtcctcggacaagcacagataatgaagactttccatcaaggtgagatcggactggaactgttcggctgcgaccagaaatttattttcctgagtaaattgccgagaattaagaatgaagagggccatttgcatctccttaaattattcagttacctgctttattgctccatgtggaaaacttaaaattgttaagttgtgcattactgtattttaacttgttgcttagtttctacatgtttattttcagtaatggctgaaagtgttaactgttccatacttttagcacaatgtgctgcataaggttacctgtgtacagagttttactttagattaactaaatattgcctgggttcagtttttatttccattctgaaatgcttcctttttattgtttgaaactgaaaataaacaattgttgaacccttttgattttacctcattttaaaactgttttaatttattatttggcttgttcttaatattagtcactaaaagcagtgggagcattgtcttatgaaatgcttaggaatcattttatatagtacatgtacaacattaaacgtgtttaaaaaagaaaaaggtaccagcgatcacttgtcccttgccattttttcttgtaattatgttagacaaatcttggcggcggggggatcaaaacataattgttttaattctacagctgtaggagctttgtattgctgaactttcatctggaaaagtttcacagtgacatttttaaaagagaatttttttatctgccgaattctaccagtgtaaccttttttctaaataaacaatagttttctcaaatggttgta

SEQ ID NO: 190955 - DNA, 573 bp, Homo sapiens
  Payload ID: 17722
  Gene Name: THO complex 2
  ENST ID: ENST00000455053
  CDS Start-End: 1-255
ggggtttcaaaacataaaagtgaaagtccttgtgaatctccttatccaaatgagaaagacaaggaaaaaaataagtcaaaatcttcaggcaaagaaaaaggcagtgattcatttaaatctgagaagatggataaaatctcctccggtggcaaaaaggagtccaggcatgataaagaaaagatagaaaagaaagagaaacgggacagttcaggaggaaaggaagagaagaaacagtcctcggacaagcacagataatgaagactttccatcaaggctatggacagaccccctaagccgaaagtctcccagaggaggatgccaaagctccgtgcgtcactctcagaatgatatctcccataattaagagcttctggtgctgtccatttaatgggaatctgctttaagtcagaagatgagtacacaccaccatcctcttgacgagacattccaaagtcactgattttcagaacattattttcacctccaggcagtttcttacagcaaggtccctgtgtatacattttttactcgagatacaccatccagaatcagcatctaatgaaaatttcactg

SEQ ID NO: 190956 - DNA, 4364 bp, Homo sapiens
  Payload ID: 17722
  Gene Name: THO complex 2
  ENST ID: ENST00000441692
  CDS Start-End: 1-1166
gatctcagtgtggtgtgaaagctgttaataaagcttctagtaccacacctaaagggaattcaagcaatggaaatagtggctctaacagcaacaaagctgttaaagaaaatgacaaagaaaaagggaaagagaaagaaaaagagaaaaaagaaaagactccagctactactccagaggccagggtacttggtaaagatggtaaagaaaaaccaaaggaagagcggccaaataaagatgaaaaagcaagagagaccaaggaaagaacgccgaagtctgacaaagagaaagaaaaattcaagaaggaagaaaaagctaaagatgagaaatttaagaccactgtccccaacgcagaatcaaaatcaactcaagaaagggaaagagagaaggagccatccagagaaagagatatagcaaaggaaatgaaatcaaaggaaaatgttaaaggaggagaaaaaacaccagtttctgggtccttgaaatcacctgttcccagatcagatattccagagcctgaaagggaacaaaaacgccgcaaaattgatactcacccttctccatcacattcctccacagtaaaggttacagccatacttcccaaagttcctctgggttctgagaactatgccagctcacctgtcatctccattcattttctacaggacagtctcatcgaactcaaggaatcttcagcaaagctctacattaatcatactcctccaccactgtccaagagtaaggagagagaaatggacaagaaagatttggacaagtcaagggaaagatccagagaaagagagaaaaaagatgaaaaggacaggaaagagcggaaaagggatcactcaaacaacgaccgtgaagtgccaccggacttaaccaagagacgtaaagaggagaatggaacaatgggggtttcaaaacataaaagtgaaagtccttgtgaatctccttatccaaatgagaaagacaaggaaaaaaataagtcaaaatcttcaggcaaagaaaaaggcagtgattcatttaaatctgagaagatggataaaatctcctccggtggcaaaaaggagtccaggcatgataaagaaaagatagaaaagaaagagaaacgggacagttcaggaggaaaggaagagaagaaacatcataagtcctcggacaagcacagataatgaagactttccatcaaggctatggacagaccccctaagccgaaagtctcccagaggaggatgccaaagctccgtgcgtcactctcagaatgatatctcccataattaagagcttctggtgctgtccatttaatgggaatctgctttaagtcagaagatgagtacacaccaccatcctcttgacgagacattccaaagtcactgattttcagaacattattttcacctccaggcagtttcttacagcaaggtccctgtgtatacattttttactcgagatacaccatccagaatcagcatctaatgaaaatttcactgagttttagttcattcttctttctctgaaaggagaggaaatcgcctccaggaaccagttccttaatgacgtagataggccgtctttgtgtgtgaactcctatacttttgacattactgggatgattatattgcttgaggattttggcttctagtaaaaattttaatttcagttcctggggaagacgttcttgacgtgttttaacagcaacagcaattttatcctttaatgtgaccttaaatgtgtcaccaaaatttcccttgcctcttgtaacgtggcacctttatgattgagaacccatttcttattctcctaatggccatactgtgataccatgatgctcttaattggaacattgactttttttttttttgcaatttaaacaattgagataaaattcatataacatcaaatttacctttcacttttttttttttcttttggagaccaagtctcgctgttgtctcccaggctggagtgcagtggcgcgatctcggctcactgtgacctccgcctcctgggttcaagcaattctccttcctcagcctcctgagtagctgggactacaggcgtgcaccaccacgcctggctaatttttgtatttttagtagagataggggtttcaccgtgttagccaggatggtctcgatctcctgacctggtgatccacctgcctcggcctcccaaagtgttgggattataagcgtgagccatgacgcctggcctcaaacttgccatttttaaagtgtacaattcaatggtttttagtatatccactatgttgtgcaagcatcaccgctgtctaattccagagcatttctgtcaccccaaaaagaaactccatgcctattagcagtcactcccagttcttcccttcctcggcccctggaaaccagtaatgtactttctgtctctgtgattttgcctgttttggacatttcatttaaatggaattatgcaataatttgtggccttttgtgtttggctttcacttagcatcatgttctcaaggctcatccatgttgtggcatgtatcagtactgcattcctttttatggctaaatgatgtttcattgtatgagtgtgtaccacattttatttatccattcagcaattaatggacaggaacaatggcttttaagtattaaattgtaagttcaacattaaatgtatccacagttattgataatatcaagattatacatggtgtgaacagaatgctgtgtcgaaatggtatgtaaattatttgtcagcatttcatgtaagtgattattttctaaggacccttctagccctggttttaagaaatatgtgaatgtagtattttcatcaataaagtttaatgcattaagcattagcttaaaatttgaatgaaggcagatgtgaagatatttgccacatgttgtaataatcatgttttgaaattatttcaatatgaagtatttgaaaaatgtcaatacataaaggaaaggaaatgagtataattaagtcaatatatttttaaagcaatttttataatttagcagacactgcatcttaatataagttactattaaaattgtgtccttgtgaaaaatgtgatgtcattttcctttttttgttgatcatgtaaaataggttacttttctttgctacattttctatttaataagctattgcttgccgttgtggaatgttttacttgttgctccatttttttctccctacccccacccctctctcccacacgcacacaatgttcaattttttttttaagtcatcattagtgtgtttatctttaatggattctaagaatggacaaaaagaaacacacaaatatttcatccttttctggggactcaagtctttgttaccgatggaactcattaacttcttgttctttcttaaatcttcctccctccttaccttttcctctccttccttctcttcttcttcctttcttctcccctccctccctccctcccttcttccctccctcctcctttcattctccttctctccttctcccttccttttctcctacctcctttgactaagcctccctcccctactccctcctttccttccttccttccttcttctctatcaatataatcactttgtttctttcaggtgagatcggactggaactgttcggctgcgaccagaaatttattttcctgagtaaattgccgagaattaagaatgaagagggccatttgcatctccttaaattattcagttacctgctttattgctccatgtggaaaacttaaaattgttaagttgtgcattactgtattttaacttgttgcttagtttctacatgtttattttcagtaatggctgaaagtgttaactgttccatacttttagcacaatgtgctgcataaggttacctgtgtacagagttttactttagattaactaaatattgcctgggttcagtttttatttccattctgaaatgcttcctttttattgtttgaaactgaaaataaacaattgttgaacccttttgattttacctcattttaaaactgttttaatttattatttggcttgttcttaatattagtcactaaaagcagtgggagcattgtcttatgaaatgcttaggaatcattttatatagtacatgtacaacattaaacgtgtttaaaaaagaaaaaggtaccagcgatcacttgtcccttgccattttttcttgtaattatgttagacaaatcttggcggcggggggatcaaaacataattgttttaattctacagctgtaggagctttgtattgctgaactttcatctggaaaagtttcacagtgacatttttaaaagagaatttttttatctgccgaattctaccagtgtaaccttttttctaaataaacaatagttttctcaaa

SEQ ID NO: 190957 - DNA, 657 bp, Homo sapiens
  Payload ID: 17722
  Gene Name: THO complex 2
  ENST ID: ENST00000416618
  CDS Start-End: 1-543
attgatactcacccttctccatcacattcctccacagtaaaggacagtctcatcgaactcaaggaatcttcagcaaagctctacattaatcatactcctccaccactgtccaagagtaaggagagagaaatggacaagaaagatttggacaagtcaagggaaagatccagagaaagagagaaaaaagatgaaaaggacaggaaagagcggaaaagggatcactcaaacaacgaccgtgaagtgccaccggacttaaccaagagacgtaaagaggagaatggaacaatgggggtttcaaaacataaaagtgaaagtccttgtgaatctccttatccaaatgagaaagacaaggaaaaaaataagtcaaaatcttcaggcaaagaaaaaggcagtgattcatttaaatctgagaagatggataaaatctcctccggtggcaaaaaggagtccaggcatgataaagaaaagatagaaaagaaagagaaacgggacagttcaggaggaaaggaagagaagaaacagtcctcggacaagcacagataatgaagactttccatcaaggtaatgcacttaatgctttatgtgagatttaaaaagtattttacccatcttaaataaattgtgtttccatcatagtggatacagtgttcagaccct

SEQ ID NO: 190958 - DNA, 876 bp, Homo sapiens
  Payload ID: 17722
  Gene Name: THO complex 2
  ENST ID: ENST00000433883
  CDS Start-End: 16-378
actagtgagaggaagatggcggccgcggctgtggtggttcccgcagagtggataaagaactgggagaaatcagggagaggcgaatttttgcatttatgtcggatcctcagtgaaaataaaagccatgatagttcaacatacagagatttccagcaagctctctatgagttgtcatatcatgtaattaaaggaaatctaaagcatgaacaggcatctaatgttcttagtgacattagtgaatttcgtgaggatatgccctccattcttgctgatgtattctgcatattagacattgagacaaattgtttagaagaaaaaagcaagagagactattttacacagttggtattagcatgtttgtttcagacacagttctaaaggaacgcctggatccagaaacactggaatcattagggcttatcaaacaatcacagcaattcaatcaaaagtcagttaaaatcaagacaaaactcttttataagcagcaaaaattcaatttgttaagagaagagaatgaaggttatgccaagctgattgctgaattggggcaagatttatctggaagtattactagtgatttaatcttagaaaatatcaaatctttaataggatgctttaatctggatcccaatagagttttggatgtcattttagaagtgtttgaatgcaggccagaacacgatgacttctttatatctttgttagaatcttacatgagtatgtgtgaaccgcaaacactgtgtcatattcttgggttcaaattcaagttttaccaggaaccaaatggcgagacaccatcatctttatacagagttgcagcagtacttctacaatttaatcttattgatttagatgatctttatgtacatcttcttc

SEQ ID NO: 190959 - DNA, 3188 bp, Homo sapiens
  Payload ID: 17722
  Gene Name: THO complex 2
  ENST ID: ENST00000432353
  CDS Start-End: 1-497
ctgttaaagaaaatgacaaagaaaaagggaaagagaaagaaaaagagaaaaaagaaaagactccagctactactccagaggccagggtacttggtaaagatggtaaagaaaaaccaaaggaagagcggccaaataaagatgaaaaagcaagagagaccaaggaaagaacgccgaagtctgacaaagagaaagaaaaattcaagaaggaagaaaaagctaaagatgagaaatttaagaccactgtccccaacgcagaatcaaaatcaactcaagaaagggaaagagagaaggagccatccagagaaagagatatagcaaaggaaatgaaatcaaaggaaaatgttaaaggaggagaaaaaacaccagtttctgggtccttgaaatcacctgttcccagatcagatattccagagcctgaaagggaacaaaaacgccgcaaaattgatactcacccttctccatcacattcctccacagtaaaggttagtatagcctgaggaaggcagcgtccatgttaggctcacctgtttggaataccagtgtcctgacttccttcaagtcttatgccaagcattcactggagccactggaggttttatattgcattagaaaatgaatttttctatattggtggactgattttttttcctattgagtatttttattataaaaatgttaaaacttcaaggacttagcactaattttgtagtgtttcaaagtgcaagagaaattttacccagaagtgcctcaactgctttaagcagtcttttttggagtgcaatggtagctacaagcaaacgaatcttttcagcagaatgaagcctatttttcagcatattgaagaatatatagcactgaagacttcctggatgacacaagataaacaagttacctctgaattcaagcttcttgatgagcatcataccgatgtgtgccttctaagaaggagtcttgaaaggagttccattttaaagtctccttggtgatcagttctcctgtagttgtgtatattcagacagtctcatcgaactcaaggaatcttcagcaaagctctacattaatcatactcctccaccactgtccaagagtaaggagagagaaatggacaagaaagatttggacaagtcaagggaaagatccagagaaagagagaaaaaagatgaaaaggacaggaaagagcggaaaagggatcactcaaacaacgaccgtgaagtgccaccggacttaaccaagagacgtaaagaggagaatggaacaatgggggtttcaaaacataaaagtgaaagtccttgtgaatctccttatccaaatgagaaagacaaggaaaaaaataagtcaaaatcttcaggcaaagaaaaaggcagtgattcatttaaatctgagaagatggataaaatctcctccggtggcaaaaaggagtccaggcatgataaagaaaagatagaaaagaaagagaaacgggacagttcaggaggaaaggaagagaagaaacatcataagtcctcggacaagcacagataatgaagactttccatcaaggctatggacagaccccctaagccgaaagtctcccagaggaggatgccaaagctccgtgcgtcactctcagaatgatatctcccataattaagagcttctggtgctgtccatttaatgggaatctgctttaagtcagaagatgagtacacaccaccatcctcttgacgagacattccaaagtcactgattttcagaacattattttcacctccaggcagtttcttacagcaaggtccctgtgtatacattttttactcgagatacaccatccagaatcagcatctaatgaaaatttcactgagttttagttcattcttctttctctgaaaggagaggaaatcgcctccaggaaccagttccttaatgacgtagataggccgtctttgtgtgtgaactcctatacttttgacattactgggatgattatattgcttgaggattttggcttctagtaaaaattttaatttcagttcctggggaagacgttcttgacgtgttttaacagcaacagcaattttatcctttaatgtgaccttaaatgtgtcaccaaaatttcccttgcctcttgtaacgtggcacctttatgattgagaacccatttcttattctcctaatggccatactgtgataccatgatgctcttaattggaacattgactttttttttttttgcaatttaaacaattgagataaaattcatataacatcaaatttacctttcacttttttttttttcttttggagaccaagtctcgctgttgtctcccaggctggagtgcagtggcgcgatctcggctcactgtgacctccgcctcctgggttcaagcaattctccttcctcagcctcctgagtagctgggactacaggcgtgcaccaccacgcctggctaatttttgtatttttagtagagataggggtttcaccgtgttagccaggatggtctcgatctcctgacctggtgatccacctgcctcggcctcccaaagtgttgggattataagcgtgagccatgacgcctggcctcaaacttgccatttttaaagtgtacaattcaatggtttttagtatatccactatgttgtgcaagcatcaccgctgtctaattccagagcatttctgtcaccccaaaaagaaactccatgcctattagcagtcactcccagttcttcccttcctcggcccctggaaaccagtaatgtactttctgtctctgtgattttgcctgttttggacatttcatttaaatggaattatgcaataatttgtggccttttgtgtttggctttcacttagcatcatgttctcaaggctcatccatgttgtggcatgtatcagtactgcattcctttttatggctaaatgatgtttcattgtatgagtgtgtaccacattttatttatccattcagcaattaatggacaggaacaatggcttttaagtattaaattgtaagttcaacattaaatgtatccacagttattgataatatcaagattatacatggtgtgaacagaatgctgtgtcgaaatggtatgtaaattatttgtcagcatttcatgtaagtgattattttctaaggacccttctagccctggttttaagaaatatgtgaatgtagtattttcatcaataaagtttaatgcattaa

SEQ ID NO: 190960 - DNA, 1137 bp, Homo sapiens
  Payload ID: 17722
  Gene Name: THO complex 2
  ENST ID: ENST00000438358
  CDS Start-End: 1-1137
ggagcgctgtactgcccttcaggacaagcttcttgaagaagaaaagaaacagatggaacatgtacagagagttctacagagattgaaactggaaaaggacaactggcttttagcaaaatctaccaaaaatgagaccatcacaaaatttctacagctgtgtatatttcctcgatgtattttttcagcaattgatgctgtttactgtgctcgttttgttgaattggtacatcaacagaaaactccaaatttttccacacttctttgctatgatcgagttttctctgacataatttacacagttgcaagctgtactgaaaatgaagccagtcgatacggaaggtttctttgctgcatgttagagactgtgaccaggtggcatagtgatagagccacatatgaaaaggaatgtggaaactatccaggattccttaccatattacgggcaactggatttgatggtggaaataaggctgatcaattagactatgaaaattttcgacatgttgtacataaatggcattacaaactaaccaaggcatcggtacattgccttgaaacaggcgaatatactcacatcaggaatatcttgattgtgctaacaaaaatacttccttggtacccaaaagttttgaatctgggtcaagctttggaaagaagagtacacaaaatctgccaagaagaaaaagagaagaggccagatctatatgcattggctatgggtgttgaagtttatcttctgccttcaggagattatgggagattatgcgatcatgtttccacaggctgctactctgggcagttgaaaagtagaaagtcatacatgatacctgaaaatgagtttcatcacaaagacccccctccgaggaatgcagttgccagtgtgcaaaatgggcctggtggtgggccttcttcatcatcaataggaagtgcatctaaatcggatgaaagcagtactgaggagactgataaatcaagggagagatctcagtgtggtgtgaaagctgttaataaagcttctagtaccacacctaaagggaattcaagcaatggaaatagtggctctaacagcaacaaagctgttaaagaaaatgacaaagaaaaagggaaagagaaagaaaaagagaaaaaagaaaagac

SEQ ID NO: 190961 - DNA, 4452 bp, Homo sapiens
  Payload ID: 17722
  Gene Name: THO complex 2
  ENST ID: ENST00000491737
  CDS Start-End: 1-4437
atgtttgtttcagacacagttctaaaggaacgcctggatccagaaacactggaatcattagggcttatcaaacaatcacagcaattcaatcaaaagtcagttaaaatcaagacaaaactcttttataagcagcaaaaattcaatttgttaagagaagagaatgaaggttatgccaagctgattgctgaattggggcaagatttatctggaagtattactagtgatttaatcttagaaaatatcaaatctttaataggatgctttaatctggatcccaatagagttttggatgtcattttagaagtgtttgaatgcaggccagaacacgatgacttctttatatctttgttagaatcttacatgagtatgtgtgaaccgcaaacactgtgtcatattcttgggttcaaattcaagttttaccaggaaccaaatggcgagacaccatcatctttatacagagttgcagcagtacttctacaatttaatcttattgatttagatgatctttatgtacatcttcttccggctgataattgcattatggatgaacacaaacgagaaattgcggaagctaagcaaattgttagaaagcttacgatggttgtgttgtcttctgaaaaaatggatgagcgagagaaagaaaaggaaaaagaagaggagaaagtagagaaaccacctgataaccaaaaacttggcttgttggaagccttattaaagattggtgattggcaacatgcacagaacattatggatcagatgcctccatactatgcagcttcacacaagctaatagcccttgctatttgcaagctcattcatataactattgagcctctctaccgaagagttggagttcctaaaggtgctaaaggctcacctgttaatgctttgcaaaacaagagagcaccaaaacaagctgagagctttgaagatttgaggagagacgtgttcaatatgttctgttaccttggtcctcacctttctcacgatcccattttatttgcaaaagtggtgcgcataggcaagtcatttatgaaggagtttcagtctgatggaagcaaacaagaagataaagaaaaaacggaagttatccttagctgtttgcttagcattactgaccaggtactacttccatctctttctttgatggactgcaatgcttgtatgtctgaggaactatggggaatgtttaaaacatttccatatcagcatagatatcgtctgtatggccagtggaagaatgaaacttataacagtcacccacttttagtaaaagttaaagctcaaacaatagacagagccaaatatatcatgaagcgcctaaccaaggaaaatgtgaagccttctggaagacaaattgggaagttgagccacagcaatccaaccattttgtttgattatatcttgtcacaaatacagaagtatgataacttaataacacctgtagtagattcattgaaatacctcacttcactgaattatgatgtcttggcctattgtatcattgaagctttagctaatccagaaaaggaaagaatgaaacatgatgacacaaccatctcaagctggcttcagagtctggctagtttctgtggtgcagtttttcgtaaatatccaattgatcttgctggtcttcttcagtatgttgccaatcagctaaaggcgggcaaaagttttgacctgcttatattgaaagaagtggtacaaaaaatggcaggaatagaaattacagaggaaatgacaatggagcaactagaggctatgactggtggagagcagctaaaagctgagggtggttattttggtcagatcagaaacactaaaaaatcctctcagagattaaaggatgctctattggaccatgatcttgcccttcctctctgtctgcttatggctcagcagagaaatggggtaatctttcaggaaggtggagagaaacatttgaaacttgtgggaaagctctatgaccagtgtcatgataccctggtgcagtttggtgggtttttagcatctaatctgagcacagaagattatataaagcgagtgccttcaattgatgtactctgtaatgaatttcatacaccccatgatgcagcatttttcctgtctaggccaatgtatgcccatcatatttcgtcaaagtatgatgaacttaaaaaatcagaaaagggaagtaaacagcaacataaagttcataagtacattacatcatgtgagatggtgatggcgcctgtccatgaagcagtggtctccttacatgtttccaaagtctgggatgacatcagccctcaattctatgctacattctggtcattgacaatgtatgaccttgcagttccacacaccagctatgaacgagaagtcaataaacttaaagtccagatgaaagcaattgatgacaatcaggaaatgcccccaaataaaaagaaaaaagagaaggagcgctgtactgcccttcaggacaagcttcttgaagaagaaaagaaacagatggaacatgtacagagagttctacagagattgaaactggaaaaggacaactggcttttagcaaaatctaccaaaaatgagaccatcacaaaatttctacagctgtgtatatttcctcgatgtattttttcagcaattgatgctgtttactgtgctcgttttgttgaattggtacatcaacagaaaactccaaatttttccacacttctttgctatgatcgagttttctctgacataatttacacagttgcaagctgtactgaaaatgaagccagtcgatacggaaggtttctttgctgcatgttagagactgtgaccaggtggcatagtgatagagccacatatgaaaaggaatgtggaaactatccaggattccttaccatattacgggcaactggatttgatggtggaaataaggctgatcaattagactatgaaaattttcgacatgttgtacataaatggcattacaaactaaccaaggcatcggtacattgccttgaaacaggcgaatatactcacatcaggaatatcttgattgtgctaacaaaaatacttccttggtacccaaaagttttgaatctgggtcaagctttggaaagaagagtacacaaaatctgccaagaagaaaaagagaagaggccagatctatatgcattggctatgggctactctgggcagttgaaaagtagaaagtcatacatgatacctgaaaatgagtttcatcacaaagacccccctccgaggaatgcagttgccagtgtgcaaaatgggcctggtggtgggccttcttcatcatcaataggaagtgcatctaaatcggatgaaagcagtactgaggagactgataaatcaagggagagatctcagtgtggtgtgaaagctgttaataaagcttctagtaccacacctaaagggaattcaagcaatggaaatagtggctctaacagcaacaaagctgttaaagaaaatgacaaagaaaaagggaaagagaaagaaaaagagaaaaaagaaaagactccagctactactccagaggccagggtacttggtaaagatggtaaagaaaaaccaaaggaagagcggccaaataaagatgaaaaagcaagagagaccaaggaaagaacgccgaagtctgacaaagagaaagaaaaattcaagaaggaagaaaaagctaaagatgagaaatttaagaccactgtccccaacgcagaatcaaaatcaactcaagaaagggaaagagagaaggagccatccagagaaagagatatagcaaaggaaatgaaatcaaaggaaaatgttaaaggaggagaaaaaacaccagtttctgggtccttgaaatcacctgttcccagatcagatattccagagcctgaaagggaacaaaaacgccgcaaaattgatactcacccttctccatcacattcctccacagtaaaggacagtctcatcgaactcaaggaatcttcagcaaagctctacattaatcatactcctccaccactgtccaagagtaaggagagagaaatggacaagaaagatttggacaagtcaagggaaagatccagagaaagagagaaaaaagatgaaaaggacaggaaagagcggaaaagggatcactcaaacaacgaccgtgaagtgccaccggacttaaccaagagacgtaaagaggagaatggaacaatgggggtttcaaaacataaaagtgaaagtccttgtgaatctccttatccaaatgagaaagacaaggaaaaaaataagtcaaaatcttcaggcaaagaaaaaggcagtgattcatttaaatctgagaagatggataaaatctcctccggtggcaaaaaggagtccaggcatgataaagaaaagatagaaaagaaagagaaacgggacagttcaggaggaaaggaagagaagaaacatcataagtcctcggacaagcacagataatgaagactttccatc

SEQ ID NO: 190962 - DNA, 3211 bp, Homo sapiens
  Payload ID: 17722
  Gene Name: THO complex 2
  Uniprot ID: Q8NI27
  ENST ID: ENST00000618150
  CDS Start-End: 80-1324
ttttgatttgtgtttgtatatttaaacactttgtgcgactttcagctactctgggcagttgaaaagtagaaagtcatacatgatacctgaaaatgagtttcatcacaaagacccccctccgaggaatgcagttgccagtgtgcaaaatgggcctggtggtgggccttcttcatcatcaataggaagtgcatctaaatcggatgaaagcagtactgaggagactgataaatcaagggagagatctcagtgtggtgtgaaagctgttaataaagcttctagtaccacacctaaagggaattcaagcaatggaaatagtggctctaacagcaacaaagctgttaaagaaaatgacaaagaaaaagggaaagagaaagaaaaagagaaaaaagaaaagactccagctactactccagaggccagggtacttggtaaagatggtaaagaaaaaccaaaggaagagcggccaaataaagatgaaaaagcaagagagaccaaggaaagaacgccgaagtctgacaaagagaaagaaaaattcaagaaggaagaaaaagctaaagatgagaaatttaagaccactgtccccaacgcagaatcaaaatcaactcaagaaagggaaagagagaaggagccatccagagaaagagatatagcaaaggaaatgaaatcaaaggaaaatgttaaaggaggagaaaaaacaccagtttctgggtccttgaaatcacctgttcccagatcagatattccagagcctgaaagggaacaaaaacgccgcaaaattgatactcacccttctccatcacattcctccacagtaaaggacagtctcatcgaactcaaggaatcttcagcaaagctctacattaatcatactcctccaccactgtccaagagtaaggagagagaaatggacaagaaagatttggacaagtcaagggaaagatccagagaaagagagaaaaaagatgaaaaggacaggaaagagcggaaaagggatcactcaaacaacgaccgtgaagtgccaccggacttaaccaagagacgtaaagaggagaatggaacaatgggggtttcaaaacataaaagtgaaagtccttgtgaatctccttatccaaatgagaaagacaaggaaaaaaataagtcaaaatcttcaggcaaagaaaaaggcagtgattcatttaaatctgagaagatggataaaatctcctccggtggcaaaaaggagtccaggcatgataaagaaaagatagaaaagaaagagaaacgggacagttcaggaggaaaggaagagaagaaacatcataagtcctcggacaagcacagataatgaagactttccatcaaggctatggacagaccccctaagccgaaagtctcccagaggaggatgccaaagctccgtgcgtcactctcagaatgatatctcccataattaagagcttctggtgctgtccatttaatgggaatctgctttaagtcagaagatgagtacacaccaccatcctcttgacgagacattccaaagtcactgattttcagaacattattttcacctccaggcagtttcttacagcaaggtccctgtgtatacattttttactcgagatacaccatccagaatcagcatctaatgaaaatttcactgagttttagttcattcttctttctctgaaaggagaggaaatcgcctccaggaaccagttccttaatgacgtagataggccgtctttgtgtgtgaactcctatacttttgacattactgggatgattatattgcttgaggattttggcttctagtaaaaattttaatttcagttcctggggaagacgttcttgacgtgttttaacagcaacagcaattttatcctttaatgtgaccttaaatgtgtcaccaaaatttcccttgcctcttgtaacgtggcacctttatgattgagaacccatttcttattctcctaatggccatactgtgataccatgatgctcttaattggaacattgactttttttttttttgcaatttaaacaattgagataaaattcatataacatcaaatttacctttcacttttttttttttcttttggagaccaagtctcgctgttgtctcccaggctggagtgcagtggcgcgatctcggctcactgtgacctccgcctcctgggttcaagcaattctccttcctcagcctcctgagtagctgggactacaggcgtgcaccaccacgcctggctaatttttgtatttttagtagagataggggtttcaccgtgttagccaggatggtctcgatctcctgacctggtgatccacctgcctcggcctcccaaagtgttgggattataagcgtgagccatgacgcctggcctcaaacttgccatttttaaagtgtacaattcaatggtttttagtatatccactatgttgtgcaagcatcaccgctgtctaattccagagcatttctgtcaccccaaaaagaaactccatgcctattagcagtcactcccagttcttcccttcctcggcccctggaaaccagtaatgtactttctgtctctgtgattttgcctgttttggacatttcatttaaatggaattatgcaataatttgtggccttttgtgtttggctttcacttagcatcatgttctcaaggctcatccatgttgtggcatgtatcagtactgcattcctttttatggctaaatgatgtttcattgtatgagtgtgtaccacattttatttatccattcagcaattaatggacaggaacaatggcttttaagtattaaattgtaagttcaacattaaatgtatccacagttattgataatatcaagattatacatggtgtgaacagaatgctgtgtcgaaatggtatgtaaattatttgtcagcatttcatgtaagtgattattttctaaggacccttctagccctggttttaagaaatatgtgaatgtagtattttcatcaataaagtttaatgcattaagcattagcttaaaatttgaatgaaggcagatgtgaagatatttgccacatgttgtaataatcatgttttgaaattatttcaatatgaagtatttgaaaaatgtcaatacataaaggaaaggaaatgagtataattaagtcaatatatttttaaagcaatttttataatttagcagacactgcatcttaatataagttactattaaaattgtgtccttgtg

SEQ ID NO: 190963 - DNA, 1589 bp, Homo sapiens
  Payload ID: 17723
  Gene Name: THO complex 3
  Uniprot ID: Q96J01
  ENST ID: ENST00000265097
  CDS Start-End: 92-1147
ttccgggcgcatgcgtgcggcagcggcgccaggactgactgcgccgtggaggctgctgcagtgttgtgagttggaagctggggagctcggcatggcggtccccgctgcagccatggggccctcggcgttgggccagagcggccccggctcgatggccccgtggtgctcagtgagcagcggcccgtcgcgctacgtgcttgggatgcaggagctgttccggggccacagcaagacgcgcgagttcctggcgcacagcgccaaggtgcactcggtggcctggagttgcgacgggcgtcgcctagcctcggggtccttcgacaagacggccagcgtcttcttgctggagaaggaccggttggtcaaagaaaacaattatcggggacatggggatagtgtggaccagctttgttggcatccaagtaatcctgacctatttgttacggcgtccggagataaaaccattcgcatctgggatgtgaggactacaaaatgcattgccactgtgaacactaaaggggagaacattaatatctgctggagtcctgatgggcagaccattgctgtaggcaacaaggatgatgtggtgacctttattgatgccaagacacaccgttccaaagcagaagagcagttcaagttcgaggtcaacgaaatctcctggaacaatgacaataatatgttcttcctgacaaatggcaatggttgtatcaacatcctcagctacccagaactgaagcctgtgcagtccatcaacgcccatccttccaactgcatctgtatcaagtttgaccccatggggaagtactttgccacaggaagtgcagatgctttggtcagcctctgggatgtggatgagttagtgtgtgttcggtgcttttccaggctggattggcctgtaagaaccctcagtttcagccatgatgggaaaatgctggcgtcagcatcggaagatcattttattgacattgctgaagtggagacaggggacaaactatgggaggtacagtgtgagtctccgaccttcacagtggcgtggcaccccaaaaggcctctgctggcatttgcctgtgatgacaaagacggcaaatatgacagcagccgggaagccggaactgtgaagctgtttgggcttcctaatgattcttgagaggaggttgtagggagaggaggccccggcagaggtcttccttcatgtggttagtttggtctgttctctcggagttggtgggcaccctaaatatttgtaagttggtataaattgtaaacgtctctggtcaggctgcgcatttcattcttttgctttgtctgtgtattagctctttccattctttgcccccagcatgagttaactcgcgtggactctgcagtgcgagtagtgaccccaccataccttgtcctctggacctcctgtcttctctgcttctgggtgcatggtagactttgtggcatttgatacaacttggacaatacctagtttggagggaggggaatggaagggcatggaagtttttttaaataattaaaaatatatatatataattttgagaattgagcatttaataaactgacttttgttattatggaacttc

SEQ ID NO: 190964 - DNA, 453 bp, Homo sapiens
  Payload ID: 17723
  Gene Name: THO complex 3
  ENST ID: ENST00000432305
  CDS Start-End: 1-227
tggtcagcctctgggatgtggatgagttagtgtgtgttcggtgcttttccaggctggattggcctgtaagaaccctcagtttcagccatgatgggaaaatgctggcgtcagcatcggaagatcattttattgacattgctgaagtggagacagacagagtctcgttctgtcacccagcctggtgtgcagtggttcaagccattctcctgcctcagcctcccaagtagctgggattacaggcgcccaccaccaagcccagctaatttttgtatgttcggtagagacggggtttcaccatgttggccaggctggtctcaaactcctgacctcaagcgacccacccgcctcggcctcccagagttttgcgattacaggcgtgagccaccacgcccagcggaatttcttattctttttgatctatcaaaacaacctcattgttctcaatgactgacc

SEQ ID NO: 190965 - DNA, 602 bp, Homo sapiens
  Payload ID: 17723
  Gene Name: THO complex 3
  ENST ID: ENST00000513006
  CDS Start-End: 61-378
ggactgactgcgccgtggaggctgctgcagtgttgtgagttggaagctggggagctcggcatggcggtccccgctgcagccatggggccctcggcgttgggccagagcggccccggctcgatggccccgtggtgctcagtgagcagcggcccgtcgcgctacgtgcttgggatgcaggagctgttccggggccacagcaagacgcgcgagttcctggcgcacagcgccaaggtgcactcggtggcctggagttgcgacgggcgtcgcctagcctcggggtccttcgacaagacggccagcgtcttcttgctggagaaggaccggttggggagaacattaatatctgctggagtcctgatgggcagaccattgctgtaggcaacaaggatgatgtggtgacctttattgatgccaagacacaccgttccaaagcagaagagcagttcaagttcgaggtcaacgaaatctcctggaacaatgacaataatatgttcttcctgacaaatggcaatggttgtatcaacatcctcagctacccagaactgaagcctgtgcagtccatcaacgcccatccttccaactgcatctgtatcaagtttgac

SEQ ID NO: 190966 - DNA, 1796 bp, Homo sapiens
  Payload ID: 17723
  Gene Name: THO complex 3
  Uniprot ID: Q96J01
  ENST ID: ENST00000513482
  CDS Start-End: 73-1056
gcagcggcgccaggactgactgcgccgtggaggctgctgcagtgttgtgagttggaagctggggagctcggcatggcggtccccgctgcagccatggggccctcggcgttgggccagagcggccccggctcgatggccccgtggtgctcagtgagcagcggcccgtcgcgctacgtgcttgggatgcaggagctgttccggggccacagcaagacgcgcgagttcctggcgcacagcgccaaggtgcactcggtggcctggagttgcgacgggcgtcgcctagcctcggggtccttcgacaagacggccagcgtcttcttgctggagaaggaccggttggtcaaagaaaacaattatcggggacatggggatagtgtggaccagctttgttggcatccaagtaatcctgacctatttgttacggcgtccggagataaaaccattcgcatctgggatgtgaggactacaaaatgcattgccactgtgaacactaaaggggagaacattaatatctgctggagtcctgatgggcagaccattgctgtaggcaacaaggatgatgtggtgacctttattgatgccaagacacaccgttccaaagcagaagagcagttcaagttcgaggtcaacgaaatctcctggaacaatgacaataatatgttcttcctgacaaatggcaatggttgtatcaacatcctcagctacccagaactgaagcctgtgcagtccatcaacgcccatccttccaactgcatctgtatcaagtttgaccccatggggaagtactttgccacaggaagtgcagatgctttggtcagcctctgggatgtggatgagttagtgtgtgttcggtgcttttccaggctggattggcctgtaagaaccctcagtttcagccatgatgggaaaatgctggcgtcagcatcggaagatcattttattgacattgctgaagtggagacaggtaacttcatgagaatctaccgtctttcacctttggcagtcaggacttctcttgtgatctcatctctgcatgtgactacttcaccagcatgatcatgaatgaatttgtctcctttagacaagtatgtttctgttttgactgtcactgccaggtggtgaggaagcaaagagttaagaaataaacaggcaggtctgaggaaagtgatttagaaaaatattttgatttatttaaactttaaactacagagtagaaggaagaaaaaagcaccacttggggtcccactctctaaataccacctgttttaaatgttgtgatatatttctctttatcttttgcctgtatatgaacttgaaaaaatattatttaaaatttgaggaattataaagtttttgctttaaaaacaacagaagctggaaatagaaaaatgggaggagagtattcattttgcaaaagaatttcctcagatttgttttttaatgttgctttattgtttttggaaatctttgacactcttcgtaaaaagattaaaactgtatagaaaacttcgaagaggaaagtaaagaacttgaaattccactatgtaaagaatgcatgcccctgttagtcacgttgtggtgaacattgtccagcatccagccatgcagatccttcatgtaactgcatgtccctgtgacgcggagacactttcctgctcagtgacctgctcttgagttaacccacctgtgctcagaaccggctctgtcctccactggcttgtgggctctctgtgcctgggggttctctgtaaaatgaggtaatagttgtatctatctcatgggattagtaggtggat

SEQ ID NO: 190967 - DNA, 683 bp, Homo sapiens
  Payload ID: 17723
  Gene Name: THO complex 3
  ENST ID: ENST00000505969
  CDS Start-End: 1-169
gcagtccatcaacgcccatccttccaactgcatctgtatcaagtttgaccccatggggaagtactttgccacaggaagtgcagatgctttggtcagcctctgggatgtggatgagttagtgtgtgttcggtgcttttccaggggacaaactatgggaggtacagtgtgagtctccgaccttcacagtggcgtggcaccccaaaaggcctctgctggcatttgcctgtgatgacaaagacggcaaatatgacagcagccgggaagccggaactgtgaagctgtttgggcttcctaatgattcttgagaggaggttgtagggagaggaggccccggcagaggtcttccttcatgtggttagtttggtctgttctctcggagttggtgggcaccctaaatatttgtaagttggtataaattgtaaacgtctctggtcaggctgcgcatttcattcttttgctttgtctgtgtattagctctttccattctttgcccccagcatgagttaactcgcgtggactctgcagtgcgagtagtgaccccaccataccttgtcctctggacctcctgtcttctctgcttctgggtgcatggtagactttgtggcatttgatacaacttggacaatacctagtttggagggaggggaatggaagggcatggaagtttttttaaataattaaaa

SEQ ID NO: 190968 - DNA, 628 bp, Homo sapiens
  Payload ID: 17723
  Gene Name: THO complex 3
  ENST ID: ENST00000514861
  CDS Start-End: 42-542
gtaggagtcacctgtggtgagctggaggttggagcctgtagatggcgtggctctgtggctcacttcctgtggttgtggcagtgacagcgatggagactgcagctcgacaggaatgctacccagaactgaagcctgtgcagtccatcaacgcccatccttccaactgcatctgtatcaagtttgaccccatggggaagtactttgccacaggaagtgcagatgctttggtcagcctctgggatgtggatgagttagtgtgtgttcggtgcttttccaggctggattggcctgtaagaaccctcagtttcagccatgatgggaaaatgctggcgtcagcatcggaagatcattttattgacattgctgaagtggagacaggggacaaactatgggaggtacagtgtgagtctccgaccttcacagtggcgtggcaccccaaaaggcctctgctggcatttgcctgtgatgacaaagacggcaaatatgacagcagccgggaagccggaactgtgaagctgtttgggcttcctaatgattcttgagaggaggttgtagggagaggaggccccggcagaggtcttccttcatgtggttagtttggtctgttctctcggagttggtgggcacc

SEQ ID NO: 190969 - DNA, 250 bp, Homo sapiens
  Payload ID: 17723
  Gene Name: THO complex 3
  ENST ID: ENST00000515016
  CDS Start-End: 1-174
catgatgggaaaatgctggcgtcagcatcggaagatcattttattgacattgctgaagtggagacagtccaacagacacactcagcctcccagaaagcagctggccccctggccaagaggccagtttgcagcatcgtgatcattccaccatctttgctgccatttgaatcttgaatcagctttgtgtacctgtaataaattccacttagccatggcatgtagttttttaaaaatacattgttgaatttga

SEQ ID NO: 190970 - DNA, 642 bp, Homo sapiens
  Payload ID: 17723
  Gene Name: THO complex 3
  ENST ID: ENST00000511062
  CDS Start-End: 1-168
gtggttgtggcagtgacagcgatggagactgcagctcgacaggaatggtcaaagaaaacaattatcggggacatggggatagtgtggaccagctttgttggcatccaagtaatcctgacctatttgttacggcgtccggagataaaaccattcgcatctgggatgtgaggactacaaaatgcattgccactgtgaacactaaaggggagaacattaatatctgctggagtcctgatgggcagaccattgctgtaggcaacaaggatgatgtggtgacctttattgatgccaagacacaccgttccaaagcagaagagcagttcaagttcgaggtcaacgaaatctcctggaacaatgacaataatatgttcttcctgacaaatggcaatggttgtatcaacatcctcagctacccagaactgaagcctgtgcagtccatcaacgcccatccttccaactgcatctgtatcaagtttgaccccatggggaagtactttgccacaggaagtgcagatgctttggtcagcctctgggatgtggatgagttagtgtgtgttcggtgcttttccaggctggattggcctgtaagaaccctcagtttcagccatgatgggaaaatgctggcgtcagcatcggaagatc

SEQ ID NO: 190971 - DNA, 649 bp, Homo sapiens
  Payload ID: 17723
  Gene Name: THO complex 3
  ENST ID: ENST00000514250
  CDS Start-End: 1-42
gtggcagtgacagcgatggagactgcagctcgacaggaatgaactacttcctcaagcctaccaccaacgtgctgctccatcgtctatcaccgctgggccttcctcctcagtcaggcaaactggaaggaacatgagagggaatccggaggatggctgcagcaatgcggatgtaggagaccaagatgagcgcacagggagccaggaacaggaccacggcccccaggaacacatgctgattgacatgtatgtgagcaggcaatcttcatgagcaggtcaaagaaaacaattatcggggacatggggatagtgtggaccagctttgttggcatccaagtaatcctgacctatttgttacggcgtccggagataaaaccattcgcatctgggatgtgaggactacaaaatgcattgccactgtgaacactaaaggggagaacattaatatctgctggagtcctgatgggcagaccattgctgtaggcaacaaggatgatgtggtgacctttattgatgccaagacacaccgttccaaagcagaagagcagttcaagttcgaggtcaacgaaatctcctggaacaatgacaataatatgttcttcctgacaaatggcaatggttgtatcaacatcctcagctacccagaactgaa

SEQ ID NO: 190972 - DNA, 1442 bp, Homo sapiens
  Payload ID: 17723
  Gene Name: THO complex 3
  ENST ID: ENST00000628318
  CDS Start-End: 108-425
agaggggccgtcgctcttccgggcgcatgcgtgcggcagcggcgccaggactgactgcgccgtggaggctgctgcagtgttgtgagttggaagctggggagctcggcatggcggtccccgctgcagccatggggccctcggcgttgggccagagcggccccggctcgatggccccgtggtgctcagtgagcagcggcccgtcgcgctacgtgcttgggatgcaggagctgttccggggccacagcaagacgcgcgagttcctggcgcacagcgccaaggtgcactcggtggcctggagttgcgacgggcgtcgcctagcctcggggtccttcgacaagacggccagcgtcttcttgctggagaaggaccggttggggagaacattaatatctgctggagtcctgatgggcagaccattgctgtaggcaacaaggatgatgtggtgacctttattgatgccaagacacaccgttccaaagcagaagagcagttcaagttcgaggtcaacgaaatctcctggaacaatgacaataatatgttcttcctgacaaatggcaatggttgtatcaacatcctcagctacccagaactgaagcctgtgcagtccatcaacgcccatccttccaactgcatctgtatcaagtttgaccccatggggaagtactttgccacaggaagtgcagatgctttggtcagcctctgggatgtggatgagttagtgtgtgttcggtgcttttccaggctggattggcctgtaagaaccctcagtttcagccatgatgggaaaatgctggcgtcagcatcggaagatcattttattgacattgctgaagtggagacaggggacaaactatgggaggtacagtgtgagtctccgaccttcacagtggcgtggcaccccaaaaggcctctgctggcatttgcctgtgatgacaaagacggcaaatatgacagcagccgggaagccggaactgtgaagctgtttgggcttcctaatgattcttgagaggaggttgtagggagaggaggccccggcagaggtcttccttcatgtggttagtttggtctgttctctcggagttggtgggcaccctaaatatttgtaagttggtataaattgtaaacgtctctggtcaggctgcgcatttcattcttttgctttgtctgtgtattagctctttccattctttgcccccagcatgagttaactcgcgtggactctgcagtgcgagtagtgaccccaccataccttgtcctctggacctcctgtcttctctgcttctgggtgcatggtagactttgtggcatttgatacaacttggacaatacctagtttggagggaggggaatggaagggcatggaagtttttttaaataattaaaaatatatatatataattttgagaattgagcatttaataaactgacttttgttattatgg

SEQ ID NO: 190973 - DNA, 2560 bp, Homo sapiens
  Payload ID: 17724
  Gene Name: THO complex 5
  Uniprot ID: Q13769
  ENST ID: ENST00000397871
  CDS Start-End: 220-2271
gggcagtggggctgggagatggggcggggctgggcgctccgggactgaggtgctgatcgcccaaagggcgcccctgggctggggtctgacccggcttctcctccctcactacccgcggtccccggcctctcggcgctgcgctgttacctcatccgaaaagtgttcgctgcagcatcctcaggcttcacgttggagcctcttgattgtggaggaacaaccatgtcatcagaatcgagcaaaaaacggaagcccaaagtgatccgaagcgatggagccccagctgaaggaaagcggaatcgatctgacaccgagcaggaaggtaaatactacagtgaggaggccgaggtggatctgcgggaccctggcagagactatgagttatacaagtacacctgccaggagctacagaggctgatggctgagatccaagacctgaagagcaggggtggcaaggatgtggcaatagaaatagaagaacggaggatccagagctgtgtgcatttcatgactctaaagaagcttaaccgattagcccacatcaggttgaagaaaggaagagatcagacccacgaggctaagcagaaagtagatgcctatcatctgcagctccagaacctgttgtatgaggtgatgcacctacagaaggagatcaccaaatgtttggagtttaagtcaaagcatgaagaaattgatctggtcagtttagaggagttttataaggaggctccaccagatatcagcaaggccgaagtcaccatgggagaccctcaccagcaaacactggcacgtctggactgggagctggagcagcggaaaaggctggcagagaagtaccgagagtgcctatctaacaaggagaagattctcaaggagattgaggtgaagaaggagtacctgagcagcctccagccccgcctcaacagcatcatgcaggcttcccttccggtgcaggagtacctgtttatgccattcgaccaggctcacaagcagtatgagacagccagacacctgccgcctcccctctatgtcctctttgttcaggccactgcgtatgggcaggcctgtgataagacgttatctgtggcaatcgaaggcagtgtggatgaagccaaggctctgttcaaacctccagaggactcccaagatgacgagagtgactcagatgccgaggaggagcagactacgaagcgccggagacccacactgggggttcagttggacgacaaacgcaaggagatgctgaagaggcacccactgtctgtcatgctcgacctgaagtgcaaagatgacagtgtgcttcacctgactttctactacctcatgaacctcaacatcatgacagtaaaagccaaagtgacaactgccatggagctgatcacccccatcagtgcaggtgacttgctgtctcctgactcagtcctgagttgcttgtatcctggggatcatggaaagaaaactccgaatccagccaatcagtatcagtttgataaagttggcatcctgactttgagcgactatgtacttgagctaggtcacccctatttgtgggtgcagaagctgggtggcctccacttccccaaagagcagccccagcaaacagtgattgctgaccactcgctgagcgccagccacatggagaccaccatgaaacttctgaagaccagggtgcagtcccgcctggccctccacaaacagtttgcatccctagaacatggcattgtgccagttaccagtgattgccagtacctcttccctgccaaggttgtctctcgcctggtgaaatgggtgacagttgcccatgaggattacatggagctgcacttcaccaaagacattgtggatgcgggactggctggggacaccaatctctactacatggcgctcatcgaaaggggcacagccaaactgcaggccgctgtggtgttgaaccctggctactcctccatcccacctgttttccagctctgtttgaactggaaaggggagaaaaccaacagcaacgatgacaacattcgggccatggagggcgaagtcaatgtgtgctacaaggagctgtgtggcccttggcccagccaccagctgttgaccaaccagctgcagcggctgtgtgtgctgctggatgtttacctggagaccgagagccatgacgacagtgtggaggggcccaaggaatttccccaggagaagatgtgtctgcggctcttcaggggtcctagcaggatgaagccatttaaatacaaccatcctcagggattcttcagccatcgctgatctcccgcgcagaccgttgtttcccccaaggcctcaccctgagcactgggcttctgctttctgctctggcccacatgtgactcttgatattctccaaagacaccagccaattaaaaagcgtcacctgaccagtggcctttgtctgtggttcctggcaaggtggctttgcagtctggaagggcaggtgggagctgtgacacagtgtgaaaaagcatttgtagagagactttttctcagcagccaataaaagcagagtggaaaaagattccaattctgcagagagatgctc

SEQ ID NO: 190974 - DNA, 2676 bp, Homo sapiens
  Payload ID: 17724
  Gene Name: THO complex 5
  Uniprot ID: Q13769
  ENST ID: ENST00000397872
  CDS Start-End: 336-2387
gggcagtggggctgggagatggggcggggctgggcgctccgggactgaggtgctgatcgcccaaagggcgcccctgggctggggtctgacccggcttctcctccctcactacccgcggtccccggcctctcggcgctgcgctgttacctcatccgaaaagtgttcgctgcagcatcctcaggcttcacgttggagcctcttgattgtggtgttcagcattatttaagatcacctatgcatcatctgaagccacagtcccaggtcatcttcatcaccttccccagtggaatgcctcctgtgttaaagcccacaacaacccctgtggaggaacaaccatgtcatcagaatcgagcaaaaaacggaagcccaaagtgatccgaagcgatggagccccagctgaaggaaagcggaatcgatctgacaccgagcaggaaggtaaatactacagtgaggaggccgaggtggatctgcgggaccctggcagagactatgagttatacaagtacacctgccaggagctacagaggctgatggctgagatccaagacctgaagagcaggggtggcaaggatgtggcaatagaaatagaagaacggaggatccagagctgtgtgcatttcatgactctaaagaagcttaaccgattagcccacatcaggttgaagaaaggaagagatcagacccacgaggctaagcagaaagtagatgcctatcatctgcagctccagaacctgttgtatgaggtgatgcacctacagaaggagatcaccaaatgtttggagtttaagtcaaagcatgaagaaattgatctggtcagtttagaggagttttataaggaggctccaccagatatcagcaaggccgaagtcaccatgggagaccctcaccagcaaacactggcacgtctggactgggagctggagcagcggaaaaggctggcagagaagtaccgagagtgcctatctaacaaggagaagattctcaaggagattgaggtgaagaaggagtacctgagcagcctccagccccgcctcaacagcatcatgcaggcttcccttccggtgcaggagtacctgtttatgccattcgaccaggctcacaagcagtatgagacagccagacacctgccgcctcccctctatgtcctctttgttcaggccactgcgtatgggcaggcctgtgataagacgttatctgtggcaatcgaaggcagtgtggatgaagccaaggctctgttcaaacctccagaggactcccaagatgacgagagtgactcagatgccgaggaggagcagactacgaagcgccggagacccacactgggggttcagttggacgacaaacgcaaggagatgctgaagaggcacccactgtctgtcatgctcgacctgaagtgcaaagatgacagtgtgcttcacctgactttctactacctcatgaacctcaacatcatgacagtaaaagccaaagtgacaactgccatggagctgatcacccccatcagtgcaggtgacttgctgtctcctgactcagtcctgagttgcttgtatcctggggatcatggaaagaaaactccgaatccagccaatcagtatcagtttgataaagttggcatcctgactttgagcgactatgtacttgagctaggtcacccctatttgtgggtgcagaagctgggtggcctccacttccccaaagagcagccccagcaaacagtgattgctgaccactcgctgagcgccagccacatggagaccaccatgaaacttctgaagaccagggtgcagtcccgcctggccctccacaaacagtttgcatccctagaacatggcattgtgccagttaccagtgattgccagtacctcttccctgccaaggttgtctctcgcctggtgaaatgggtgacagttgcccatgaggattacatggagctgcacttcaccaaagacattgtggatgcgggactggctggggacaccaatctctactacatggcgctcatcgaaaggggcacagccaaactgcaggccgctgtggtgttgaaccctggctactcctccatcccacctgttttccagctctgtttgaactggaaaggggagaaaaccaacagcaacgatgacaacattcgggccatggagggcgaagtcaatgtgtgctacaaggagctgtgtggcccttggcccagccaccagctgttgaccaaccagctgcagcggctgtgtgtgctgctggatgtttacctggagaccgagagccatgacgacagtgtggaggggcccaaggaatttccccaggagaagatgtgtctgcggctcttcaggggtcctagcaggatgaagccatttaaatacaaccatcctcagggattcttcagccatcgctgatctcccgcgcagaccgttgtttcccccaaggcctcaccctgagcactgggcttctgctttctgctctggcccacatgtgactcttgatattctccaaagacaccagccaattaaaaagcgtcacctgaccagtggcctttgtctgtggttcctggcaaggtggctttgcagtctggaagggcaggtgggagctgtgacacagtgtgaaaaagcatttgtagagagactttttctcagcagccaataaaagcagagtggaaaaagattccaattctgcagagagatgctc

SEQ ID NO: 190975 - DNA, 2374 bp, Homo sapiens
  Payload ID: 17724
  Gene Name: THO complex 5
  Uniprot ID: Q13769
  ENST ID: ENST00000397873
  CDS Start-End: 224-2275
cccttccttacttccggttctctatggtgcgcgggcaagctttgctccgcctccggcagtggcttactcccggtgccaggttcttggagctgtgaggtgttcagcattatttaagatcacctatgcatcatctgaagccacagtcccaggtcatcttcatcaccttccccagtggaatgcctcctgtgttaaagcccacaacaacccctgtggaggaacaaccatgtcatcagaatcgagcaaaaaacggaagcccaaagtgatccgaagcgatggagccccagctgaaggaaagcggaatcgatctgacaccgagcaggaaggtaaatactacagtgaggaggccgaggtggatctgcgggaccctggcagagactatgagttatacaagtacacctgccaggagctacagaggctgatggctgagatccaagacctgaagagcaggggtggcaaggatgtggcaatagaaatagaagaacggaggatccagagctgtgtgcatttcatgactctaaagaagcttaaccgattagcccacatcaggttgaagaaaggaagagatcagacccacgaggctaagcagaaagtagatgcctatcatctgcagctccagaacctgttgtatgaggtgatgcacctacagaaggagatcaccaaatgtttggagtttaagtcaaagcatgaagaaattgatctggtcagtttagaggagttttataaggaggctccaccagatatcagcaaggccgaagtcaccatgggagaccctcaccagcaaacactggcacgtctggactgggagctggagcagcggaaaaggctggcagagaagtaccgagagtgcctatctaacaaggagaagattctcaaggagattgaggtgaagaaggagtacctgagcagcctccagccccgcctcaacagcatcatgcaggcttcccttccggtgcaggagtacctgtttatgccattcgaccaggctcacaagcagtatgagacagccagacacctgccgcctcccctctatgtcctctttgttcaggccactgcgtatgggcaggcctgtgataagacgttatctgtggcaatcgaaggcagtgtggatgaagccaaggctctgttcaaacctccagaggactcccaagatgacgagagtgactcagatgccgaggaggagcagactacgaagcgccggagacccacactgggggttcagttggacgacaaacgcaaggagatgctgaagaggcacccactgtctgtcatgctcgacctgaagtgcaaagatgacagtgtgcttcacctgactttctactacctcatgaacctcaacatcatgacagtaaaagccaaagtgacaactgccatggagctgatcacccccatcagtgcaggtgacttgctgtctcctgactcagtcctgagttgcttgtatcctggggatcatggaaagaaaactccgaatccagccaatcagtatcagtttgataaagttggcatcctgactttgagcgactatgtacttgagctaggtcacccctatttgtgggtgcagaagctgggtggcctccacttccccaaagagcagccccagcaaacagtgattgctgaccactcgctgagcgccagccacatggagaccaccatgaaacttctgaagaccagggtgcagtcccgcctggccctccacaaacagtttgcatccctagaacatggcattgtgccagttaccagtgattgccagtacctcttccctgccaaggttgtctctcgcctggtgaaatgggtgacagttgcccatgaggattacatggagctgcacttcaccaaagacattgtggatgcgggactggctggggacaccaatctctactacatggcgctcatcgaaaggggcacagccaaactgcaggccgctgtggtgttgaaccctggctactcctccatcccacctgttttccagctctgtttgaactggaaaggggagaaaaccaacagcaacgatgacaacattcgggccatggagggcgaagtcaatgtgtgctacaaggagctgtgtggcccttggcccagccaccagctgttgaccaaccagctgcagcggctgtgtgtgctgctggatgtttacctggagaccgagagccatgacgacagtgtggaggggcccaaggaatttccccaggagaagatgtgtctgcggctcttcaggggtcctagcaggatgaagccatttaaatacaaccatcctcagggattcttcagccatcgctgatctcccgcgcagaccgttgtttcccccaaggcctcaccctgagcactgggcttctgctttctgctctggcccacatgtgactcttgatattctccaaag

SEQ ID NO: 190976 - DNA, 738 bp, Homo sapiens
  Payload ID: 17724
  Gene Name: THO complex 5
  ENST ID: ENST00000418021
  CDS Start-End: 459-738
aacagagatgacaaaagaccacttgaagagaggttcctaatactagacagatggagagtggcttggctgtttccccctgcatattggggttgaaaacttaaatgtgtagttccagtccttctatgcagagtctctcctgccctccctccttcctgcagtctcaccacgccaccacctccctcgggggcctccgcgctgagcttccggcctctacgcctcgcttccggtcggccgccccttccttacttccggttctctatggtgcgcgggcaagctttgctccgcctccggcagtggcttactcccggtgccaggttcttggagctgtgaggtgttcagcattatttaagatcacctatgcatcatctgaagccacagtcccaggtcatcttcatcaccttccccagtggaatgcctcctgtgttaaagcccacaacaacccctgtggaggaacaaccatgtcatcagaatcgagcaaaaaacggaagcccaaagtgatccgaagcgatggagccccagctgaaggaaagcggaatcgatctgacaccgagcaggaaggtaaatactacagtgaggaggccgaggtggatctgcgggaccctggcagagactatgagttatacaagtacacctgccaggagctacagaggctgatggctgagatccaagacctgaagagcaggggtggcaaggatgtggcaatagaaatagaagaacggaggatccagagctgtgtgc

SEQ ID NO: 190977 - DNA, 786 bp, Homo sapiens
  Payload ID: 17724
  Gene Name: THO complex 5
  ENST ID: ENST00000443089
  CDS Start-End: 1-786
gaaggagatcaccaaatgtttggagtttaagtcaaagcatgaagaaattgatctggtcagtttagaggagttttataaggaggctccaccagatatcagcaaggccgaagtcaccatgggagaccctcaccagcaaacactggcacgtctggactgggagctggagcagcggaaaaggctggcagagaagtaccgagagtgcctatctaacaaggagaagattctcaaggagattgaggtgaagaaggagtacctgagcagcctccagccccgcctcaacagcatcatgcaggcttcccttccggtgcaggagtacctgtttatgccattcgaccaggctcacaagcagtatgagacagccagacacctgccgcctcccctctatgtcctctttgttcaggccactgcgtatgggcaggcctgtgctcatatgaaatcctcccagccccctagacaggataagacgttatctgtggcaatcgaaggcagtgtggatgaagccaaggctctgttcaaacctccagaggactcccaagatgacgagagtgactcagatgccgaggaggagcagactacgaagcgccggagacccacactgggggttcagttggacgacaaacgcaaggagatgctgaagaggcacccactgtctgtcatgctcgacctgaagtgcaaagatgacagtgtgcttcacctgactttctactacctcatgaacctcaacatcatgacagtaaaagccaaagtgacaactgccatggagctgatcacccccatcagtgcagg

SEQ ID NO: 190978 - DNA, 484 bp, Homo sapiens
  Payload ID: 17724
  Gene Name: THO complex 5
  ENST ID: ENST00000414902
  CDS Start-End: 199-330
ggtgcgcgggcaagctttgctccgcctccggcagtggcttactcccggtgccaggttcttggagctgtgaggtgttcagcattatttaagatcacctatgcatcatctgaagccacagtcccaggtcatcttcatcaccttccccagtggaatgcctcctgtgttaaagcccacaacaacccctgtggaggaacaaccatgtcatcagaatcgagcaaaaaacggaagcccaaagtgatccgaagcgatggagccccagctgaaggaaagcggaatcgatctgacaccgagcaggaaggtaaatactacagtgaggaggctgatggctgagatccaagacctgaagagcaggggtggcaaggatgtggcaatagaaatagaagaacggaggatccagagctgtgtgcatttcatgactctaaagaagcttaaccgattagcccacatcaggttgaagaaaggaagagatcagacccacgaggct

SEQ ID NO: 190979 - DNA, 1006 bp, Homo sapiens
  Payload ID: 17724
  Gene Name: THO complex 5
  ENST ID: ENST00000440771
  CDS Start-End: 336-1006
gggcagtggggctgggagatggggcggggctgggcgctccgggactgaggtgctgatcgcccaaagggcgcccctgggctggggtctgacccggcttctcctccctcactacccgcggtccccggcctctcggcgctgcgctgttacctcatccgaaaagtgttcgctgcagcatcctcaggcttcacgttggagcctcttgattgtggtgttcagcattatttaagatcacctatgcatcatctgaagccacagtcccaggtcatcttcatcaccttccccagtggaatgcctcctgtgttaaagcccacaacaacccctgtggaggaacaaccatgtcatcagaatcgagcaaaaaacggaagcccaaagtgatccgaagcgatggagccccagctgaaggaaagcggaatcgatctgacaccgagcaggaaggtaaatactacagtgaggaggccgaggtggatctgcgggaccctggcagagactatgagttatacaagtacacctgccaggagctacagaggctgatggctgagatccaagacctgaagagcaggggtggcaaggatgtggcaatagaaatagaagaacggaggatccagagctgtgtgcatttcatgactctaaagaagcttaaccgattagcccacatcaggttgaagaaaggaagagatcagacccacgaggctaagcagaaagtagatgcctatcatctgcagctccagaacctgttgtatgaggtgatgcacctacagaaggagatcaccaaatgtttggagtttaagtcaaagcatgaagaaattgatctggtcagtttagaggagttttataaggaggctccaccagatatcagcaaggccgaagtcaccatgggagaccctcaccagcaaacactggcacgtctggactgggagctggagcagcggaaaaggctggcagagaagtaccgagagtgcctatctaacaaggagaagattctcaaggagattgaggtgaagaagga

SEQ ID NO: 190980 - DNA, 579 bp, Homo sapiens
  Payload ID: 17724
  Gene Name: THO complex 5
  ENST ID: ENST00000455450
  CDS Start-End: 52-579
ctcatttttctcttgccgccgccacataagaagtgcctttcacctctcgccatgattctgaggcctccccagctatgtgggactgaaggtaaatactacagtgaggaggccgaggtggatctgcgggaccctggcagagactatgagttatacaagtacacctgccaggagctacagaggctgatggctgagatccaagacctgaagagcaggggtggcaaggatgtggcaatagaaatagaagaacggaggatccagagctgtgtgcatttcatgactctaaagaagcttaaccgattagcccacatcaggttgaagaaaggaagagatcagacccacgaggctaagcagaaagtagatgcctatcatctgcagctccagaacctgttgtatgaggtgatgcacctacagaaggagatcaccaaatgtttggagtttaagtcaaagcatgaagaaattgatctggtcagtttagaggagttttataaggaggctccaccagatatcagcaaggccgaagtcaccatgggagaccctcaccagcaaacactggcacgtctggactgggagctggagcag

SEQ ID NO: 190981 - DNA, 3012 bp, Homo sapiens
  Payload ID: 17724
  Gene Name: THO complex 5
  ENST ID: ENST00000442555
  CDS Start-End: 712-1743
aaaaaatcctgggccttgtttgtacagttcatgccaggggtaggaaatacctgaagctttcaaatactgcgttagagttgtgactctgtcctgggcaagtcaggcctaaaatggagaaactggtgatgcactcctcaaaaagccaagtgtaaaatgaggttaatgccctccctgacttgttgccttcactggcgtggcatattatggtaaaaataataattaagaagtaaggttatgcaggcaaatcctctagcgccgaaatcttccccgccgcgctaccaggttctttcgtgttatcttggacataacacaacattaattcaactactcggtggagcgcccactagctgctggacactctcttaggccctgggcacagtgaacgagaagcatgtgtctttgtttttacagtctcaccacgccaccacctccctcgggggcctccgcgctgagcttccggcctctacgcctcgcttccggtcggccgccccttccttacttccggttctctatggtgcgcgggcaagctttgctccgcctccggcagtggcttactcccggtgccaggttcttggagctgtgaggtgttcagcattatttaagatcacctatgcatcatctgaagccacagtcccaggtcatcttcatcaccttccccagtggaatgcctcctgtgttaaagcccacaacaacccctgtggaggaacaaccatgtcatcagaatcgagcaaaaaacggaagcccaaagtgatccgaagcgatggagccccagctgaaggaaagcggaatcgatctgacaccgagcaggaaggtaaatactacagtgaggaggccgaggtggatctgcgggaccctggcagagactatgagttatacaagtacacctgccaggagctacagaggctgatggctgagatccaagacctgaagagcaggggtggcaaggatgtggcaatagaaatagaagaacggaggatccagagctgtgtgcatttcatgactctaaagaagcttaaccgattagcccacatcaggttgaagaaaggaagagatcagacccacgaggctaagcagaaagtagatgcctatcatctgcagctccagaacctgttgtatgaggtgatgcacctacagaaggagatcaccaaatgtttggagtttaagtcaaagcatgaagaaattgatctggtcagtttagaggagttttataaggaggctccaccagatatcagcaaggccgaagtcaccatgggagaccctcaccagcaaacactggcacgtctggactgggagctggagcagcggaaaaggctggcagagaagtaccgagagtgcctatctaacaaggagaagattctcaaggagattgaggtgaagaaggagtacctgagcagcctccagccccgcctcaacagcatcatgcaggcttcccttccggtgcaggagtacctgtttatgccattcgaccaggctcacaagcagtatgagacagccagacacctgccgcctcccctctatgtcctctttgttcaggccactgcgtatgggcaggcctgtgctcatatgaaatcctcccagccccctagacaggataagacgttatctgtggcaatcgaaggcagtgtggatgaagccaaggctctgttcaaacctccagaggactcccaagatgacgagagtgactcagatgccgaggaggagcagactacggtgccgtcctccctagaagcagaagaggtgtgaaagaaggtgctgctgggaggggagtctgacaacccagctagctgaagcagcagaagcgccggagacccacactgggggttcagttggacgacaaacgcaaggagatgctgaagaggcacccactgtctgtcatgctcgacctgaagtgcaaagatgacagtgtgcttcacctgactttctactacctcatgaacctcaacatcatgacagtaaaagccaaagtgacaactgccatggagctgatcacccccatcagtgcaggtgacttgctgtctcctgactcagtcctgagttgcttgtatcctggggatcatggaaagaaaactccgaatccagccaatcagtatcagtttgataaagttggcatcctgactttgagcgactatgtacttgagctaggtcacccctatttgtgggtgcagaagctgggtggcctccacttccccaaagagcagccccagcaaacagtgattgctgaccactcgctgagcgccagccacatggagaccaccatgaaacttctgaagaccagggtgcagtcccgcctggccctccacaaacagtttgcatccctagaacatggcattgtgccagttaccagtgattgccagtacctcttccctgccaaggttgtctctcgcctggtgaaatgggtgacagttgcccatgaggattacatggagctgcacttcaccaaagacattgtggatgcgggactggctggggacaccaatctctactacatggcgctcatcgaaaggggcacagccaaactgcaggccgctgtggtgttgaaccctggctactcctccatcccacctgttttccagctctgtttgaactggaaaggggagaaaaccaacagcaacgatgacaacattcgggccatggagggcgaagtcaatgtgtgctacaaggagctgtgtggcccttggcccagccaccagctgttgaccaaccagctgcagcggctgtgtgtgctgctggatgtttacctggagaccgagagccatgacgacagtgtggaggggcccaaggaatttccccaggagaagatgtgtctgcggctcttcaggggtcctagcaggatgaagccatttaaatacaaccatcctcagggattcttcagccatcgctgatctcccgcgcagaccgttgtttcccccaaggcctcaccctgagcactgggcttctgctttctgctctggcccacatgtgactcttgatattctccaaagacaccagccaattaaaaagcgtcacctgacc

SEQ ID NO: 190982 - DNA, 729 bp, Homo sapiens
  Payload ID: 17724
  Gene Name: THO complex 5
  ENST ID: ENST00000428374
  CDS Start-End: 245-729
gagctgtgaggtgaggaggggacaagggcagtggggctgggagatggggcggggctgggcgctccgggactgaggtgctgatcgcccaaagggcgcccctgggctggggtctgacccggcttctcctccctcactacccgcggtccccggcctctcggcgctgcgctgttacctcatccgaaaagtgttcgctgcagcatcctcaggcttcacgttggagcctcttgattgtggaggaacaaccatgtcatcagaatcgagcaaaaaacggaagcccaaagtgatccgaagcgatggagccccagctgaaggaaagcggaatcgatctgacaccgagcaggaaggtaaatactacagtgaggaggccgaggtggatctgcgggaccctggcagagactatgagttatacaagtacacctgccaggagctacagaggctgatggctgagatccaagacctgaagagcaggggtggcaaggatgtggcaatagaaatagaagaacggaggatccagagctgtgtgcatttcatgactctaaagaagcttaaccgattagcccacatcaggttgaagaaaggaagagatcagacccacgaggctaagcagaaagtagatgcctatcatctgcagctccagaacctgttgtatgaggtgatgcacctacagaaggagatcaccaaatgtttggagtttaagtcaaagcatgaagaaattgatctggtcagttt

SEQ ID NO: 190983 - DNA, 4753 bp, Homo sapiens
  Payload ID: 17724
  Gene Name: THO complex 5
  Uniprot ID: Q13769
  ENST ID: ENST00000490103
  CDS Start-End: 124-2175
gcttccggtcggccgccccttccttacttccggttctctatggtgcgcgggcaagctttgctccgcctccggcagtggcttactcccggtgccaggttcttggagctgtgaggaggaacaaccatgtcatcagaatcgagcaaaaaacggaagcccaaagtgatccgaagcgatggagccccagctgaaggaaagcggaatcgatctgacaccgagcaggaaggtaaatactacagtgaggaggccgaggtggatctgcgggaccctggcagagactatgagttatacaagtacacctgccaggagctacagaggctgatggctgagatccaagacctgaagagcaggggtggcaaggatgtggcaatagaaatagaagaacggaggatccagagctgtgtgcatttcatgactctaaagaagcttaaccgattagcccacatcaggttgaagaaaggaagagatcagacccacgaggctaagcagaaagtagatgcctatcatctgcagctccagaacctgttgtatgaggtgatgcacctacagaaggagatcaccaaatgtttggagtttaagtcaaagcatgaagaaattgatctggtcagtttagaggagttttataaggaggctccaccagatatcagcaaggccgaagtcaccatgggagaccctcaccagcaaacactggcacgtctggactgggagctggagcagcggaaaaggctggcagagaagtaccgagagtgcctatctaacaaggagaagattctcaaggagattgaggtgaagaaggagtacctgagcagcctccagccccgcctcaacagcatcatgcaggcttcccttccggtgcaggagtacctgtttatgccattcgaccaggctcacaagcagtatgagacagccagacacctgccgcctcccctctatgtcctctttgttcaggccactgcgtatgggcaggcctgtgataagacgttatctgtggcaatcgaaggcagtgtggatgaagccaaggctctgttcaaacctccagaggactcccaagatgacgagagtgactcagatgccgaggaggagcagactacgaagcgccggagacccacactgggggttcagttggacgacaaacgcaaggagatgctgaagaggcacccactgtctgtcatgctcgacctgaagtgcaaagatgacagtgtgcttcacctgactttctactacctcatgaacctcaacatcatgacagtaaaagccaaagtgacaactgccatggagctgatcacccccatcagtgcaggtgacttgctgtctcctgactcagtcctgagttgcttgtatcctggggatcatggaaagaaaactccgaatccagccaatcagtatcagtttgataaagttggcatcctgactttgagcgactatgtacttgagctaggtcacccctatttgtgggtgcagaagctgggtggcctccacttccccaaagagcagccccagcaaacagtgattgctgaccactcgctgagcgccagccacatggagaccaccatgaaacttctgaagaccagggtgcagtcccgcctggccctccacaaacagtttgcatccctagaacatggcattgtgccagttaccagtgattgccagtacctcttccctgccaaggttgtctctcgcctggtgaaatgggtgacagttgcccatgaggattacatggagctgcacttcaccaaagacattgtggatgcgggactggctggggacaccaatctctactacatggcgctcatcgaaaggggcacagccaaactgcaggccgctgtggtgttgaaccctggctactcctccatcccacctgttttccagctctgtttgaactggaaaggggagaaaaccaacagcaacgatgacaacattcgggccatggagggcgaagtcaatgtgtgctacaaggagctgtgtggcccttggcccagccaccagctgttgaccaaccagctgcagcggctgtgtgtgctgctggatgtttacctggagaccgagagccatgacgacagtgtggaggggcccaaggaatttccccaggagaagatgtgtctgcggctcttcaggggtcctagcaggatgaagccatttaaatacaaccatcctcagggattcttcagccatcgctgatctcccgcgcagaccgttgtttcccccaaggcctcaccctgagcactgggcttctgctttctgctctggcccacatgtgactcttgatattctccaaagacaccagccaattaaaaagcgtcacctgaccagtggcctttgtctgtggttcctggcaaggtggctttgcagtctggaagggcaggtgggagctgtgacacagtgtgaaaaagcatttgtagagagactttttctcagcagccaataaaagcagagtggaaaaagattccaattctgcagagagatgctcacctcttgtctacgcacaccctatttgtgctttgcggggtgaggtcctcatgatcttgtatttattatcccaagttcctgctgttaagaggtggtaggagaagccaaaggcagcagagcacaaaaagcaaaactcttccctccccacccgctcttcccattagtcctgtcagggttgccgatggacaaattgtctctgatcgttggatgttataaatgtctgacagtgcagtgcaaacagaagacaaactcagttgatccttgaacaactcaggggttaggggcaccaacaccccctgccctgcacagttgaaaaatccgtgtataacttttgactccctaaaaacttaactaatagcctgctgttgaccagtagtatgctattagtagttacttactgctaacatagtcagtacatattttcagtatatattttgtatcttatacactgtattcttacaatacagtaaactagagaaaagaaaatgttataaggaaagtcacaagggggcctgagtgcagtggctcacgtctgtaatcccagcactttgggaggccaaggcgggtggatcacttgaggtcaggagtttgagaccagcctggccgacatggtgaaaccctgtctctactaaaaacatggaaattagccaagcgtggtggcgcatgcctgtagtcccagttactcaggaggctgaggcagaattacttgaacccatgaggcagaggttgcagtaagccaagatcacgctcctgcgctccggcttgggcgagagtgagactccgtctcaaaaataaataaataagaaagccataaggaagaaaatatatatctactattaagtagaagtggatcaccataaaggtcttcacatactgtctcagggttgaatagtctaaggaagaggaggggttggtcttggtgtctcagggatggcagaggcagaaaaagtgggggaggtggagggggaggcaggcaccactgttatttttattgaacaaaatctgtgcagggactcatgactgtaatcctagtactttggaaagctaaggcgggaggatcccttgaggccaggagttcaggtccagcctgggcaacgtagtgagagaccctgtatctacaaaaaatttaaaaatcagccaggtgtggtggtatgcaccaatagtcccagttactcagaaggctgaggtgggcggatgactggagtccaggagttcaaggtagcagtgagctattcatcgtgcctgtactgtactccagcctgggaaacaatgcgagtccctatctctaaaaaattttaaaaaaagaaatctgcatataatagacccacagagtccaaactattgttcagagatcaactgtacttcacagagagtaattctaagtcttacaggatttcatggagatggcgagagtggtgttggagaatcaatcacatacagagatacaggacagtgagaccaggtaacatttgaggagaatattttttttttattgagacagggtcttgctctgttgtccaggctggagtgcagtggcacgaacacagctcactgccgcctcaacctctcctgggttcaagtgatcctcctgcctcagcctcccaagtagctgggaccacaggtgtgtgccaccatttctggctaatttttaaattttttgtagaggcgggatcccactatttttcccaggctggtctcaaactcctgggctcaaatgatcctcccacctcggcctcccaaagtgctaggattataggcatgagccaccacacccggcctgagtagagtctttaaggtaatgacaaaagtgcctcaaaatataattatttgattaagagaagtcttgggaagataggtaacaacctttaaaatgttcataaaattacatcctttgtaatactcctgcaagtcaaagtaaaggatggcatagactattcttggacagttttgtcaaaaagtgtatcttgaccccaccatcagtactccattcttcattttaaaaaataagatgggctgggcacagtggcttacgcctttaatatcagtactttgggaggctggtgggcggatcacctgagatcaggagttcaagaccagcctggccaacatggtgaaaccccgtctctactaaaaatacaaaaattagctgggcatggtggtgcgcgcctgtaatcccagccactcgggaggctgaggcaggagaattgcttgaatccccgaggcggaggttgcactgagccgagatggtgccactgcaccatctggacaacagagcaagactccgtcttgg

SEQ ID NO: 190984 - DNA, 2427 bp, Homo sapiens
  Payload ID: 17724
  Gene Name: THO complex 5
  ENST ID: ENST00000358079
  CDS Start-End: 11-394
aggaacaaccatgtcatcagaatcgagcaaaaaacggaagcccaaagtgatccgaagcgatggagccccagctgaaggaaagcggaatcgatctgacaccgagcaggaaggtaaatactacagtgaggaggccgaggtggatctgcgggaccctggcagagactatgagttatacaagtacacctgccaggagctacagaggctgatggctgagatccaagacctgaagagcaggggtggcaaggatgtggcaatagaaatagaagaacggaggatccagagctgtgtgcatttcatgactctaaagaagcttaaccgattagcccacatcaggttgaagaaaggaagagatcagacccacgaggtagtagttaaaaggctaagcagaaagtagatgcctatcatctgcagctccagaacctgttgtatgaggtgatgcacctacagaaggagatcaccaaatgtttggagtttaagtcaaagcatgaagaaattgatctggtcagtttagaggagttttataaggaggctccaccagatatcagcaaggccgaagtcaccatgggagaccctcaccagcaaacactggcacgtctggactgggagctggagcagcggaaaaggctggcagagaagtaccgagagtgcctatctaacaaggagaagattctcaaggagattgaggtgaagaaggagtacctgagcagcctccagccccgcctcaacagcatcatgcaggcttcccttccggtgcaggagtacctgtttatgccattcgaccaggctcacaagcagtatgagacagccagacacctgccgcctcccctctatgtcctctttgttcaggccactgcgtatgggcaggcctgtgataagacgttatctgtggcaatcgaaggcagtgtggatgaagccaaggctctgttcaaacctccagaggactcccaaggtaatgtggtggttgggattcgtcccccagggacaccaggtcaccatccaagggcagtcctggtctttggagaactagctggactagttctgtgtagcaggaagcttgacttgaatgtcttagcaccctggagtagacaggaaagagagctcacttcccggagtcacaaggtgcggcccgtggatttcagccctgccactcactagctgactgaccccgaggaagatgacgagagtgactcagatgccgaggaggagcagactacgaagcgccggagacccacactgggggttcagttggacgacaaacgcaaggagatgctgaagaggcacccactgtctgtcatgctcgacctgaagtgcaaagatgacagtgtgcttcacctgactttctactacctcatgaacctcaacatcatgacagtaaaagccaaagtgacaactgccatggagctgatcacccccatcagtgcaggtgacttgctgtctcctgactcagtcctgagttgcttgtatcctggggatcatggaaagaaaactccgaatccagccaatcagtatcagtttgataaagttggcatcctgactttgagcgactatgtacttgagctaggtcacccctatttgtgggtgcagaagctgggtggcctccacttccccaaagagcagccccagcaaacagtgattgctgaccactcgctgagcgccagccacatggagaccaccatgaaacttctgaagaccagggtgcagtcccgcctggccctccacaaacagtttgcatccctagaacatggcattgtgccagttaccagtgattgccagtacctcttccctgccaaggttgtctctcgcctggtgaaatgggtgacagttgcccatgaggattacatggagctgcacttcaccaaagacattgtggatgcgggactggctggggacaccaatctctactacatggcgctcatcgaaaggggcacagccaaactgcaggccgctgtggtgttgaaccctggctactcctccatcccacctgttttccagctctgtttgaactggaaaggggagaaaaccaacagcaacgatgacaacattcgggccatggagggcgaagtcaatgtgtgctacaaggagctgtgtggcccttggcccagccaccagctgttgaccaaccagctgcagcggctgtgtgtgctgctggatgtttacctggagaccgagagccatgacgacagtgtggaggggcccaaggaatttccccaggagaagatgtgtctgcggctcttcaggggtcctagcaggatgaagccatttaaatacaaccatcctcagggattcttcagccatcgctgatctcccgcgcagaccgttgtttcccccaaggcctcaccctgagcactgggcttctgctttctgctctggcccacatgtgactcttgatattctccaaagacaccagccaattaaaaagcgtcacct

SEQ ID NO: 190985 - DNA, 1246 bp, Homo sapiens
  Payload ID: 17725
  Gene Name: THO complex 6
  Uniprot ID: Q86W42
  ENST ID: ENST00000253952
  CDS Start-End: 264-1154
agacgggcggcgcgtggcggaaggcaggcttgctcctcggggtgggggagggtatccggcttaagggggctgcggtggacaccacttcttaatgtcgggggtcttcgcggcgctcacctcggctcctagggttcgggacggtacgcaccagccaccttcgcgccgaaggcggtagggcgccacggagaggaaccgctctaggcacgtaaggcctcgtgaggttgcgtcgcgcgcggagcactctgggacttgtagttctggagatggagcgagctgtgccgctcgcggtgcctctgggtcagacagaggtgttccaggccttgcagcggctccatatgaccatcttctcccagagcgtctcaccatgtgggaagtttctggcggctggcaacaattacgggcagattgccatcttcagcttgtcctctgctttgagctcagaagccaaagaggaaagtaagaagccggtggtgactttccaagcccatgatgggcccgtctatagcatggtttccaccgatcgacatctgcttagtgctggggatggggaggtgaaggcctggctttgggcggagatgctcaagaagggctgtaaggagctgtggcgtcgtcagcctccatacaggaccagcctggaagtgcctgagatcaacgctttgctgctggtccccaaggagaattccctcatcctggctgggggagactgtcagttgcacactatggaccttgaaactgggactttcacgagggtcctccggggccacacagactacatccactgcctggcactgcgggaaaggagcccagaggtgctgtcaggtggcgaggatggagctgttcgactttgggacctgcgcacagccaaggaggtccagacgatcgaggtctataagcacgaggagtgctcgaggccccacaatgggcgctggattggatgtttggcaactgattccgactggatggtctgtggagggggcccagccctcaccctctggcacctccgatcctccacacccaccaccatcttccccatccgggcgccacagaagcacgtcaccttctaccaggacctggtcctgacagctgcaggcaacagctgccgggtggatgtcttcaccaacctgggttaccgagccttctccctgtccttctgatctctgacgacacccccagccagctcagggttttagagtgtttttcattttctttttttttttttttttacaataaagtttcaggctttttt

SEQ ID NO: 190986 - DNA, 1419 bp, Homo sapiens
  Payload ID: 17725
  Gene Name: THO complex 6
  Uniprot ID: Q86W42
  ENST ID: ENST00000326266
  CDS Start-End: 297-1322
gggcacagccgcgaggttctgcgcgggcgcggaagacgggcggcgcgtggcggaaggcaggcttgctcctcggggtgggggagggtatccggcttaagggggctgcggtggacaccacttcttaatgtcgggggtcttcgcggcgctcacctcggctcctagggttcgggacggtacgcaccagccaccttcgcgccgaaggcggtagggcgccacggagaggaaccgctctaggcacgtaaggcctcgtgaggttgcgtcgcgcgcggagcactctgggacttgtagttctggagatggagcgagctgtgccgctcgcggtgcctctgggtcagacagaggtgttccaggccttgcagcggctccatatgaccatcttctcccagagcgtctcaccatgtgggaagtttctggcggctggcaacaattacgggcagattgccatcttcagcttgtcctctgctttgagctcagaagccaaagaggaaagtaagaagccggtggtgactttccaagcccatgatgggcccgtctatagcatggtttccaccgatcgacatctgcttagtgctggggatggggaggtgaaggcctggctttgggcggagatgctcaagaagggctgtaaggagctgtggcgtcgtcagcctccatacaggaccagcctggaagtgcctgagatcaacgctttgctgctggtccccaaggagaattccctcatcctggctgggggagactgtcagttgcacactatggaccttgaaactgggactttcacgagggtcctccggggccacacagactacatccactgcctggcactgcgggaaaggagcccagaggtgctgtcaggtggcgaggatggagctgttcgactttgggacctgcgcacagccaaggaggtccagacgatcgaggtctataagcacgaggagtgctcgaggccccacaatgggcgctggattggatgtttggcaactgattccgactggatggtctgtggagggggcccagccctcaccctctggcacctccgatcctccacacccaccaccatcttccccatccgggcgccacagaagcacgtcaccttctaccaggacctgattctgtcagctggccagggccgctgcgtcaaccagtggcagctgagcggggagctgaaggcccaggtgcctggctcctccccagggctgctcagcctcagcctcaaccagcagcctgccgcgcctgagtgcaaggtcctgacagctgcaggcaacagctgccgggtggatgtcttcaccaacctgggttaccgagccttctccctgtccttctgatctctgacgacacccccagccagctcagggttttagagtgtttttcattttctttttttttttttttttacaataaagtttcaggcttttttaccat

SEQ ID NO: 190987 - DNA, 1300 bp, Homo sapiens
  Payload ID: 17725
  Gene Name: THO complex 6
  Uniprot ID: Q86W42
  ENST ID: ENST00000574549
  CDS Start-End: 249-1202
gcgaggttctgcgcgggcgcggaagacgggcggcgcgtggcggaagggttcgggacggtacgcaccagccaccttcgcgccgaaggcggtagggcgccacggagaggaaccgctctaggcacgtaaggcctcgtgaggttgcgtcgcgcgcggagcactctgggacttgtagttctggagatggagcgagctgtgccgctcgcggtgcctctgggtcagaggtgttccaggccttgcagcggctccatatgaccatcttctcccagagcgtctcaccatgtgggaagtttctggcggctggcaacaattacgggcagattgccatcttcagcttgtcctctgctttgagctcagaagccaaagaggaaagtaagaagccggtggtgactttccaagcccatgatgggcccgtctatagcatggtttccaccgatcgacatctgcttagtgctggggatggggaggtgaaggcctggctttgggcggagatgctcaagaagggctgtaaggagctgtggcgtcgtcagcctccatacaggaccagcctggaagtgcctgagatcaacgctttgctgctggtccccaaggagaattccctcatcctggctgggggagactgtcagttgcacactatggaccttgaaactgggactttcacgagggtcctccggggccacacagactacatccactgcctggcactgcgggaaaggagcccagaggtgctgtcaggtggcgaggatggagctgttcgactttgggacctgcgcacagccaaggaggtccagacgatcgaggtctataagcacgaggagtgctcgaggccccacaatgggcgctggattggatgtttggcaactgattccgactggatggtctgtggagggggcccagccctcaccctctggcacctccgatcctccacacccaccaccatcttccccatccgggcgccacagaagcacgtcaccttctaccaggacctgattctgtcagctggccagggccgctgcgtcaaccagtggcagctgagcggggagctgaaggcccaggtgcctggctcctccccagggctgctcagcctcagcctcaaccagcagcctgccgcgcctgagtgcaaggtcctgacagctgcaggcaacagctgccgggtggatgtcttcaccaacctgggttaccgagccttctccctgtccttctgatctctgacgacacccccagccagctcagggttttagagtgtttttcattttctttttttttttttttttacaataaagtttcaggcttttttaccatg

SEQ ID NO: 190988 - DNA, 1360 bp, Homo sapiens
  Payload ID: 17725
  Gene Name: THO complex 6
  Uniprot ID: Q86W42
  ENST ID: ENST00000575576
  CDS Start-End: 342-1295
cgggcgcggaagacgggcggcgcgtggcggaaggcaggcttgctcctcggggtgggggagggtatccggcttaagggggctgcggtggacaccacttcttaatgtcgggggtcttcgcggcgctcacctcggctcctagggttcgggacggtacgcaccagccaccttcgcgccgaaggcggtagggcgccacggagaggaaccgctctaggcacgtaaggcctcgtgaggttgcgtcgcgcgcggagcactctgggacttgtagttctggagatggagcgagctgtgccgctcgcggtgcctctgggtcagaggtgttccaggccttgcagcggctccatatgaccatcttctcccagagcgtctcaccatgtgggaagtttctggcggctggcaacaattacgggcagattgccatcttcagcttgtcctctgctttgagctcagaagccaaagaggaaagtaagaagccggtggtgactttccaagcccatgatgggcccgtctatagcatggtttccaccgatcgacatctgcttagtgctggggatggggaggtgaaggcctggctttgggcggagatgctcaagaagggctgtaaggagctgtggcgtcgtcagcctccatacaggaccagcctggaagtgcctgagatcaacgctttgctgctggtccccaaggagaattccctcatcctggctgggggagactgtcagttgcacactatggaccttgaaactgggactttcacgagggtcctccggggccacacagactacatccactgcctggcactgcgggaaaggagcccagaggtgctgtcaggtggcgaggatggagctgttcgactttgggacctgcgcacagccaaggaggtccagacgatcgaggtctataagcacgaggagtgctcgaggccccacaatgggcgctggattggatgtttggcaactgattccgactggatggtctgtggagggggcccagccctcaccctctggcacctccgatcctccacacccaccaccatcttccccatccgggcgccacagaagcacgtcaccttctaccaggacctgattctgtcagctggccagggccgctgcgtcaaccagtggcagctgagcggggagctgaaggcccaggtgcctggctcctccccagggctgctcagcctcagcctcaaccagcagcctgccgcgcctgagtgcaaggtcctgacagctgcaggcaacagctgccgggtggatgtcttcaccaacctgggttaccgagccttctccctgtccttctgatctctgacgacacccccagccagctcagggttttagagtgtttttcattttcttttttttttttt

SEQ ID NO: 190989 - DNA, 990 bp, Homo sapiens
  Payload ID: 17726
  Gene Name: THO complex 7
  Uniprot ID: Q6I9Y2
  ENST ID: ENST00000295899
  CDS Start-End: 114-728
gcctcctcctccatggctgtttacccggctgcattgtgggagtttgacctccgccgccgccaaccgccgcctcagcttgcgccgccgccgccgccgccgccgccgcgcacgccatgggagccgtgactgacgacgaagttatacggaagcgtctcctcattgatggagatggtgctggagatgatcggagaattaatctgctagtgaagagtttcattaaatggtgcaactctgggtcccaggaagagggatatagccagtaccaacgtatgctgagcacgctgtctcaatgtgaattttcaatgggcaaaactttactagtatatgatatgaatctcagagaaatggaaaattatgaaaaaatttacaaggaaatagaatgtagcatagctggagcacatgaaaaaattgctgagtgcaaaaagcaaattcttcaagcaaaacgaatacgaaaaaatcgccaagaatatgatgctttggcaaaagtgattcagcaccatccagacaggcatgagacattaaaggaactagaggctctgggaaaagaattagagcatctttcacacattaaagaaagtgttgaagataagctggaattgagacggaaacagtttcatgttcttcttagtaccatccatgaacttcagcaaacattggaaaatgatgaaaaactctcagaggtagaagaagctcaggaagcaagcatggaaacagatcctaagccatagacaggctaattgcccaccactcccaggaatattgaaatagctacatgaccataatgtgtttaaaatgtggtatgctcttgagatatttaaagttttggcagtaaaatactctgtttttaagtatgaatgtatttcattcatatttcctctcacaaaggaaaatgacttcagtatagatttgtttttattaaaatgcattttttattcttaagtggtaggaagcaacatccaaaaatgcttaataaaatgcttttaagctgca

SEQ ID NO: 190990 - DNA, 836 bp, Homo sapiens
  Payload ID: 17726
  Gene Name: THO complex 7
  ENST ID: ENST00000469584
  CDS Start-End: 117-575
gtgggagtttgacctccgccgccgccaaccgccgcctcagcttgcgccgccgccgccgccgccgccgccgcgcacgccatgggagccgtgactgacgatatagccagtaccaacgtatgctgagcacgctgtctcaatgtgaattttcaatgggcaaaactttactagtatatgatatgaatctcagagaaatggaaaattatgaaaaaatttacaaggaaatagaatgtagcatagctggagcacatgaaaaaattgctgagtgcaaaaagcaaattcttcaagcaaaacgaatacgaaaaaatcgccaagaatatgatgctttggcaaaagtgattcagcaccatccagacaggcatgagacattaaaggaactagaggctctgggaaaagaattagagcatctttcacacattaaagaaagtgttgaagataagctggaattgagacggaaacagtttcatgttcttcttagtaccatccatgaacttcagcaaacattggaaaatgatgaaaaactctcagaggtagaagaagctcaggaagcaagcatggaaacagatcctaagccatagacaggctaattgcccaccactcccaggaatattgaaatagctacatgaccataatgtgtttaaaatgtggtatgctcttgagatatttaaagttttggcagtaaaatactctgtttttaagtatgaatgtatttcattcatatttcctctcacaaaggaaaatgacttcagtatagatttgtttttattaaaatgcattttttattcttaagtggtaggaagcaacatccaaaaatgcttaataaaatgcttttaagctgc

SEQ ID NO: 190991 - DNA, 459 bp, Homo sapiens
  Payload ID: 17726
  Gene Name: THO complex 7
  ENST ID: ENST00000464327
  CDS Start-End: 280-459
gcgcacgccatgggagccgtgactgacgggaagaaaggcaattcagacaaagcagactgaatatttagtagtagattgtaaatattcaggcaaagaaagagagagagaggcagtaggagttacatcagttttaccatccttgacgaagttatacggaagcgtctcctcattgatggagatggtgctggagatgatcggagaattaatctgctagtgaagagtttcattaaatggtgcaactctgggtcccaggaagagggatatagccagtaccaacgtatgctgagcacgctgtctcaatgtgaattttcaatgggcaaaactttactagtatatgatatgaatctcagagaaatggaaaattatgaaaaaatttacaaggaaatagaatgtagcatagctggagcacatgaaaaaattgctgagtgcaaaaagcaaattcttcaagcaaaacgaata

SEQ ID NO: 190992 - DNA, 490 bp, Homo sapiens
  Payload ID: 17726
  Gene Name: THO complex 7
  ENST ID: ENST00000469153
  CDS Start-End: 1-92
acgaagttatacggaagcgtctcctcattgatggagatggtgctggagatgatcggagaattaatctgctagtgaagagtttcattaaatgatatagccagtaccaacgtatgctgagcacgctgtctcaatgtgaattttcaatgggcaaaactttactagtatatgatatgaatctcagagaaatggaaaattatgaaaaaatttacaaggaaatagaatgtagcatagctggagcacatgaaaaaattgctgagtgcaaaaagcaaattcttcaagcaaaacgaatacgaaaaaatcgccaagaatatgatgctttggcaaaagtgattcagcaccatccagacaggcatgagacattaaaggaactagaggctctgggaaaagaattagagcatctttcacacattaaagaaagtgttgaagataagctggaattgagacggaaacagtttcatgttcttcttagtaccatccatgaacttcagca

SEQ ID NO: 190993 - DNA, 629 bp, Homo sapiens
  Payload ID: 17727
  Gene Name: three prime repair exonuclease 1
  ENST ID: ENST00000456089
  CDS Start-End: 57-584
ggagagtgtgcagccgagtcactactgcctgcctgcctgcctgctacgagctggctatgctgggcctcaccagtgctctggatggtgccttctgtgtggatagcatcactgcgctgaaggccctggagcgagcaagcagcccctcagaacacggcccaaggaagagctatagcctaggcagcatctacactcgcctgtatgggcagtcccctccagactcgcacacggctgagggtgatgtcctggccctgctcagcatctgtcagtggagaccacaggccctgctgcggtgggtggatgctcacgccaggcctttcggcaccatcaggcccatgtatggggtcacagcctctgctaggaccaagccaagaccatctgctgtcacaaccactgcacacctggccacaaccaggaacactagtcccagccttggagagagcaggggtaccaaggatcttcctccagtgaaggaccctggagccctatccagggaggggctgctggccccactgggtctgctggccatcctgaccttggcagtagccacactgtatggactatccctggccacacctggggagtaggccaagaaggaaaatctgacgaataaagacccccgctgccccata

SEQ ID NO: 190994 - DNA, 1105 bp, Homo sapiens
  Payload ID: 17727
  Gene Name: three prime repair exonuclease 1
  ENST ID: ENST00000433541
  CDS Start-End: 533-1060
gcctgtggaattgtcctgagtcattgctttgggctggggccatgggaagaaaccattgtgtggcagggaaggaggtggctcttggcccaggcctaaaccaggaaagcctgggaaactgggacccacagcgagagccgcgggagagtgtgcagccgagtcactactgcctgcctgcctgcctgctacggctcagcagcagcccaaggtcacggagctgtgcctgctggctgtccacagatgtgccctggagagcccccccacctctcaggggccacctcccacagttcctccaccaccgcgtgtggtagacaagctctccctgtgtgtggctccggggaaggcctgcagccctgcagccagcgagatcacaggtctgagcacagctgtgctggcagcgcatgggcgtcaatgttttgatgacaacctggccaacctgctcctagccttcctgcggcgccagccacagccctggtgcctggtggcacacaatggtgaccgctacgacttccccctgctccaagcagagctggctatgctgggcctcaccagtgctctggatggtgccttctgtgtggatagcatcactgcgctgaaggccctggagcgagcaagcagcccctcagaacacggcccaaggaagagctatagcctaggcagcatctacactcgcctgtatgggcagtcccctccagactcgcacacggctgagggtgatgtcctggccctgctcagcatctgtcagtggagaccacaggccctgctgcggtgggtggatgctcacgccaggcctttcggcaccatcaggcccatgtatggggtcacagcctctgctaggaccaagccaagaccatctgctgtcacaaccactgcacacctggccacaaccaggaacactagtcccagccttggagagagcaggggtaccaaggatcttcctccagtgaaggaccctggagccctatccagggaggggctgctggccccactgggtctgctggccatcctgaccttggcagtagccacactgtatggactatccctggccacacctggggagtaggccaagaaggaaaatctgacgaataaagacccccgctgccccata

SEQ ID NO: 190995 - DNA, 1200 bp, Homo sapiens
  Payload ID: 17727
  Gene Name: three prime repair exonuclease 1
  Uniprot ID: Q9NSU2
  ENST ID: ENST00000444177
  CDS Start-End: 243-1157
tgaaagggccgcagcaggggctcccagcagtgtgtaagaccgggagctggtctggcaccactgccctggtccttccagctgcctgtcactggtatgatggccccggtgcattgtgccaccagcaggccacagctgtggatcttggaaggcctctggggtcccccgggagcaggggagtgggtgtgggggggaacggatggtggtgagagggacagaccaggcaggccctgcccccggggcccatgcagaccctcatctttttcgacatggaggccactggcttgcccttctcccagcccaaggtcacggagctgtgcctgctggctgtccacagatgtgccctggagagcccccccacctctcaggggccacctcccacagttcctccaccaccgcgtgtggtagacaagctctccctgtgtgtggctccggggaaggcctgcagccctgcagccagcgagatcacaggtctgagcacagctgtgctggcagcgcatgggcgtcaatgttttgatgacaacctggccaacctgctcctagccttcctgcggcgccagccacagccctggtgcctggtggcacacaatggtgaccgctacgacttccccctgctccaagcagagctggctatgctgggcctcaccagtgctctggatggtgccttctgtgtggatagcatcactgcgctgaaggccctggagcgagcaagcagcccctcagaacacggcccaaggaagagctatagcctaggcagcatctacactcgcctgtatgggcagtcccctccagactcgcacacggctgagggtgatgtcctggccctgctcagcatctgtcagtggagaccacaggccctgctgcggtgggtggatgctcacgccaggcctttcggcaccatcaggcccatgtatggggtcacagcctctgctaggaccaagccaagaccatctgctgtcacaaccactgcacacctggccacaaccaggaacactagtcccagccttggagagagcaggggtaccaaggatcttcctccagtgaaggaccctggagccctatccagggaggggctgctggccccactgggtctgctggccatcctgaccttggcagtagccacactgtatggactatccctggccacacctggggagtaggccaagaaggaaaatctgacgaataaagacccccgctgcccca

SEQ ID NO: 190996 - DNA, 1426 bp, Homo sapiens
  Payload ID: 17727
  Gene Name: three prime repair exonuclease 1
  Uniprot ID: Q9NSU2
  ENST ID: ENST00000629913
  CDS Start-End: 482-1426
ggaagaaaccattgtgtggcagggaaggaggtggctcttggcccaggcctaaaccaggaaagcctgggaaactgggacccacaggtgggcatgaaagggccgcagcaggggctcccagcagtgtgtaagaccgggagctggtctggcaccactgccctggtccttccagctgcctgtcactggtatgatggccccggtgcattgtgccaccagcaggccacagctgtggatcttggaaggcctctggggtcccccgggagcaggggagtgggtgtgggggggaacggatggtggtgagagggacagaccaggcaggctgacgagcagggcgggcctggctcacgtgggcctgtaggcgggcccacgccaagtttcacttcccgccactgctgccagcgagagccgcgggagagtgtgcagccgagtcactactgcctgcctgcctgcctgctacggctcagcagcaggtacgtacccaaccatgggctcgcaggccctgcccccggggcccatgcagaccctcatctttttcgacatggaggccactggcttgcccttctcccagcccaaggtcacggagctgtgcctgctggctgtccacagatgtgccctggagagcccccccacctctcaggggccacctcccacagttcctccaccaccgcgtgtggtagacaagctctccctgtgtgtggctccggggaaggcctgcagccctgcagccagcgagatcacaggtctgagcacagctgtgctggcagcgcatgggcgtcaatgttttgatgacaacctggccaacctgctcctagccttcctgcggcgccagccacagccctggtgcctggtggcacacaatggtgaccgctacgacttccccctgctccaagcagagctggctatgctgggcctcaccagtgctctggatggtgccttctgtgtggatagcatcactgcgctgaaggccctggagcgagcaagcagcccctcagaacacggcccaaggaagagctatagcctaggcagcatctacactcgcctgtatgggcagtcccctccagactcgcacacggctgagggtgatgtcctggccctgctcagcatctgtcagtggagaccacaggccctgctgcggtgggtggatgctcacgccaggcctttcggcaccatcaggcccatgtatggggtcacagcctctgctaggaccaagccaagaccatctgctgtcacaaccactgcacacctggccacaaccaggaacactagtcccagccttggagagagcaggggtaccaaggatcttcctccagtgaaggaccctggagccctatccagggaggggctgctggccccactgggtctgctggccatcctgaccttggcagtagccacactgtatggactatccctggccacacctggggagtag

SEQ ID NO: 190997 - DNA, 1783 bp, Homo sapiens
  Payload ID: 17727
  Gene Name: three prime repair exonuclease 1
  Uniprot ID: Q9NSU2
  ENST ID: ENST00000625293
  CDS Start-End: 629-1738
ccattgtgtggcagggaaggaggtggctcttggcccaggcctaaaccaggaaagcctgggaaactgggacccacaggtgggcatgaaagggccgcagcaggggctcccagcagtgtgtaagaccgggagctggtctggcaccactgccctggtccttccagctgcctgtcactggtatgatggccccggtgcattgtgccaccagcaggccacagctgtggatcttggaaggcctctggggtcccccgggagcaggggagtgggtgtgggggggaacggatggtggtgagagggacagaccaggcaggctgacgagcagggcgggcctggctcacgtgggcctgtaggcgggcccacgccaagtttcacttcccgccactgctgccagcgagagccgcgggagagtgtgcagccgagtcactactgcctgcctgcctgcctgctacggtgagtgtggcccccacaatgggatggcgcagggcaggagggccatgggttcccccaccccagactaagggggcactaggggaggggccgagtcatgtgaagagggagaccctctcagacagtcgaatgtgctggtcccactaaggaaaccacctcaccctctccaacttcctgcctgaaaatgggccctggagctcgcagacagggcaggattgtgcagggaaggcctgagatgtgcttctgcccaccccctaccccactccctccccttcggatcttaacactgggcactcacacacccaccccatgctcctctccaggctcagcagcaggtacgtacccaaccatgggctcgcaggccctgcccccggggcccatgcagaccctcatctttttcgacatggaggccactggcttgcccttctcccagcccaaggtcacggagctgtgcctgctggctgtccacagatgtgccctggagagcccccccacctctcaggggccacctcccacagttcctccaccaccgcgtgtggtagacaagctctccctgtgtgtggctccggggaaggcctgcagccctgcagccagcgagatcacaggtctgagcacagctgtgctggcagcgcatgggcgtcaatgttttgatgacaacctggccaacctgctcctagccttcctgcggcgccagccacagccctggtgcctggtggcacacaatggtgaccgctacgacttccccctgctccaagcagagctggctatgctgggcctcaccagtgctctggatggtgccttctgtgtggatagcatcactgcgctgaaggccctggagcgagcaagcagcccctcagaacacggcccaaggaagagctatagcctaggcagcatctacactcgcctgtatgggcagtcccctccagactcgcacacggctgagggtgatgtcctggccctgctcagcatctgtcagtggagaccacaggccctgctgcggtgggtggatgctcacgccaggcctttcggcaccatcaggcccatgtatggggtcacagcctctgctaggaccaagccaagaccatctgctgtcacaaccactgcacacctggccacaaccaggaacactagtcccagccttggagagagcaggggtaccaaggatcttcctccagtgaaggaccctggagccctatccagggaggggctgctggccccactgggtctgctggccatcctgaccttggcagtagccacactgtatggactatccctggccacacctggggagtaggccaagaaggaaaatctgacgaataaagacccccgctgccccata

SEQ ID NO: 190998 - DNA, 2262 bp, Homo sapiens
  Payload ID: 17728
  Gene Name: three prime repair exonuclease 2
  Uniprot ID: Q9BQ50
  ENST ID: ENST00000330912
  CDS Start-End: 1552-2262
atgggcggggcgcggctcggagcgcgaaacatggcggggcaggacgctggctgcggccgtggcggcgacgactactcagaggacgagggcgacagcagcgtgtccagggcggctgtggaggtgttcgggaagctgaaggacctaaactgccccttcctcgagggtctgtatatcacagagccaaagacaattcaggaactgctgtgcagcccctcagagtaccgcttggagatcctagagtggatgtgtacccgggtctggccctcactgcaggacaggttcagctcactgaaaggggtcccaacagaggtgaagatccaagaaatgacgaagctgggccacgagctgatgctgtgtgcgccagatgaccaggagctcctcaagggctgtgcctgcgcccagaagcagctacacttcatggaccagttgctcgataccatccggagcctgaccattgggtgctccagttgctcgagcctgatggagcacttcgaggacaccagggagaagaacgaggccttgctgggggagctcttctctagcccccacctgcagatgctcctgaatccagagtgcgacccgtggcccctggacatgcagcccctcctcaacaagcagagtgatgactggcagtgggccagtgcctctgccaagtccgaggaggaggagaagctggcggagcttgccaggcagctgcaggagagtgctgccaagttgcacgcgcttagaacggagtactttgcacagcatgagcaaggggctgctgcgggcgcagccgacatcagcaccctagaccagaagctgcgtctggtcacttccgacttccaccagctaatcttggcttttctccaagtctacgacgacgagctgggcgagtgctgccagcgcccaggccctgacctccacccgtgcggccccatcatccaggccacgcaccagaatctgacttcctacagccaaatccccagaggccaacctaaaaagccggctttagttacgatgactacagttcccacgtgcgcaactctgcccttggctcaaggattccgtgatgttcattttggttttctaagcgagaggctccgagccttccaacctctgactggctggtcctgtgagacccctcgatcagggatgctgctgcaagtggtcatggcagttgctgacacctctgcgaaggccgtggagaccgtgaagaagcagcaaggcgagcagatctgctggggtggcagcagctccgtcatgagtctagctaccaagatgaatgaactaatggagaaatagaaagtcttcagtgatggcctacgccaaagcacaggatggggcgggcaggaagccctctcccaagatcgagttggccgaggatggatgattgtggcagcagaagccgttgcagccccacgttgtgctctaggcagctgggggcgggctgcggccgctgattaaaggccgcctagagcagcctgtgtggcgacaggtgcccagaagcccaggaagccggtcagtgcccgccccagtttgaggacttgctatccccgtgggaacatcaccatgtccgaggcaccccgggccgagacctttgtcttcctggacctggaagccactgggctccccagtgtggagcccgagattgccgagctgtccctctttgctgtccaccgctcctccctggagaacccggagcacgacgagtctggtgccctagtattgccccgggtcctggacaagctcacgctgtgcatgtgcccggagcgccccttcactgccaaggccagcgagatcaccggcctgagcagtgagggcctggcgcgatgccggaaggctggctttgatggcgccgtggtgcggacgctgcaggccttcctgagccgccaggcagggcccatctgccttgtggcccacaatggctttgattatgatttccccctgctgtgtgccgagctgcggcgcctgggtgcccgcctgccccgggacactgtctgcctggacacgctgccggccctgcggggcctggaccgcgcccacagccacggcacccgggcccggggccgccagggttacagcctcggcagcctcttccaccgctacttccgggcagagccaagcgcagcccactcagccgagggcgacgtgcacaccctgctcctgatcttcctgcaccgcgccgcagagctgctcgcctgggccgatgagcaggcccgtgggtgggcccacatcgagcccatgtacttgccgcctgatgaccccagcctggaggcctga

SEQ ID NO: 190999 - DNA, 1982 bp, Homo sapiens
  Payload ID: 17728
  Gene Name: three prime repair exonuclease 2
  Uniprot ID: Q9BQ50
  ENST ID: ENST00000334497
  CDS Start-End: 1143-1982
atgggcggggcgcggctcggagcgcgaaacatggcggggcaggacgctggctgcggccgtggcggcgacgactactcagaggacgagggcgacagcagcgtgtccagggcggctgtggaggtgttcgggaagctgaaggacctaaactgccccttcctcgagggtctgtatatcacagagccaaagacaattcaggaactgctgtgcagcccctcagagtaccgcttggagatcctagagtggatgtgtacccgggtctggccctcactgcaggacaggttcagctcactgaaaggggtcccaacagaggtgaagatccaagaaatgacgaagctgggccacgagctgatgctgtgtgcgccagatgaccaggagctcctcaagggctgtgcctgcgcccagaagcagctacacttcatggaccagttgctcgataccatccggagcctgaccattgggtgctccagttgctcgagcctgatggagcacttcgaggacaccagggagaagaacgaggccttgctgggggagctcttctctagcccccacctgcagatgctcctgaatccagagtgcgacccgtggcccctggacatgcagcccctcctcaacaagcagagtgatgactggcagtgggccagtgcctctgccaagtccgaggaggaggagaagctggcggagcttgccaggcagctgcaggagagtgctgccaagttgcacgcgcttagaacggagtactttgcacagcatgagcaaggggctgctgcgggcgcagccgacatcagcaccctagaccagaagctgcgtctggtcacttccgacttccaccagctaatcttggcttttctccaagtctacgacgacgagctgggcgagtgctgccagcgcccaggccctgacctccacccgtgcggccccatcatccaggccacgcaccagaatctgacttcctacagccaactgctgcaagtggtcatggcagttgctgacacctctgcgaaggccgtggagaccgtgaagaagcagcaaggcgagcagatctgctggggtggcagcagctccgtcatgagtctagctaccaagatgaatgaactaatggagaaatagaaagtcttcagtgatggcctacgccaaagcacaggatggggcgggcaggaagccctctcccaagatcgagttggccgaggatggatgattgtggcagcagaagccgttgcagccccacgttgtgctctagtttgaggacttgctatccccgtgggaacatcaccatgtccgaggcaccccgggccgagacctttgtcttcctggacctggaagccactgggctccccagtgtggagcccgagattgccgagctgtccctctttgctgtccaccgctcctccctggagaacccggagcacgacgagtctggtgccctagtattgccccgggtcctggacaagctcacgctgtgcatgtgcccggagcgccccttcactgccaaggccagcgagatcaccggcctgagcagtgagggcctggcgcgatgccggaaggctggctttgatggcgccgtggtgcggacgctgcaggccttcctgagccgccaggcagggcccatctgccttgtggcccacaatggctttgattatgatttccccctgctgtgtgccgagctgcggcgcctgggtgcccgcctgccccgggacactgtctgcctggacacgctgccggccctgcggggcctggaccgcgcccacagccacggcacccgggcccggggccgccagggttacagcctcggcagcctcttccaccgctacttccgggcagagccaagcgcagcccactcagccgagggcgacgtgcacaccctgctcctgatcttcctgcaccgcgccgcagagctgctcgcctgggccgatgagcaggcccgtgggtgggcccacatcgagcccatgtacttgccgcctgatgaccccagcctggaggcctga

SEQ ID NO: 191000 - DNA, 2116 bp, Homo sapiens
  Payload ID: 17728
  Gene Name: three prime repair exonuclease 2
  Uniprot ID: Q9BQ50
  ENST ID: ENST00000338525
  CDS Start-End: 1406-2116
atgggcggggcgcggctcggagcgcgaaacatggcggggcaggacgctggctgcggccgtggcggcgacgactactcagaggacgagggcgacagcagcgtgtccagggcggctgtggaggtgttcgggaagctgaaggacctaaactgccccttcctcgagggtctgtatatcacagagccaaagacaattcaggaactgctgtgcagcccctcagagtaccgcttggagatcctagagtggatgtgtacccgggtctggccctcactgcaggacaggttcagctcactgaaaggggtcccaacagaggtgaagatccaagaaatgacgaagctgggccacgagctgatgctgtgtgcgccagatgaccaggagctcctcaagggctgtgcctgcgcccagaagcagctacacttcatggaccagttgctcgataccatccggagcctgaccattgggtgctccagttgctcgagcctgatggagcacttcgaggacaccagggagaagaacgaggccttgctgggggagctcttctctagcccccacctgcagatgctcctgaatccagagtgcgacccgtggcccctggacatgcagcccctcctcaacaagcagagtgatgactggcagtgggccagtgcctctgccaagtccgaggaggaggagaagctggcggagcttgccaggcagctgcaggagagtgctgccaagttgcacgcgcttagaacggagtactttgcacagcatgagcaaggggctgctgcgggcgcagccgacatcagcaccctagaccagaagctgcgtctggtcacttccgacttccaccagctaatcttggcttttctccaagtctacgacgacgagctgggcgagtgctgccagcgcccaggccctgacctccacccgtgcggccccatcatccaggccacgcaccagaatctgacttcctacagccaactgctgcaagtggtcatggcagttgctgacacctctgcgaaggccgtggagaccgtgaagaagcagcaaggcgagcagatctgctggggtggcagcagctccgtcatgagtctagctaccaagatgaatgaactaatggagaaatagaaagtcttcagtgatggcctacgccaaagcacaggatggggcgggcaggaagccctctcccaagatcgagttggccgaggatggatgattgtggcagcagaagccgttgcagccccacgttgtgctctaggcagctgggggcgggctgcggccgctgattaaaggccgcctagagcagcctgtgtggcgacaggtgcccagaagcccaggaagccggtcagtgcccgccccagtcctcagggtttgtgcctctcgctcggacagtttgaggacttgctatccccgtgggaacatcaccatgtccgaggcaccccgggccgagacctttgtcttcctggacctggaagccactgggctccccagtgtggagcccgagattgccgagctgtccctctttgctgtccaccgctcctccctggagaacccggagcacgacgagtctggtgccctagtattgccccgggtcctggacaagctcacgctgtgcatgtgcccggagcgccccttcactgccaaggccagcgagatcaccggcctgagcagtgagggcctggcgcgatgccggaaggctggctttgatggcgccgtggtgcggacgctgcaggccttcctgagccgccaggcagggcccatctgccttgtggcccacaatggctttgattatgatttccccctgctgtgtgccgagctgcggcgcctgggtgcccgcctgccccgggacactgtctgcctggacacgctgccggccctgcggggcctggaccgcgcccacagccacggcacccgggcccggggccgccagggttacagcctcggcagcctcttccaccgctacttccgggcagagccaagcgcagcccactcagccgagggcgacgtgcacaccctgctcctgatcttcctgcaccgcgccgcagagctgctcgcctgggccgatgagcaggcccgtgggtgggcccacatcgagcccatgtacttgccgcctgatgaccccagcctggaggcctga

SEQ ID NO: 191001 - DNA, 861 bp, Homo sapiens
  Payload ID: 17728
  Gene Name: three prime repair exonuclease 2
  Uniprot ID: Q9BQ50
  ENST ID: ENST00000370212
  CDS Start-End: 22-861
tggcctacgccaaagcacaggatggggcgggcaggaagccctctcccaagatcgagttggccgaggatggatgattgtggcagcagaagccgttgcagccccacgttgtgctctagtttgaggacttgctatccccgtgggaacatcaccatgtccgaggcaccccgggccgagacctttgtcttcctggacctggaagccactgggctccccagtgtggagcccgagattgccgagctgtccctctttgctgtccaccgctcctccctggagaacccggagcacgacgagtctggtgccctagtattgccccgggtcctggacaagctcacgctgtgcatgtgcccggagcgccccttcactgccaaggccagcgagatcaccggcctgagcagtgagggcctggcgcgatgccggaaggctggctttgatggcgccgtggtgcggacgctgcaggccttcctgagccgccaggcagggcccatctgccttgtggcccacaatggctttgattatgatttccccctgctgtgtgccgagctgcggcgcctgggtgcccgcctgccccgggacactgtctgcctggacacgctgccggccctgcggggcctggaccgcgcccacagccacggcacccgggcccggggccgccagggttacagcctcggcagcctcttccaccgctacttccgggcagagccaagcgcagcccactcagccgagggcgacgtgcacaccctgctcctgatcttcctgcaccgcgccgcagagctgctcgcctgggccgatgagcaggcccgtgggtgggcccacatcgagcccatgtacttgccgcctgatgaccccagcctggaggcctga

SEQ ID NO: 191002 - DNA, 1255 bp, Homo sapiens
  Payload ID: 17728
  Gene Name: three prime repair exonuclease 2
  Uniprot ID: Q9BQ50
  ENST ID: ENST00000370231
  CDS Start-End: 545-1255
caccttggtcacactccagagctcgcttcatccccacgagcggcacctgatctccagtgacggggagactgaggcctggcaaagaggacctgttgcctttgtgtaactggccccagcatgggggaggcattggccccagcatgggggaggcattgaccccaggcctgccaggcctggcagccacagcctggctaggtggaggttactgccttccgcaccactctggcttcctccccgtgcctgtgaagagctcggggcctgcttcctaatttgtaaacacggggcgtgtgtctcagtggctgtgagctagcgagggggtggcgagcgagccggctgcgcaggtcctgaggccccaggcctcattgttggccaacaggcagctgggggcgggctgcggccgctgattaaaggccgcctagagcagcctgtgtggcgacaggtgcccagaagcccaggaagccggtcagtgcccgccccagtcctcagggtttgtgcctctcgctcggacagtttgaggacttgctatccccgtgggaacatcaccatgtccgaggcaccccgggccgagacctttgtcttcctggacctggaagccactgggctccccagtgtggagcccgagattgccgagctgtccctctttgctgtccaccgctcctccctggagaacccggagcacgacgagtctggtgccctagtattgccccgggtcctggacaagctcacgctgtgcatgtgcccggagcgccccttcactgccaaggccagcgagatcaccggcctgagcagtgagggcctggcgcgatgccggaaggctggctttgatggcgccgtggtgcggacgctgcaggccttcctgagccgccaggcagggcccatctgccttgtggcccacaatggctttgattatgatttccccctgctgtgtgccgagctgcggcgcctgggtgcccgcctgccccgggacactgtctgcctggacacgctgccggccctgcggggcctggaccgcgcccacagccacggcacccgggcccggggccgccagggttacagcctcggcagcctcttccaccgctacttccgggcagagccaagcgcagcccactcagccgagggcgacgtgcacaccctgctcctgatcttcctgcaccgcgccgcagagctgctcgcctgggccgatgagcaggcccgtgggtgggcccacatcgagcccatgtacttgccgcctgatgaccccagcctggaggcctga

SEQ ID NO: 191003 - DNA, 1864 bp, Homo sapiens
  Payload ID: 17728
  Gene Name: three prime repair exonuclease 2
  Uniprot ID: Q9BQ50
  ENST ID: ENST00000370232
  CDS Start-End: 1025-1864
atgggcggggcgcggctcggagcgcgaaacatggcggggcaggacgctggctgcggccgtggcggcgacgactactcagaggacgagggcgacagcagcgtgtccagggcggctgtggaggtgttcgggaagctgaaggacctaaactgccccttcctcgagggtctgtatatcacagagccaaagacaattcaggaactgctgtgcagcccctcagagtaccgcttggagatcctagagtggatgtgtacccgggtctggccctcactgcaggacaggttcagctcactgaaaggggtcccaacagaggtgaagatccaagaaatgacgaagctgggccacgagctgatgctgtgtgcgccagatgaccaggagctcctcaagggctgtgcctgcgcccagaagcagctacacttcatggaccagttgctcgataccatccggagcctgaccattgggtgctccagttgctcgagcctgatggagcacttcgaggacaccagggagaagaacgaggccttgctgggggagctcttctctagcccccacctgcagatgctcctgaatccagagtgcgacccgtggcccctggacatgcagcccctcctcaacaagcagagtgatgactggcagtgggccagtgcctctgccaagtccgaggaggaggagaagctggcggagcttgccaggcagctgcaggagagtgctgccaagttgcacgcgcttagaacggagtctacgacgacgagctgggcgagtgctgccagcgcccaggccctgacctccacccgtgcggccccatcatccaggccacgcaccagaatctgacttcctacagccaactgctgcaagtggtcatggcagttgctgacacctctgcgaaggccgtggagaccgtgaagaagcagcaaggcgagcagatctgctggggtggcagcagctccgtcatgagtctagctaccaagatgaatgaactaatggagaaatagaaagtcttcagtgatggcctacgccaaagcacaggatggggcgggcaggaagccctctcccaagatcgagttggccgaggatggatgattgtggcagcagaagccgttgcagccccacgttgtgctctagtttgaggacttgctatccccgtgggaacatcaccatgtccgaggcaccccgggccgagacctttgtcttcctggacctggaagccactgggctccccagtgtggagcccgagattgccgagctgtccctctttgctgtccaccgctcctccctggagaacccggagcacgacgagtctggtgccctagtattgccccgggtcctggacaagctcacgctgtgcatgtgcccggagcgccccttcactgccaaggccagcgagatcaccggcctgagcagtgagggcctggcgcgatgccggaaggctggctttgatggcgccgtggtgcggacgctgcaggccttcctgagccgccaggcagggcccatctgccttgtggcccacaatggctttgattatgatttccccctgctgtgtgccgagctgcggcgcctgggtgcccgcctgccccgggacactgtctgcctggacacgctgccggccctgcggggcctggaccgcgcccacagccacggcacccgggcccggggccgccagggttacagcctcggcagcctcttccaccgctacttccgggcagagccaagcgcagcccactcagccgagggcgacgtgcacaccctgctcctgatcttcctgcaccgcgccgcagagctgctcgcctgggccgatgagcaggcccgtgggtgggcccacatcgagcccatgtacttgccgcctgatgaccccagcctggaggcctga

SEQ ID NO: 191004 - DNA, 907 bp, Homo sapiens
  Payload ID: 17728
  Gene Name: three prime repair exonuclease 2
  Uniprot ID: Q9BQ50
  ENST ID: ENST00000393862
  CDS Start-End: 197-907
tggcctacgccaaagcacaggatggggcgggcaggaagccctctcccaagatcgagttggccgaggatggatgattgtggcagcagaagccgttgcagccccacgttgtgctctagtaggtgacaggagtggggctgacgctcccagagccaaaggtcacagtttgaggacttgctatccccgtgggaacatcaccatgtccgaggcaccccgggccgagacctttgtcttcctggacctggaagccactgggctccccagtgtggagcccgagattgccgagctgtccctctttgctgtccaccgctcctccctggagaacccggagcacgacgagtctggtgccctagtattgccccgggtcctggacaagctcacgctgtgcatgtgcccggagcgccccttcactgccaaggccagcgagatcaccggcctgagcagtgagggcctggcgcgatgccggaaggctggctttgatggcgccgtggtgcggacgctgcaggccttcctgagccgccaggcagggcccatctgccttgtggcccacaatggctttgattatgatttccccctgctgtgtgccgagctgcggcgcctgggtgcccgcctgccccgggacactgtctgcctggacacgctgccggccctgcggggcctggaccgcgcccacagccacggcacccgggcccggggccgccagggttacagcctcggcagcctcttccaccgctacttccgggcagagccaagcgcagcccactcagccgagggcgacgtgcacaccctgctcctgatcttcctgcaccgcgccgcagagctgctcgcctgggccgatgagcaggcccgtgggtgggcccacatcgagcccatgtacttgccgcctgatgaccccagcctggaggcctga

SEQ ID NO: 191005 - DNA, 3691 bp, Homo sapiens
  Payload ID: 17729
  Gene Name: threonine synthase-like 1
  Uniprot ID: Q8IYQ7
  ENST ID: ENST00000376356
  CDS Start-End: 251-2482
actgcgcgggggcgggaccggggagctagctgcagactccacgttttgcaaagatcggttttgcctcagagtcaacaaactcttcagattggttccggtgtgtcctatgtttacaagtcagtggaaattaagcacaacacatataaattgaaaagtcaaataaggaaatgaattacctcccttgacggctctaattttacttggctaaagccaatttttaggttggcttgggcagaaaagtgaaaagagaatgctccactttaaccgatgtcatcatctgaaaaagataacacagaaatgtttttctagtatacatgttaaaacggataaacatgcacagcgatttctttcaagaacctttgcacttgcggaattgaggaagtcatggtattcaacccactctcttgttggagacaaaaatattatcctgatgggacctcctggtgctgggaaaacaacagtaggcagaataataggtcagaaactaggttgttgtgtcatagatgtggatgatgatatccttgaaaaaacctggaatatgagtgtgtctgaaaaattacaggatgttggtaatgagcaatttttagaagaggaaggaaaagctgtgttaaacttctctgcatctggaagtgtgatttcccttactgggtccaatccaatgcatgatgctagcatgtggcatctgaagaaaaatggaataattgtatacctggatgtacctctactagatctaatttgtcgtctaaaattaatgaagacagataggattgtaggtcagaattctggaacatctatgaaagacttacttaaatttagaagacagtattataagaagtggtatgatgctcgtgttttctgtgaaagtggggcttccccagaggaggtagctgacaaagtgctgaatgcaattaaaagataccaagatgtggactcggaaacattcatttcaacaagacacgtttggcctgaagactgtgaacagaaggtttcagcaaaattctttagtgaagctgtaattgaggggttggcttctgatggtggcctctttgttcctgcaaaggagtttccaaaattaagctgcggggagtggaaaagcctagtaggagcaacctacgtagaaagagcacagatactgttggaaagatgtatccatcctgcagacatacctgctgccaggttgggagaaatgattgaaactgcttatggggaaaactttgcctgctcaaaaattgctcctgtcaggcacctttcaggcaaccagttcatcctggagttgtttcatggaccaacaggatcatttaaagatttgtctttacagcttatgcctcatatttttgcacactgtatcccaccaagttgcaattatatgatacttgtagctacttcaggagacacagggagtgcagtcttaaatggttttagtcgtctaaataagaatgataagcaaaggatagctgtggttgcattttttcctgagaatggagtaagtgattttcaaaaagcacaaataattggcagtcagagagaaaatggatgggcagtgggtgttgagtcagattttgatttttgccagacagctataaaaagaatttttaatgattctgattttactggctttcttactgtggaatatggaacaatcttaagttcggctaactccataaactggggccgactacttccgcaggtagtttatcatgcttccgcatatcttgatcttgttagtcaaggatttatttcttttggaagcccagtcgatgtctgtattcccacaggaaactttggtaacattttagcagcagtgtatgccaaaatgatgggaatcccgattcgaaaatttatctgtgcctctaatcagaaccatgttttgactgattttataaaaacaggacattatgatctaagggaaagaaaactagcacaaaccttttcaccgtcaatagatattctcaaatcttcaaacctagaacgacatttacacttgatggctaataaagatggacagctaatgacagaattatttaatcgattagaaagtcagcatcatttccagatagaaaaggctctagttgagaaacttcagcaggattttgtagctgactggtgctctgagggagagtgcctagcagctattaactccacctataatacttcagggtatattttggatccacacactgctgttgcaaaagtggttgcagatagggtgcaagacaaaacttgccctgtgattatctcatctacagcccattactcaaagtttgcacctgctatcatgcaggctttaaagattaaagaaatcaatgagacttcatcaagtcagctctatttgctgggttcatacaatgcattacctccactgcatgaggctttattagagagaacaaaacagcaagagaagatggagtaccaggtctgtgcagctgatatgaatgtcttgaagagtcatgtggaacaacttgtccaaaatcaattcatatgaaagctttcagagtaaatttttttttctagctataagcatgcaataataaatctcaaacactgatttggagtacagtagcattttgtcttttatgtaaatatctctatatctgtttggaatttcaaaagtctgatctctagggctgacatgagaactccatgtcacctcctcagatctttaatctggaagtgacaaaaggtaacacagtgcacggacctttgagctatcatacttttgccttctgctcatgaggggtgtatcaatttccactcccacaccctcactgttatgtggaccaaaatgtctggtatactatttggcgattaaaatatttaagcccagttttcaggtactacatctgtaactagtgaatactctgttgattagaaagttaatttaccactcaaaatggctaacttgaatggaggaagtagtaaactcttctattaggatttgggccagtgttttttgtttgttttttggtgcagtttcagctcactgcaacctccgcctcccaggttcaagtgattctcctgcctcagcctcccaggtagctgggattacaggcatgcaacaccacacatggctaatttttttatttttaatagagatgaggtttcgccatgttttccaggctgatcttgaacctctgacctcaggtgatccatccacctcggcctcccaaagtgctaggattacaggcgtgagcctctgcacctggctagggccagtgtttttaaccctcctcaaattccattttggactacaactaatgtgtatctcacactgtccaaattaaagatgtactctgtccttcactctcctttggatgtgtacggttagggtgacgatgtttgaaaatcaacacataactgaaatccaggatgaaacagtaagcagaactacttagaagtgaatacagaaatgatctatttcaagaggaaggttttccaaaattaagagtacttgagtagtctcaataggagtgtatttgtagacagcagtttccctatattatttggagtcaattcttacgtaatttgttgtttatttcttcagtgaacattgtctttttctggcagctgaaactgcacacaactgatacacatatttaatttgtattcctttgtagtaatacattttaaccatgatttatgtttgtgaatttactggatgttttctttctgaattaaagattgtcaagaccaa

SEQ ID NO: 191006 - DNA, 3788 bp, Homo sapiens
  Payload ID: 17729
  Gene Name: threonine synthase-like 1
  Uniprot ID: Q8IYQ7
  ENST ID: ENST00000524413
  CDS Start-End: 348-2579
actgcgcgggggcgggaccggggagctagctgcaggtacggtgctccgtctcctgtggaggctttagcggctcgtggacactgctcccccatttcctttcatttcccccgtcttctcagtgagatttccttgactccacgttttgcaaagatcggttttgcctcagagtcaacaaactcttcagattggttccggtgtgtcctatgtttacaagtcagtggaaattaagcacaacacatataaattgaaaagtcaaataaggaaatgaattacctcccttgacggctctaattttacttggctaaagccaatttttaggttggcttgggcagaaaagtgaaaagagaatgctccactttaaccgatgtcatcatctgaaaaagataacacagaaatgtttttctagtatacatgttaaaacggataaacatgcacagcgatttctttcaagaacctttgcacttgcggaattgaggaagtcatggtattcaacccactctcttgttggagacaaaaatattatcctgatgggacctcctggtgctgggaaaacaacagtaggcagaataataggtcagaaactaggttgttgtgtcatagatgtggatgatgatatccttgaaaaaacctggaatatgagtgtgtctgaaaaattacaggatgttggtaatgagcaatttttagaagaggaaggaaaagctgtgttaaacttctctgcatctggaagtgtgatttcccttactgggtccaatccaatgcatgatgctagcatgtggcatctgaagaaaaatggaataattgtatacctggatgtacctctactagatctaatttgtcgtctaaaattaatgaagacagataggattgtaggtcagaattctggaacatctatgaaagacttacttaaatttagaagacagtattataagaagtggtatgatgctcgtgttttctgtgaaagtggggcttccccagaggaggtagctgacaaagtgctgaatgcaattaaaagataccaagatgtggactcggaaacattcatttcaacaagacacgtttggcctgaagactgtgaacagaaggtttcagcaaaattctttagtgaagctgtaattgaggggttggcttctgatggtggcctctttgttcctgcaaaggagtttccaaaattaagctgcggggagtggaaaagcctagtaggagcaacctacgtagaaagagcacagatactgttggaaagatgtatccatcctgcagacatacctgctgccaggttgggagaaatgattgaaactgcttatggggaaaactttgcctgctcaaaaattgctcctgtcaggcacctttcaggcaaccagttcatcctggagttgtttcatggaccaacaggatcatttaaagatttgtctttacagcttatgcctcatatttttgcacactgtatcccaccaagttgcaattatatgatacttgtagctacttcaggagacacagggagtgcagtcttaaatggttttagtcgtctaaataagaatgataagcaaaggatagctgtggttgcattttttcctgagaatggagtaagtgattttcaaaaagcacaaataattggcagtcagagagaaaatggatgggcagtgggtgttgagtcagattttgatttttgccagacagctataaaaagaatttttaatgattctgattttactggctttcttactgtggaatatggaacaatcttaagttcggctaactccataaactggggccgactacttccgcaggtagtttatcatgcttccgcatatcttgatcttgttagtcaaggatttatttcttttggaagcccagtcgatgtctgtattcccacaggaaactttggtaacattttagcagcagtgtatgccaaaatgatgggaatcccgattcgaaaatttatctgtgcctctaatcagaaccatgttttgactgattttataaaaacaggacattatgatctaagggaaagaaaactagcacaaaccttttcaccgtcaatagatattctcaaatcttcaaacctagaacgacatttacacttgatggctaataaagatggacagctaatgacagaattatttaatcgattagaaagtcagcatcatttccagatagaaaaggctctagttgagaaacttcagcaggattttgtagctgactggtgctctgagggagagtgcctagcagctattaactccacctataatacttcagggtatattttggatccacacactgctgttgcaaaagtggttgcagatagggtgcaagacaaaacttgccctgtgattatctcatctacagcccattactcaaagtttgcacctgctatcatgcaggctttaaagattaaagaaatcaatgagacttcatcaagtcagctctatttgctgggttcatacaatgcattacctccactgcatgaggctttattagagagaacaaaacagcaagagaagatggagtaccaggtctgtgcagctgatatgaatgtcttgaagagtcatgtggaacaacttgtccaaaatcaattcatatgaaagctttcagagtaaatttttttttctagctataagcatgcaataataaatctcaaacactgatttggagtacagtagcattttgtcttttatgtaaatatctctatatctgtttggaatttcaaaagtctgatctctagggctgacatgagaactccatgtcacctcctcagatctttaatctggaagtgacaaaaggtaacacagtgcacggacctttgagctatcatacttttgccttctgctcatgaggggtgtatcaatttccactcccacaccctcactgttatgtggaccaaaatgtctggtatactatttggcgattaaaatatttaagcccagttttcaggtactacatctgtaactagtgaatactctgttgattagaaagttaatttaccactcaaaatggctaacttgaatggaggaagtagtaaactcttctattaggatttgggccagtgttttttgtttgttttttggtgcagtttcagctcactgcaacctccgcctcccaggttcaagtgattctcctgcctcagcctcccaggtagctgggattacaggcatgcaacaccacacatggctaatttttttatttttaatagagatgaggtttcgccatgttttccaggctgatcttgaacctctgacctcaggtgatccatccacctcggcctcccaaagtgctaggattacaggcgtgagcctctgcacctggctagggccagtgtttttaaccctcctcaaattccattttggactacaactaatgtgtatctcacactgtccaaattaaagatgtactctgtccttcactctcctttggatgtgtacggttagggtgacgatgtttgaaaatcaacacataactgaaatccaggatgaaacagtaagcagaactacttagaagtgaatacagaaatgatctatttcaagaggaaggttttccaaaattaagagtacttgagtagtctcaataggagtgtatttgtagacagcagtttccctatattatttggagtcaattcttacgtaatttgttgtttatttcttcagtgaacattgtctttttctggcagctgaaactgcacacaactgatacacatatttaatttgtattcctttgtagtaatacattttaaccatgatttatgtttgtgaatttactggatgttttctttctgaattaaagattgtcaagaccaa

SEQ ID NO: 191007 - DNA, 3649 bp, Homo sapiens
  Payload ID: 17730
  Gene Name: threonine synthase-like 2
  Uniprot ID: Q86YJ6
  ENST ID: ENST00000324166
  CDS Start-End: 1692-3146
attttctttcgctgtaccttactgccttgctcgctcctgccctcactcctgcgatggtttctttggcagctcagtcgtagcgtttaagtctggtcctatgaaggcctttctgttactccacggtcttgggcagtttgcgttggctctaactcttaccacagaattgcagaaattcctctctttattgagggcaccgctagcacctgccccccgaccctggttctgttttgtgaaatactgcctgctttgcttatccactgcagttaacttttggagttacccatatttcatctctttgacatggactcccatacggagtgaccttgtatcctaggttgccagagagagagttctggcttataccattgtcccagcataatcactttcaaaagattcatggtttgtatgatcaagtttgtctctgtctctaagtgagatacacttaatatttgtagttaagagagtggcacgtggcagcccacgtgagacttgcacgggggcccacagatgtcagagccacagactaggaaatgagaattcctccaggtcagtgctcatatgcctcatgtaggtagagagctttgggtggctttgcccttagagggcaggggatcccctcccaccctggcacagaaagtccaagctaatactgagagctatgtctagtcaaattcatccccatagttactgtggggcgtcaaagccagggcccctaaattcactgtcatgatccagaagaaggtgttcagagttcaagcccagctccttgacatggcatctggctcctgggaaagtaactgatgtggaagtgtgaccagtgttaggcctaaggggtcctgggcttccccaggaaccagagaactcagtccatgcagggccagttagttttaaagactgcatatcagcacttataacggtcctaggattaggctaagaggtagaacactggttatccactaggatgaccaaccatcttagtttgcctgggattgaggggtttcctaggacatgggacttgcagttttaagaccagaaaactcctgggcgaactgggatgagttggtcaccctcttctcaaccctggctgcacgttagactctcttgaggagcctctcatttagagtctaatttaattgattcaggtagttgtattttttttaacgctctgaggttgattccaacaagctaccacagttgagaactactaggctgtagacagtgtttccaataaccattgaagatgtttggtttttgagcagaagtggaccgagacgtccctgaaaggggtgtatgactctgtgcgttggtctttcgccttagcaagagggatatcaagctggcagttgcctactattgctattatctgtccccaccgccaggccttctttctcattggtgaggaccaagctttctcttttcccggcatgctccgataccctctccctgaagacaggaggtcagtggaattgcctcattttgattggtggaatcatgatttacacagttgtagatgaagctggcatgagacttgatacaggactgccatctctaggtctgggacatgtgccccggagactggtggtctagaggctaactgtgagactgtgtgtgctttggctttgcccggtggggtgtgggagcttggagaccaggtgcttctgggactgtcctctctgcaggcctccaggatcatgtggtatgtcagcaccaggggcgtagccccacgggtcaactttgagggggccctcttctctggctatgcacctgacgggggcctctttatgcctgaagagctcccacagttggacagagggaccctgtgccagtggagcacactctcctatcctggcctggtgaaggagctgtgtgccctcttcattggctctgagctccttccaaaagatgaattaaatgatctgatcgaccgagccttcagcagattccgtcacagagaagtggtccatctgtccaggttgaggaatgggctgaacgtgttggagctgtggcatggcgtcacatatgcatttaaggacctgtccctgtcctgcacaacacagttcctgcagtacttcctggagaagagggagaagcacgtcactgtggttgtaggaacatctggggacacaggaagtgctgccattgagagtgttcaaggggcaaagaacatggacattatcgttctgctgcccaaaggtcactgcacaaagattcaggagctccagatgacaacggtgctgaagcagaacgtacatgtgtttggagtggagggaaacagcgatgagctcgatgagccgatcaagactgtgtttgccgatgtggcttttgtcaagaagcacaatctgatgagcctgaattcgatcaactggtcccgggtcctggtgcagatggcccatcacttctttgcttacttccagtgtacgccatccttggacacacatcccctacccctggtggaggtggttgtgccaacaggggctgccggtaaccttgcagctgggtacattgctcaaaagataggcctgcccatccgtctggtcgtggcagtgaaccgcaatgacatcatccacaggactgtccagcagggagacttctctctctctgaggctgttaaatcaaccttggcatcagctatggacattcaggtgccctacaacatggagagggtgttctggctgctctctggctctgacagccaggtgacaagagccctcatggagcagtttgaaaggacccaaagtgtgaatctgcccaaggaactgcacagcaagctttcagaggcagtgacatccgtgtcagtgtcggatgaagccatcacccagaccatgggccgctgctgggatgagaaccagtacttgctgtgcccccactcagcggtggccgtgaactaccattaccagcagatagacaggcagcagcccagcactccccggtgctgcctcgcccctgcctctgcagccaagttcccggaagctgtcctggctgctggcctgacccctgagactcccgcggagatcgtagccctggagcacaaggagacacgctgcaccctgatgcggagaggtgacaactggatgctgatgcttcgggacaccattgaggaccttagccgacagtggaggagtcatgccctcaacacctcccagtagcctggctggaggtggctttctttaggcttcagatcccaggaagatgcaccttctgagctgccttgtgcaccctccccattaagcgtaggttaggaggtttccgggaggctgctcagctggatctggagccagctggctttgctccgttccctggctagtctgtgcctggtcaccagggaggctgagtgaggggctgtgaacagttgccggaagcaccccctccctccccggcccgtgcagcagtgtctgagctgtagtgaaagtttcagggcctgcaaaagaagaggcttgggcacaggactgaccatggctccaggggtttaggaccccagacctgtgaaggtgggagcagctcaccaccttcacgcaggctttgtatgttctctgagccttagttgattttggcccccaaaccaaatccaaaggttctggcccaccttgtcagaggcttccaccctgctcacatgttgggaatccctggaataaaatgcttgttcagtgtg

SEQ ID NO: 191008 - DNA, 2052 bp, Homo sapiens
  Payload ID: 17730
  Gene Name: threonine synthase-like 2
  Uniprot ID: Q86YJ6
  ENST ID: ENST00000343544
  CDS Start-End: 72-1289
tgctgcgcaccgggcctcgcgccccgcgccccgcgccccgcgccccgcgccccgcaccggcctccaggatcatgtggtatgtcagcaccaggggcgtagccccacgggtcaactttgagggggccctcttctctggctatgcacctgacgggggcctctttatgcctgaagagctcccacagttggacagagggaccctgtgccagtggagcacactctcctatcctggcctggtgaaggagctgtgtgccctcttcattggctctgagctccttccaaaagatgaattaaatgatctgatcgaccgagccttcagcagattccgtcacagagaagtggtccatctgtccaggttgaggaatgggctgaacgtgttggagctgtggcatggcgtcacatatgcatttaaggacctgtccctgtcctgcacaacacagttcctgcagtacttcctggagaagagggagaagcacgtcactgtggttgtaggaacatctggggacacaggaagtgctgccattgagagtgttcaaggggcaaagaacatggacattatcgttctgctgcccaaaggtcactgcacaaagattcaggagctccagatgacaacggtgctgaagcagaacgtacatgtgtttggagtggagggaaacagcgatgagctcgatgagccgatcaagactgtgtttgccgatgtggcttttgtcaagaagcacaatctgatgagcctgaattcgatcaactggtcccgggtcctggtgcagatggcccatcacttctttgcttacttccagtgtacgccatccttggacacacatcccctacccctggtggaggtggttgtgccaacaggggctgccggtaaccttgcagctgggtacattgctcaaaagataggcctgcccatccgtctggtcgtggcagtgaaccgcaatgacatcatccacaggactgtccagcagggagacttctctctctctgaggctgttaaatcaaccttggcatcagctatggacattcaggtgccctacaacatggagagggtgttctggctgctctctggctctgacagccaggtgacaagagccctcatggagcagtttgaaaggacccaaagtgtgaatctgcccaaggaactgcacagcaagtgggagagacaggactacgaaaaaatggctgtaatggagtgtgatgggtgctgtgtggaactgtgccttggaaactgtgggcccagaagagggagcgtgacagatatcccagggacagccatggtcagaggtggtggctgagctggcctccaaccaggaggagcagtttgccagcactccccggtgctgcctcgcccctgcctctgcagccaagttcccggaagctgtcctggctgctggcctgacccctgagactcccgcggagatcgtagccctggagcacaaggagacacgctgcaccctgatgcggagaggtgacaactggatgctgatgcttcgggacaccattgaggaccttagccgacagtggaggagtcatgccctcaacacctcccagtagcctggctggaggtggctttctttaggcttcagatcccaggaagatgcaccttctgagctgccttgtgcaccctccccattaagcgtaggttaggaggtttccgggaggctgctcagctggatctggagccagctggctttgctccgttccctggctagtctgtgcctggtcaccagggaggctgagtgaggggctgtgaacagttgccggaagcaccccctccctccccggcccgtgcagcagtgtctgagctgtagtgaaagtttcagggcctgcaaaagaagaggcttgggcacaggactgaccatggctccaggggtttaggaccccagacctgtgaaggtgggagcagctcaccaccttcacgcaggctttgtatgttctctgagccttagttgattttggcccccaaaccaaatccaaaggttctggcccaccttgtcagaggcttccaccctgctcacatgttgggaatccctggaataaaatgcttgttcagtgtga

SEQ ID NO: 191009 - DNA, 1560 bp, Homo sapiens
  Payload ID: 17730
  Gene Name: threonine synthase-like 2
  ENST ID: ENST00000377254
  CDS Start-End: 219-899
cactgcgaagctgagaaccctagctccggccccgaccggaagccccaccgcaccgtcagggacgcggactcgggagtgcgcacattcgcagcccgggcagccctgctgcgcaccgggcctcgcgccccgcgccccgcgccccgcgccccgcgccccgcaccggaacatctggggacacaggaagtgctgccattgagagtgttcaaggggcaaagaacatggacattatcgttctgctgcccaaaggtcactgcacaaagattcaggagctccagatgacaacggtgctgaagcagaacgtacatgtgtttggagtggagggaaacagcgatgagctcgatgagccgatcaagactgtgtttgccgatgtggcttttgtcaagaagcacaatctgatgagcctgaattcgatcaactggtcccgggtcctggtgcagatggcccatcacttctttgcttacttccagtgtacgccatccttggacacacatcccctacccctggtggaggtggttgtgccaacaggggctgccggtaaccttgcagctgggtacattgctcaaaagataggcctgcccatccgtctggtcgtggcagtgaaccgcaatgacatcatccacaggactgtccagcagggagacttctctctctctgaggctgttaaatcaaccttggcatcagctatggacattcaggtgccctacaacatggagagggtgttctggctgctctctggctctgacagccaggtgacaagagccctcatggagcagtttgaaaggacccaaagtgtgaatctgcccaaggaactgcacagcaagcactccccggtgctgcctcgcccctgcctctgcagccaagttcccggaagctgtcctggctgctggcctgacccctgagactcccgcggagatcgtagccctggagcacaaggagacacgctgcaccctgatgcggagaggtgacaactggatgctgatgcttcgggacaccattgaggaccttagccgacagtggaggagtcatgccctcaacacctcccagtagcctggctggaggtggctttctttaggcttcagatcccaggaagatgcaccttctgagctgccttgtgcaccctccccattaagcgtaggttaggaggtttccgggaggctgctcagctggatctggagccagctggctttgctccgttccctggctagtctgtgcctggtcaccagggaggctgagtgaggggctgtgaacagttgccggaagcaccccctccctccccggcccgtgcagcagtgtctgagctgtagtgaaagtttcagggcctgcaaaagaagaggcttgggcacaggactgaccatggctccaggggtttaggaccccagacctgtgaaggtgggagcagctcaccaccttcacgcaggctttgtatgttctctgagccttagttgattttggcccccaaaccaaatccaaaggttctggcccaccttgtcagaggcttccaccctgctcacatgttgggaatccctggaataaaatgcttgttcagtgtgatggagcggc

SEQ ID NO: 191010 - DNA, 577 bp, Homo sapiens
  Payload ID: 17730
  Gene Name: threonine synthase-like 2
  ENST ID: ENST00000419759
  CDS Start-End: 198-577
gggacgcggactcgggagtgcgcacattcgcagcccgggcagccctgctgcgcaccgggcctcgcgccccgcgccccgcgccccgcgccccgcgccccgcaccgctttgctgaattggcctgggaatgctgcccctggaaggcattggacagaacagggacagtcctgttgcgtgaggggcatgggcctccaggatcatgtggtatgtcagcaccaggggcgtagccccacgggtcaactttgagggggccctcttctctggctatgcacctgacgggggcctctttatgcctgaagagctcccacagttggacagagggaccctgtgccagtggagcacactctcctatcctggcctggtgaaggagctgtgtgccctcttcattggctctgagctccttccaaaagatgaattaaatgatctgatcgaccgagccttcagcagattccgtcacagagaagtggtccatctgtccaggttgaggaatgggctgaacgtgttggagctgtggcatggcgtcacatatgcatttaaggacctgtccctgtcctgcacaacacagttcctgcagtactt

SEQ ID NO: 191011 - DNA, 1616 bp, Homo sapiens
  Payload ID: 17730
  Gene Name: threonine synthase-like 2
  ENST ID: ENST00000449349
  CDS Start-End: 182-958
gggacgcggactcgggagtgcgcacattcgcagcccgggcagccctgctgcgcaccgggcctcgcgccccgcgccccgcgccccgcgccccgcgccccgcaccgctttgctgaattggcctgggaatgctgcccctggaaggcattggacagaacagggacagtcctgttgcgtgaggggcatggagctcccacagttggacagagggaccctgtgccagtggagcacactctcctatcctggcctggtgaaggagctgtgtgccctcttcattggctctgagctccttccaaaagatgaattaaatgatctgatcgaccgagccttcagcagattccgtcacagagaagtggtccatctgtccaggttgaggaatgggctgaacgtgttggagctgtggcatggcgtcacatatgcatttaaggacctgtccctgtcctgcacaacacagttcctgcagtacttcctggagaagagggagaagcacgtcactgtggttgtaggaacatctggggacacaggaagtgctgccattgagagtgttcaaggggcaaagaacatggacattatcgttctgctgcccaaaggtcactgcacaaagattcaggagctccagatgacaacggtgctgaagcagaacgtacatgtgtttggagtggagggaaacagcgatgagctcgatgagccgatcaagactgtgtttgccgatgtggcttttgtcaagaagcacaatctgatgagcctgaattcgatcaactggtcccgggtcctggtgcagatggcccatcacttctttgcttacttccagtgtacgccatccttggacacacatcccctacccctggtggaggtggttgtgccaacaggggctgccggtaaccttgcagcactccccggtgctgcctcgcccctgcctctgcagccaagttcccggaagctgtcctggctgctggcctgacccctgagactcccgcggagatcgtagccctggagcacaaggagacacgctgcaccctgatgcggagaggtgacaactggatgctgatgcttcgggacaccattgaggaccttagccgacagtggaggagtcatgccctcaacacctcccagtagcctggctggaggtggctttctttaggcttcagatcccaggaagatgcaccttctgagctgccttgtgcaccctccccattaagcgtaggttaggaggtttccgggaggctgctcagctggatctggagccagctggctttgctccgttccctggctagtctgtgcctggtcaccagggaggctgagtgaggggctgtgaacagttgccggaagcaccccctccctccccggcccgtgcagcagtgtctgagctgtagtgaaagtttcagggcctgcaaaagaagaggcttgggcacaggactgaccatggctccaggggtttaggaccccagacctgtgaaggtgggagcagctcaccaccttcacgcaggctttgtatgttctctgagccttagttgattttggcccccaaaccaaatccaaaggttctggcccaccttgtcagaggcttccaccctgctcacatgttgggaatccctggaataaaatgcttgttcagtgtg

SEQ ID NO: 191012 - DNA, 4314 bp, Homo sapiens
  Payload ID: 17731
  Gene Name: threonyl-tRNA synthetase
  Uniprot ID: P26639
  ENST ID: ENST00000265112
  CDS Start-End: 312-2483
ggtcagcggagagtaggcatgtagcttctgcagttgctcctcctcaccctccgcgacctgatttcctagaagggctctgtcacccgaaaagattttccactggcttagaggagggagggcccgccttcccccgttatccattggctgctcgttccgccgcaagttgggggcggggttagggcgcctttcgattgcatcagctggtccagccgaggccaagtcccgggcgctagcccacctcccacccgcctcttggctcctctcctctaggccgtcgctttcgggttctctcatcgcttcgtcgttcgccaatgtttgaggagaaggccagcagtccttcagggaagatgggaggcgaggagaagccgattggtgctggtgaagagaagcaaaaggaaggaggcaaaaagaagaacaaagaaggatctggagatggaggtcgagctgagttgaatccttggcctgaatatatttacacacgtcttgagatgtataatatactaaaagcagaacatgattccattctggcagaaaaggcagaaaaagatagcaagccaattaaagtcactttgcctgatggtaaacaggttgatgcggaatcttggaaaactacaccatatcaaattgcctgtggaattagtcaaggcctggccgacaacaccgttattgctaaagtaaataatgttgtgtgggacctggaccgccctctggaagaagattgtaccttggagcttctcaagtttgaggatgaggaagctcaggcagtgtattggcactctagtgctcacataatgggtgaagccatggaaagagtctatggtggatgtttatgctacggtccgccaatagaaaatggattctattatgacatgtacctcgaagaagggggtgtgtctagcaatgatttctcttctctggaggctttgtgtaagaaaatcattaaagaaaaacaagcttttgaaagactggaagttaagaaagaaactttactggcaatgtttaagtacaacaagttcaaatgccggatattgaatgaaaaggtgaatactccaactaccacagtctatagatgtggccctttgatagatctctgccggggtcctcatgttagacacacgggcaaaattaaggctttaaaaatacacaaaaattcctccacgtactgggaaggcaaagcagatatggagactctccagagaatttatggcatttcattcccagatcctaaaatgttgaaagagtgggagaagttccaagaggaagctaaaaaccgagatcataggaaaattggcagggaccaagaactatatttctttcatgaactcagccctggaagttgcttttttctgccaaaaggagcctacatttataatgcacttattgaattcattaggagcgaatataggaaaagaggattccaggaggtagtcaccccaaacatcttcaacagccgactctggatgacctcgggccactggcagcactacagcgagaacatgttctcctttgaggtggagaaggagctgtttgccctgaaacccatgaactgcccaggacactgccttatgtttgatcatcggccaaggtcctggcgagaactgcctctgcggctagctgattttggggtacttcataggaacgagctgtctggagcactcacaggactcacccgggtacgaagattccaacaggatgatgctcacatattctgtgccatggagcagattgaagatgaaataaaaggttgtttggattttctacgtacggtatatagcgtatttggattttcttttaaactaaacctttctactcgcccggaaaaattccttggagatatcgaagtatgggatcaagctgagaaacaacttgaaaacagtctgaatgaatttggtgaaaagtgggagttaaactctggagatggagctttctatggcccaaagattgacatacagattaaagatgcgattgggcggtaccaccagtgtgcaaccatccagctggatttccagttgcccatcagatttaatcttacttatgtaagccatgatggtgatgataagaaaaggccagtgattgttcatcgagccatcttgggatcagtggaaagaatgattgctatcctcacagaaaactatgggggcaaatggcccttttggctgtcccctcgccaggtaatggtagttccagtgggaccaacctgtgatgaatatgcccaaaaggtacgacaacaattccacgatgccaaattcatggcagacattgatctggatccaggctgtacattgaataaaaagattcgaaatgcacagttagcacagtataacttcattttagttgttggtgaaaaagagaaaatcagtggcactgttaatatccgcacaagagacaataaggtccacggggaacgcaccatttctgaaactatcgagcggctacagcagctcaaagagttccgcagcaaacaggcagaagaagaattttaatgaaaaaattacccagattggctccatggaaaaggaggaacagcgtttccgtaaaattgactttgtactctgaaaacgtcaatttatattgaacttggaggagtttggcaaagtctgaataggtcaacctgcaggcgtaactatttttgacctagtcagtttttaaacaatgtgcatttgaaggagttaattaaaagagagccaataaaatgattttactcattcagtatctgagtactggaagtgaaacatgaggaatgctttagtgtaatgtgggagaacttttttgtaaatttaatgcaattgaaaaagttttcaaattcaattaagataactagaattggattatggtgtaaaaataaaaaaaaaatttattcacataagtttcaagactgctctgtccctcacatgtacacatacatgcctgagacagataatgtggttcagtatttatctttacagttttacagcaaatataatgcagggtggatggagacggggtaggtctgcagcatcataatgctattcataaactgggtgtgagctgggtgctggcttctcagaggataaacacttttgggagtgtcatttttacttaatgttggatggacaccttttcaaacaaaaactaccatggatctattacagagtagatttgcacaaatgtttaagataaaacgtgaatcttcagagaaatatctgtttatggcagactgttctggaccatagaatcacttggtttacaaattccctattttctcataagggatcattttcaaaatcttctaccaataaatggtgattgaaaggacagcacaaagtaaataatttcttatgtggataaatactaattcctccttgttagaatgatattttaaaagtaacatcttttttttaattttttttgagacaagatcctttgtcccccaggctggagtgtggtgccatgatctcggctcactgcaacctcagcctcccaagtaggtgggactaaagacatgtgccaccatgcctggctgatgtttgtattttctatagagatggtttcatcatgttgcccaggctggtatcaaactcctggataaaagagacccacctgcctcagtctcccaaagtgctgggattacaggtgtgagccaccacgcccagcctaaaaagcaacatcttgtcagtgctataatctcaaatagcttgtttgcaaggtgtgatggttaatactaagtgtcaacttgattggattaaaggatgcctttattgtttctgggtgtgtctgtgagggtgttgccagagagattgacatttgagtcagtggcctgggagaggcagacacaccctctgtgtgcgtgggcaccatccagtcggctgccagtgcagctagaacaaagcgggtggaagaaagtgggattaagttggcttgctgagtcttctggctttcatctttctcctgtgctggatgattcctgcccttggacatcagactccaggttcttcagcttttggactcttggacttatacccgtggtttgccaggggccttctggcctttggccattgactggagatggcactgtcggcttccctgcttttgaggcttggactcggactgaaccactactggcttccttgctccttagcttgcagacagcctatcgtgggacttcaccgtgtgcttgtgtgagtcaattcttactaaatttcctttcatatatacatatatcctattctgtctctctggagaaccctgactaatacacaagggtcacttcaaagagaagctaatttgcatagattaattttcactttaataaaggagctaagatctttaatcata

SEQ ID NO: 191013 - DNA, 2523 bp, Homo sapiens
  Payload ID: 17731
  Gene Name: threonyl-tRNA synthetase
  Uniprot ID: P26639
  ENST ID: ENST00000455217
  CDS Start-End: 123-2393
gattgcatcagctggtccagccgaggccaagtcccgggcgctagcccacctcccacccgcctcttggctcctctcctctaggccgtcgctttcgggttctctcatcgcttcgtcgttcgccaatgtttgaggagaaggccagcagtccttcagggaagatgggaggcgaggagaagccgattggtgctggtgaagagaagcaaaaggaaggaggcaaaaagaagaacaaagaaggatctggagatggaggtcgagctgagttgaatccttggcctgaatatatttacacacgtcttgagatgtataatatactaaaagcagaacatgattccattctggcagaaaaggcagaaaaagatagcaagccaattaaagtcactttgcctgatggtaaacaggttgatgcggaatcttggaaaactacaccatatcaaattgcctgtggaattagtcacacagcttcctgcaaaaacctctcttcacttgcatctctgcttgcatctgtggccattccctcatctggaatgccatggcctcctcttttcttccttcaaggcctggccgacaacaccgttattgctaaagtaaataatgttgtgtgggacctggaccgccctctggaagaagattgtaccttggagcttctcaagtttgaggatgaggaagctcaggcagtgtattggcactctagtgctcacataatgggtgaagccatggaaagagtctatggtggatgtttatgctacggtccgccaatagaaaatggattctattatgacatgtacctcgaagaagggggtgtgtctagcaatgatttctcttctctggaggctttgtgtaagaaaatcattaaagaaaaacaagcttttgaaagactggaagttaagaaagaaactttactggcaatgtttaagtacaacaagttcaaatgccggatattgaatgaaaaggtgaatactccaactaccacagtctatagatgtggccctttgatagatctctgccggggtcctcatgttagacacacgggcaaaattaaggctttaaaaatacacaaaaattcctccacgtactgggaaggcaaagcagatatggagactctccagagaatttatggcatttcattcccagatcctaaaatgttgaaagagtgggagaagttccaagaggaagctaaaaaccgagatcataggaaaattggcagggaccaagaactatatttctttcatgaactcagccctggaagttgcttttttctgccaaaaggagcctacatttataatgcacttattgaattcattaggagcgaatataggaaaagaggattccaggaggtagtcaccccaaacatcttcaacagccgactctggatgacctcgggccactggcagcactacagcgagaacatgttctcctttgaggtggagaaggagctgtttgccctgaaacccatgaactgcccaggacactgccttatgtttgatcatcggccaaggtcctggcgagaactgcctctgcggctagctgattttggggtacttcataggaacgagctgtctggagcactcacaggactcacccgggtacgaagattccaacaggatgatgctcacatattctgtgccatggagcagattgaagatgaaataaaaggttgtttggattttctacgtacggtatatagcgtatttggattttcttttaaactaaacctttctactcgcccggaaaaattccttggagatatcgaagtatgggatcaagctgagaaacaacttgaaaacagtctgaatgaatttggtgaaaagtgggagttaaactctggagatggagctttctatggcccaaagattgacatacagattaaagatgcgattgggcggtaccaccagtgtgcaaccatccagctggatttccagttgcccatcagatttaatcttacttatgtaagccatgatggtgatgataagaaaaggccagtgattgttcatcgagccatcttgggatcagtggaaagaatgattgctatcctcacagaaaactatgggggcaaatggcccttttggctgtcccctcgccaggtaatggtagttccagtgggaccaacctgtgatgaatatgcccaaaaggtacgacaacaattccacgatgccaaattcatggcagacattgatctggatccaggctgtacattgaataaaaagattcgaaatgcacagttagcacagtataacttcattttagttgttggtgaaaaagagaaaatcagtggcactgttaatatccgcacaagagacaataaggtccacggggaacgcaccatttctgaaactatcgagcggctacagcagctcaaagagttccgcagcaaacaggcagaagaagaattttaatgaaaaaattacccagattggctccatggaaaaggaggaacagcgtttccgtaaaattgactttgtactctgaaaacgtcaatttatattgaacttggaggagtttggcaaagtctgaataggtcaacct

SEQ ID NO: 191014 - DNA, 2475 bp, Homo sapiens
  Payload ID: 17731
  Gene Name: threonyl-tRNA synthetase
  ENST ID: ENST00000507716
  CDS Start-End: 111-506
tggtccagccgaggccaagtcccgggcgctagcccacctcccacccgcctcttggctcctctcctctaggccgtcgctttcgggttctctcatcgcttcgtcgttcgccaatgtttgaggagaaggccagcagtccttcagggaagatgggaggcgaggagaagccgattggtgctggtgaagagaagcaaaaggaaggaggcaaaaagaagaacaaagaaggatctggagatggaggtcgagctgagttgaatccttggcctgaatatatttacacacgtcttgagatgtataatatactaaaagcagaacatgattccattctggcagaaaaggcagaaaaagatagcaagccaattaaagtcactttgcctgatggtaaacaggttgatgcggaatcttggaaaactacaccatatcaaattgcctgtggaattagccatggaaagagtctatggtggatgtttatgctacggtccgccaatagaaaatggattctattatgacatgtacctcgaagaagggggtgtgtctagcaatgatttctcttctctggaggctttgtgtaagaaaatcattaaagaaaaacaagcttttgaaagactggaagttaagaaagaaactttactggcaatgtttaagtacaacaagttcaaatgccggatattgaatgaaaaggtgaatactccaactaccacagtctatagatgtggccctttgatagatctctgccggggtcctcatgttagacacacgggcaaaattaaggctttaaaaatacacaaaaattcctccacgtactgggaaggcaaagcagatatggagactctccagagaatttatggcatttcattcccagatcctaaaatgttgaaagagtgggagaagttccaagaggaagctaaaaaccgagatcataggaaaattggcagggaccaagaactatatttctttcatgaactcagccctggaagttgcttttttctgccaaaaggagcctacatttataatgcacttattgaattcattaggagcgaatataggaaaagaggattccaggaggtagtcaccccaaacatcttcaacagccgactctggatgacctcgggccactggcagcactacagcgagaacatgttctcctttgaggtggagaaggagctgtttgccctgaaacccatgaactgcccaggacactgccttatgtttgatcatcggccaaggtcctggcgagaactgcctctgcggctagctgattttggggtacttcataggaacgagctgtctggagcactcacaggactcacccgggtacgaagattccaacaggatgatgctcacatattctgtgccatggagcagattgaagatgaaataaaaggttgtttggattttctacgtacggtatatagcgtatttggattttcttttaaactaaacctttctactcgcccggaaaaattccttggagatatcgaagtatgggatcaagctgagaaacaacttgaaaacagtctgaatgaatttggtgaaaagtgggagttaaactctggagatggagctttctatggcccaaagattgacatacagattaaagatgcgattgggcggtaccaccagtgtgcaaccatccagctggatttccagttgcccatcagatttaatcttacttatgtaagccatgatggtgatgataagaaaaggccagtgattgttcatcgagccatcttgggatcagtggaaagaatgattgctatcctcacagaaaactatgggggcaaatggcccttttggctgtcccctcgccaggtaatggtagttccagtgggaccaacctgtgatgaatatgcccaaaaggtacgacaacaattccacgatgccaaattcatggcagacattgatctggatccaggctgtacattgaataaaaagattcgaaatgcacagttagcacagtataacttcattttagttgttggtgaaaaagagaaaatcagtggcactgttaatatccgcacaagagacaataaggtccacggggaacgcaccatttctgaaactatcgagcggctacagcagctcaaagagttccgcagcaaacaggcagaagaagaattttaatgaaaaaattacccagattggctccatggaaaaggaggaacagcgtttccgtaaaattgactttgtactctgaaaacgtcaatttatattgaacttggaggagtttggcaaagtctgaataggtcaacctgcaggcgtaactatttttgacctagtcagtttttaaacaatgtgcatttgaaggagttaattaaaagagagccaataaaatgattttactcattcagtatctgagtactggaagtgaaacatgaggaatgctttagtgtaatgtgggagaacttttttgtaaatttaatgcaattgaaaaagttttcaaattcaattaagataactagaattggattatggtgt

SEQ ID NO: 191015 - DNA, 466 bp, Homo sapiens
  Payload ID: 17731
  Gene Name: threonyl-tRNA synthetase
  ENST ID: ENST00000514259
  CDS Start-End: 80-466
gcattggggacttgactctggaaagcgtccagaccaaggccgtcgctttcgggttctctcatcgcttcgtcgttcgccaatgtttgaggagaaggccagcagtccttcagggaagatgggaggcgaggagaagccgattggtgctggtgaagagaagcaaaaggaaggaggcaaaaagaagaacaaagaaggatctggagatggaggtcgagctgagttgaatccttggcctgaatatatttacacacgtcttgagatgtataatatactaaaagcagaacatgattccattctggcagaaaaggcagaaaaagatagcaagccaattaaagtcactttgcctgatggtaaacaggttgatgcggaatcttggaaaactacaccatatcaaattgcctgtggaattagtcaaggcctggccgacaacaccgttattgctaaagtaaataatgttgtgtgggacctg

SEQ ID NO: 191016 - DNA, 608 bp, Homo sapiens
  Payload ID: 17731
  Gene Name: threonyl-tRNA synthetase
  ENST ID: ENST00000505012
  CDS Start-End: 93-449
gtcccgggcgctagcccacctcccacccgcctcttggctcctctcctctaggccgtcgctttcgggttctctcatcgcttcgtcgttcgccaatgtttgaggagaaggccagcagtccttcagggaagatgggaggcgaggagaagccgattggtgctggtgaagagaagcaaaaggaaggaggcaaaaagaagaacaaagaaggatctggagatggaggtcgagctgagttgaatccttggcctgaatatatttacacacgtcttgagatgtataatatactaaaagcagaacatgattccattctggcagaaaaggcagaaaaagatagcaagccaattaaagtcactttgcctgatggtaaacaggttgatgcggaatcttggaaaactacaccatatcaaattgcctgtggaattaggcctggccgacaacaccgttattgctaaagtaaataatgttgtgtgggacctggaccgccctctggaagaagattgtaccttggagcttctcaagtttgaggatgaggaagctcaggcagtgtattggcactctagtgctcacataatgggtgaagccatggaaagagtctatggtggatgtttatg

SEQ ID NO: 191017 - DNA, 755 bp, Homo sapiens
  Payload ID: 17731
  Gene Name: threonyl-tRNA synthetase
  ENST ID: ENST00000506040
  CDS Start-End: 605-755
acagaccttgagtgagcgacttgttcagagcctcacatctacagtagttagacgcggagacagaatcagaatcttaggcttgaggcttccaaacttgcgtttatggcttactgtaagcgggaaacacattgcagagccttatttaatcaatctcctaagatcctgcgggggtaaagagctccattttaaggaaaggaaaaccgagtgcccgagatctgacccagcttgtccaagtttgggtggttaagtatacattttgcccggcactgatctgggcggtgcatgtgggaagatgaatagggcccagttccccgactttgagggcctcacaggctgatgtgtaagagacaggaaaacagccctagtgctttgtgatcaaccttgtggtattacagaagaggaagtttaggaaggcactttagaatttagtttggaagaatgatttcaccaggtaaacaggcaggacggggcttcccacgtaaagattggtgctggtgaagagaagcaaaaggaaggaggcaaaaagaagaacaaagaaggatctggagatggaggtcgagctgagttgaatccttggcctgaatatatttacacacgtcttgagatgtataatatactaaaagcagaacatgattccattctggcagaaaaggcagaaaaagatagcaagccaattaaagtcactttgcctgatggtaaacaggttgatgcggaatcttggaaaactacaccatatcaaattgcctgtggaatta

SEQ ID NO: 191018 - DNA, 2534 bp, Homo sapiens
  Payload ID: 17731
  Gene Name: threonyl-tRNA synthetase
  Uniprot ID: P26639
  ENST ID: ENST00000502553
  CDS Start-End: 138-2309
atgattgttccacataaagtcagaagggaggaaaggcgcacgcgcattggggacttgactctggaaagcgtccagaccaaggtcagcggagagtaggccgtcgctttcgggttctctcatcgcttcgtcgttcgccaatgtttgaggagaaggccagcagtccttcagggaagatgggaggcgaggagaagccgattggtgctggtgaagagaagcaaaaggaaggaggcaaaaagaagaacaaagaaggatctggagatggaggtcgagctgagttgaatccttggcctgaatatatttacacacgtcttgagatgtataatatactaaaagcagaacatgattccattctggcagaaaaggcagaaaaagatagcaagccaattaaagtcactttgcctgatggtaaacaggttgatgcggaatcttggaaaactacaccatatcaaattgcctgtggaattagtcaaggcctggccgacaacaccgttattgctaaagtaaataatgttgtgtgggacctggaccgccctctggaagaagattgtaccttggagcttctcaagtttgaggatgaggaagctcaggcagtgtattggcactctagtgctcacataatgggtgaagccatggaaagagtctatggtggatgtttatgctacggtccgccaatagaaaatggattctattatgacatgtacctcgaagaagggggtgtgtctagcaatgatttctcttctctggaggctttgtgtaagaaaatcattaaagaaaaacaagcttttgaaagactggaagttaagaaagaaactttactggcaatgtttaagtacaacaagttcaaatgccggatattgaatgaaaaggtgaatactccaactaccacagtctatagatgtggccctttgatagatctctgccggggtcctcatgttagacacacgggcaaaattaaggctttaaaaatacacaaaaattcctccacgtactgggaaggcaaagcagatatggagactctccagagaatttatggcatttcattcccagatcctaaaatgttgaaagagtgggagaagttccaagaggaagctaaaaaccgagatcataggaaaattggcagggaccaagaactatatttctttcatgaactcagccctggaagttgcttttttctgccaaaaggagcctacatttataatgcacttattgaattcattaggagcgaatataggaaaagaggattccaggaggtagtcaccccaaacatcttcaacagccgactctggatgacctcgggccactggcagcactacagcgagaacatgttctcctttgaggtggagaaggagctgtttgccctgaaacccatgaactgcccaggacactgccttatgtttgatcatcggccaaggtcctggcgagaactgcctctgcggctagctgattttggggtacttcataggaacgagctgtctggagcactcacaggactcacccgggtacgaagattccaacaggatgatgctcacatattctgtgccatggagcagattgaagatgaaataaaaggttgtttggattttctacgtacggtatatagcgtatttggattttcttttaaactaaacctttctactcgcccggaaaaattccttggagatatcgaagtatgggatcaagctgagaaacaacttgaaaacagtctgaatgaatttggtgaaaagtgggagttaaactctggagatggagctttctatggcccaaagattgacatacagattaaagatgcgattgggcggtaccaccagtgtgcaaccatccagctggatttccagttgcccatcagatttaatcttacttatgtaagccatgatggtgatgataagaaaaggccagtgattgttcatcgagccatcttgggatcagtggaaagaatgattgctatcctcacagaaaactatgggggcaaatggcccttttggctgtcccctcgccaggtaatggtagttccagtgggaccaacctgtgatgaatatgcccaaaaggtacgacaacaattccacgatgccaaattcatggcagacattgatctggatccaggctgtacattgaataaaaagattcgaaatgcacagttagcacagtataacttcattttagttgttggtgaaaaagagaaaatcagtggcactgttaatatccgcacaagagacaataaggtccacggggaacgcaccatttctgaaactatcgagcggctacagcagctcaaagagttccgcagcaaacaggcagaagaagaattttaatgaaaaaattacccagattggctccatggaaaaggaggaacagcgtttccgtaaaattgactttgtactctgaaaacgtcaatttatattgaacttggaggagtttggcaaagtctgaataggtcaacctgcaggcgtaactatttttgacctagtcagtttttaaacaatgtgcatttgaaggagttaattaaaagagagccaataaaatgattttactcattc

SEQ ID NO: 191019 - DNA, 656 bp, Homo sapiens
  Payload ID: 17731
  Gene Name: threonyl-tRNA synthetase
  ENST ID: ENST00000513066
  CDS Start-End: 92-292
tcccgggcgctagcccacctcccacccgcctcttggctcctctcctctaggccgtcgctttcgggttctctcatcgcttcgtcgttcgccaatgtttgaggagaaggccagcagtccttcagggaagatgggaggcgaggagaagccgattggtgctggtgaagagaagcaaaaggaaggaggcaaaaagaagaacaaagaaggatctggagatggaggtcgagctgagggcaacttgcaggttttattcatctctgcaatcacagagactgacacagagggtatctgctgaatgaatgttgaagagattttgacacgaaattctaattgggacattgcaagtggctatgatgataaactgcagttaagatacagagggtggtgcagttgaatccttggcctgaatatatttacacacgtcttgagatgtataatatactaaaagcagaacatgattccattctggcagaaaaggcagaaaaagatagcaagccaattaaagtcactttgcctgatggtaaacaggttgatgcggaatcttggaaaactacaccatatcaaattgcctgtggaattagtcaaggcctggccgacaacaccgttattgctaaagtaaataatgttgtgtgggacctggaccgccctctggaagaaga

SEQ ID NO: 191020 - DNA, 2170 bp, Homo sapiens
  Payload ID: 17731
  Gene Name: threonyl-tRNA synthetase
  ENST ID: ENST00000509731
  CDS Start-End: 95-262
aagtcccgggcgctagcccacctcccacccgcctcttggctcctctcctctaggccgtcgctttcgggttctctcatcgcttcgtcgttcgccaatgtttgaggagaaggccagcagtccttcagggaagatgggaggcgaggagaagccgattggtgctggtgaagagaagcaaaaggaaggaggcaaaaagaagaacaaagaaggatctggagatggaggtcgagctgagagactgacacagagggtatctgctgaatgaatgttgaagagattttgacacgaaattctaattgggacattgcaagtggctatgatgataaactgcagttaagatacagagggtggtgcagttgaatccttggcctgaatatatttacacacgtcttgagatgtataatatactaaaagcagaacatgattccattctggcagaaaaggcagaaaaagatagcaagccaattaaagtcactttgcctgatggtaaacaggttgatgcggaatcttggaaaactacaccatatcaaattgcctgtggaattagtcaaggcctggccgacaacaccgttattgctaaagtaaataatgttgtgtgggacctggaccgccctctggaagaagattgtaccttggagcttctcaagtttgaggatgaggaagctcaggcagtgtattggcactctagtgctcacataatgggtgaagccatggaaagagtctatggtggatgtttatgctacggtccgccaatagaaaatggattctattatgacatgtacctcgaagaagggggtgtgtctagcaatgatttctcttctctggaggctttgtgtaagaaaatcattaaagaaaaacaagcttttgaaagactggaagttaagaaagaaactttactggcaatgtttaagtacaacaagttcaaatgccggatattgaatgaaaaggtgaatactccaactaccacagtctatagatgtggccctttgatagatctctgccggggtcctcatgttagacacacgggcaaaattaaggctttaaaaatacacaaaaattcctccacgtactgggaaggcaaagcagatatggagactctccagagaatttatggcatttcattcccagatcctaaaatgttgaaagagtgggagaagttccaagaggaagctaaaaaccgagatcataggaaaattggcagggaccaagaactatatttctttcatgaactcagccctggaagttgcttttttctgccaaaaggagcctacatttataatgcacttattgaattcattaggagcgaatataggaaaagaggattccaggaggtagtcaccccaaacatcttcaacagccgactctggatgacctcgggccactggcagcactacagcgagaacatgttctcctttgaggtggagaaggagctgtttgccctgaaacccatgaactgcccaggacactgccttatgtttgatcatcggccaaggtcctggcgagaactgcctctgcggctagctgattttggggtacttcataggaacgagctgtctggagcactcacaggactcacccgggtacgaagattccaacaggatgatgctcacatattctgtgccatggagcagattgaagatgaaataaaaggttgtttggattttctacgtacggtatatagcgtatttggattttcttttaaactaaacctttctactcgcccggaaaaattccttggagatatcgaagtatgggatcaagctgagaaacaacttgaaaacagtctgaatgaatttggtgaaaagtgggagttaaactctggagatggagctttctatggcccaaagattgacatacagattaaagatgcgattgggcggtaccaccagtgtgcaaccatccagctggatttccagttgcccatcagatttaatcttacttatgtaagccatgatggtgatgataagaaaaggccagtgattgttcatcgagccatcttgggatcagtggaaagaatgattgctatcctcacagaaaactatgggggcaaatggcccttttggctgtcccctcgccaggtaatggtagttccagtgggaccaacctgtgatgaatatgcccaaaaggtacgacaacaattccacgatgccaaattcatggcagacattgatct

SEQ ID NO: 191021 - DNA, 2481 bp, Homo sapiens
  Payload ID: 17731
  Gene Name: threonyl-tRNA synthetase
  ENST ID: ENST00000508361
  CDS Start-End: 124-294
cgattgcatcagctggtccagccgaggccaagtcccgggcgctagcccacctcccacccgcctcttggctcctctcctctaggccgtcgctttcgggttctctcatcgcttcgtcgttcgccaatgtttgaggagaaggccagcagtccttcagggaagatgggaggcgaggagaagccgattggtgctggtgaagagaagcaaaaggaaggaggcaaaaagaagaacaaagaaggatctggagatggaggtcgagctgagtcaaggcctggccgacaacaccgttattgctaaagtaaataatgttgtgtgggacctggaccgccctctggaagaagattgtaccttggagcttctcaagtttgaggatgaggaagctcaggcagtgtattggcactctagtgctcacataatgggtgaagccatggaaagagtctatggtggatgtttatgctacggtccgccaatagaaaatggattctattatgacatgtacctcgaagaagggggtgtgtctagcaatgatttctcttctctggaggctttgtgtaagaaaatcattaaagaaaaacaagcttttgaaagactggaagttaagaaagaaactttactggcaatgtttaagtacaacaagttcaaatgccggatattgaatgaaaaggtgaatactccaactaccacagtctatagatgtggccctttgatagatctctgccggggtcctcatgttagacacacgggcaaaattaaggctttaaaaatacacaaaaattcctccacgtactgggaaggcaaagcagatatggagactctccagagaatttatggcatttcattcccagatcctaaaatgttgaaagagtgggagaagttccaagaggaagctaaaaaccgagatcataggaaaattggcagggaccaagaactatatttctttcatgaactcagccctggaagttgcttttttctgccaaaaggagcctacatttataatgcacttattgaattcattaggagcgaatataggaaaagaggattccaggaggtagtcaccccaaacatcttcaacagccgactctggatgacctcgggccactggcagcactacagcgagaacatgttctcctttgaggtggagaaggagctgtttgccctgaaacccatgaactgcccaggacactgccttatgtttgatcatcggccaaggtcctggcgagaactgcctctgcggctagctgattttggggtacttcataggaacgagctgtctggagcactcacaggactcacccgggtacgaagattccaacaggatgatgctcacatattctgtgccatggagcagattgaagatgaaataaaaggttgtttggattttctacgtacggtatatagcgtatttggattttcttttaaactaaacctttctactcgcccggaaaaattccttggagatatcgaagtatgggatcaagctgagaaacaacttgaaaacagtctgaatgaatttggtgaaaagtgggagttaaactctggagatggagctttctatggcccaaagattgacatacagattaaagatgcgattgggcggtaccaccagtgtgcaaccatccagctggatttccagttgcccatcagatttaatcttacttatgtaagccatgatggtgatgataagaaaaggccagtgattgttcatcgagccatcttgggatcagtggaaagaatgattgctatcctcacagaaaactatgggggcaaatggcccttttggctgtcccctcgccaggtaatggtagttccagtgggaccaacctgtgatgaatatgcccaaaaggtacgacaacaattccacgatgccaaattcatggcagacattgatctggatccaggctgtacattgaataaaaagattcgaaatgcacagttagcacagtataacttcattttagttgttggtgaaaaagagaaaatcagtggcactgttaatatccgcacaagagacaataaggtccacggggaacgcaccatttctgaaactatcgagcggctacagcagctcaaagagttccgcagcaaacaggcagaagaagaattttaatgaaaaaattacccagattggctccatggaaaaggaggaacagcgtttccgtaaaattgactttgtactctgaaaacgtcaatttatattgaacttggaggagtttggcaaagtctgaataggtcaacctgcaggcgtaactatttttgacctagtcagtttttaaacaatgtgcatttgaaggagttaattaaaagagagccaataaaatgattttactcattcagtatctgagtactggaagtgaaacatgaggaatgctttagtgtaatgtgggagaacttttttgtaaatttaatgcaattgaaaaagttttcaaattcaattaagataactagaattggattatggtgtaaaaataaaaaaaaaatttattc

SEQ ID NO: 191022 - DNA, 171 bp, Homo sapiens
  Payload ID: 17731
  Gene Name: threonyl-tRNA synthetase
  ENST ID: ENST00000627006
  CDS Start-End: 1-171
atgtttgaggagaaggccagcagtccttcagggaagatgggaggcgaggagaagccgattggtgctggtgaagagaagcaaaaggaaggaggcaaaaagaagaacaaagaaggatctggagatggaggtcgagctgagtcaaggcctggccgacaacaccgttattgctaa

SEQ ID NO: 191023 - DNA, 201 bp, Homo sapiens
  Payload ID: 17731
  Gene Name: threonyl-tRNA synthetase
  ENST ID: ENST00000626210
  CDS Start-End: 1-201
atgtttgaggagaaggccagcagtccttcagggaagatgggaggcgaggagaagccgattggtgctggtgaagagaagcaaaaggaaggaggcaaaaagaagaacaaagaaggatctggagatggaggtcgagctgagggcaacttgcaggttttattcatctctgcaatcacagagactgacacagagggtatctgctga

SEQ ID NO: 191024 - DNA, 2106 bp, Homo sapiens
  Payload ID: 17732
  Gene Name: threonyl-tRNA synthetase 2, mitochondrial (putative)
  ENST ID: ENST00000369051
  CDS Start-End: 17-424
actggtgtgaaggaacatggccctgtatcagaggtggcggtgtctccggctccaaggtttacaggcttgcaggctacacacggcagttgtgtcgacccctccacgctggttggcagagcggcttggcctttttgaggagctgtgggctgctcaggtaaagagattagcaagcatggcacagaaggaaccccggactattaagatatcacttcctggaggccagaaaattgatgctgtggcatggaacacaaccccctaccaactagcccggcagatcagttcaacactggcagatactgcagtggtccaagtacagaatatggcttttaccatgatttcttcctgggaaaggagaggtgtggcacattggttgacctttgccagggcccccaccttcggcatactggacagattggaggactgaagctgctatcggctgagtatgcccatcgtggtttctccgaggtgaaaactcccacactgttttctacgaagctctgggaacagtcagggcactgggagcattatcaggaagacatgtttgccgtgcagcccccaggctctgacaggcctcccagctcccagagtgacgattctaccaggcatatcacagatacactcgccctcaagcctatgaactgccctgcacactgcctgatgttcgcccaccggcccagatcctggcgggaactgcccctgcgactagctgactttggggctctacaccgggccgaagcctctggtggtctggggggactgacccgactgcggtgcttccagcaggatgacgctcacatcttctgtacaacagatcagctggaagcagagatccaaagctgtcttgatttcctccgttccgtctatgccgttcttggcttctccttccgcctggcactgtccacccggccatctggcttcctgggggacccttgcctttgggaccaggccgaacaggtccttaaacaggccctgaaggaatttggagaaccctgggacctcaactctggagatggtgccttctatggacctaagattgacgtgcacctccacgatgccctgggccggccacatcagtgtgggacaattcagcttgacttccaactgcccctgagatttgacctccagtataaggggcaggcgggtgccctggagcgtccagtcctcattcaccgagcagtgctcggttctgtggaaagactgttgggagtgctggcagaaagctgcggggggaaatggccactgtggctgtccccgttccaggtggtggtcatccctgtggggagtgagcaagaggaatacgccaaagaggcacagcagagcctgcgggctgcaggactggtcagtgacctggatgcagactctggactgaccctcagccggagaatccgccgggcccagcttgcccactacaattttcagtttgtggttggccagaaagagcaaagtaagagaacagtgaacattcggactcgagataatcgtcgccttggggagtgggacttgcctgaggctgtgcagcgactggtggagctacagaacacgagggtcccaaatgccgaagaaattttctgagcctttgtacatagatgaggcaaaaacctgcgagtgccatcagcctccctcacatgggagaccccaacccagctgacaatgtggagcccccagaacttcagaactgtgtggaggcacatgtctgctctcctgaaaagagacttggtttggggaccccacaaaaggagggaagctgtagctgtttggatgtgaggagaatgaaactacaaaaaaaaataaattgggccaggcgcagtggctcatgcctgtaatcccagcactctgggaggctgaggcggacggatcatgaggtcaggagatcaagaccaccctggctaacacggtgaaaccctgtctctactaaaaatacaaaaaattagccgggcatggtggcacacgcctgtaatcccagctactcaggaggctgaggcaggagaatcgcttgaacccgggaggtagaggttgcagtgagctgagattgcgccactgcacccccctaggcgacagagcgagactctgtctctaaataaataaataaataaataaatacaaact

SEQ ID NO: 191025 - DNA, 1998 bp, Homo sapiens
  Payload ID: 17732
  Gene Name: threonyl-tRNA synthetase 2, mitochondrial (putative)
  Uniprot ID: Q9BW92
  ENST ID: ENST00000369054
  CDS Start-End: 38-1804
aatctgtttgaggatgtaggcactggtgtgaaggaacatggccctgtatcagaggtggcggtgtctccggctccaaggtttacaggcttgcaggctacacacggcagttgtgtcgacccctccacgctggttggcagagcggcttggcctttttgaggagctgtgggctgctcaggtaaagagattagcaagcatggcacagaaggaaccccggactattaagatatcacttcctggaggccagaaaattgatgctgtggcatggaacacaaccccctaccaactagcccggcagatcagttcaacactggcagatactgcagtggctgctcaagtgaatggagaaccttatgatctggagcggcccttggagacagattctgacctcagatttctgacattcgattccccagaggggaaagcagtgttctggcactccagcacccatgtcctgggggcagcagctgaacaattcctaggtgctgttctctgcagaggtccaagtacagaatatggcttttaccatgatttcttcctgggaaaggagaggacaatccggggctcagagctgcctgttttggagcggatttgccaggaacttacagctgctgctcgacccttccggaggctagaggcttcacgggatcagcttcgccagttgttcaaggctgagtatgcccatcgtggtttctccgaggtgaaaactcccacactgttttctacgaagctctgggaacagtcagggcactgggagcattatcaggaagacatgtttgccgtgcagcccccaggctctgacaggcctcccagctcccagagtgacgattctaccaggcatatcacagatacactcgccctcaagcctatgaactgccctgcacactgcctgatgttcgcccaccggcccagatcctggcgggaactgcccctgcgactagctgactttggggctctacaccgggccgaagcctctggtggtctggggggactgacccgactgcggtgcttccagcaggatgacgctcacatcttctgtacaacagatcagctggaagcagagatccaaagctgtcttgatttcctccgttccgtctatgccgttcttggcttctccttccgcctggcactgtccacccggccatctggcttcctgggggacccttgcctttgggaccaggccgaacaggtccttaaacaggccctgaaggaatttggagaaccctgggacctcaactctggagatggtgccttctatggacctaagattgacgtgcacctccacgatgccctgggccggccacatcagtgtgggacaattcagcttgacttccaactgcccctgagatttgacctccagtataaggggcaggcgggtgccctggagcgtccagtcctcattcaccgagcagtgctcggttctgtggaaagactgttgggagtgctggcagaaagctgcggggggaaatggccactgtggctgtccccgttccaggtggtggtcatccctgtggggagtgagcaagaggaatacgccaaagaggcacagcagagcctgcgggctgcaggactggtcagtgacctggatgcagactctggactgaccctcagccggagaatccgccgggcccagcttgcccactacaattttcagtttgtggttggccagaaagagcaaagtaagagaacagtgaacattcggactcgagataatcgtcgccttggggagtgggacttgcctgaggctgtgcagcgactggtggagctacagaacacgagggtcccaaatgccgaagaaattttctgagcctttgtacatagatgaggcaaaaacctgcgagtgccatcagcctccctcacatgggagaccccaacccagctgacaatgtggagcccccagaacttcagaactgtgtggaggcacatgtctgctctcctgaaaagagacttggtttggggaccccacaaaaggagggaagctgtagctgtttggatgtgagg

SEQ ID NO: 191026 - DNA, 2729 bp, Homo sapiens
  Payload ID: 17732
  Gene Name: threonyl-tRNA synthetase 2, mitochondrial (putative)
  Uniprot ID: Q9BW92
  ENST ID: ENST00000369064
  CDS Start-End: 35-2191
ctgtttgaggatgtaggcactggtgtgaaggaacatggccctgtatcagaggtggcggtgtctccggctccaaggtttacaggcttgcaggctacacacggcagttgtgtcgacccctccacgctggttggcagagcggcttggcctttttgaggagctgtgggctgctcaggtaaagagattagcaagcatggcacagaaggaaccccggactattaagatatcacttcctggaggccagaaaattgatgctgtggcatggaacacaaccccctaccaactagcccggcagatcagttcaacactggcagatactgcagtggctgctcaagtgaatggagaaccttatgatctggagcggcccttggagacagattctgacctcagatttctgacattcgattccccagaggggaaagcagtgttctggcactccagcacccatgtcctgggggcagcagctgaacaattcctaggtgctgttctctgcagaggtccaagtacagaatatggcttttaccatgatttcttcctgggaaaggagaggacaatccggggctcagagctgcctgttttggagcggatttgccaggaacttacagctgctgctcgacccttccggaggctagaggcttcacgggatcagcttcgccagttgttcaaggataacccctttaagcttcacttgattgaggagaaagtgacaggtccaacagcaacagtatatgggtgtggcacattggttgacctttgccagggcccccaccttcggcatactggacagattggaggactgaagctgctatcgaactcatcatccttatggaggtcttcaggggccccagagacactgcagagagtgtcagggatttccttccccacaacagaattgctgagggtctgggaagcatggagggaggaagcagaattgcgggaccaccggcgcattgggaaggaacaggagctcttcttcttccatgaactgagccctgggagctgcttcttcctgccacgagggacaagggtgtataatgcactagtggcgtttatcagggctgagtatgcccatcgtggtttctccgaggtgaaaactcccacactgttttctacgaagctctgggaacagtcagggcactgggagcattatcaggaagacatgtttgccgtgcagcccccaggctctgacaggcctcccagctcccagagtgacgattctaccaggcatatcacagatacactcgccctcaagcctatgaactgccctgcacactgcctgatgttcgcccaccggcccagatcctggcgggaactgcccctgcgactagctgactttggggctctacaccgggccgaagcctctggtggtctggggggactgacccgactgcggtgcttccagcaggatgacgctcacatcttctgtacaacagatcagctggaagcagagatccaaagctgtcttgatttcctccgttccgtctatgccgttcttggcttctccttccgcctggcactgtccacccggccatctggcttcctgggggacccttgcctttgggaccaggccgaacaggtccttaaacaggccctgaaggaatttggagaaccctgggacctcaactctggagatggtgccttctatggacctaagattgacgtgcacctccacgatgccctgggccggccacatcagtgtgggacaattcagcttgacttccaactgcccctgagatttgacctccagtataaggggcaggcgggtgccctggagcgtccagtcctcattcaccgagcagtgctcggttctgtggaaagactgttgggagtgctggcagaaagctgcggggggaaatggccactgtggctgtccccgttccaggtggtggtcatccctgtggggagtgagcaagaggaatacgccaaagaggcacagcagagcctgcgggctgcaggactggtcagtgacctggatgcagactctggactgaccctcagccggagaatccgccgggcccagcttgcccactacaattttcagtttgtggttggccagaaagagcaaagtaagagaacagtgaacattcggactcgagataatcgtcgccttggggagtgggacttgcctgaggctgtgcagcgactggtggagctacagaacacgagggtcccaaatgccgaagaaattttctgagcctttgtacatagatgaggcaaaaacctgcgagtgccatcagcctccctcacatgggagaccccaacccagctgacaatgtggagcccccagaacttcagaactgtgtggaggcacatgtctgctctcctgaaaagagacttggtttggggaccccacaaaaggagggaagctgtagctgtttggatgtgaggagaatgaaactacaaaaaaaaataaattgggccaggcgcagtggctcatgcctgtaatcccagcactctgggaggctgaggcggacggatcatgaggtcaggagatcaagaccaccctggctaacacggtgaaaccctgtctctactaaaaatacaaaaaattagccgggcatggtggcacacgcctgtaatcccagctactcaggaggctgaggcaggagaatcgcttgaacccgggaggtagaggttgcagtgagctgagattgcgccactgcacccccctaggcgacagagcgagactctgtctctaaataaataaataaataaataaatacaaactggaa

SEQ ID NO: 191027 - DNA, 2188 bp, Homo sapiens
  Payload ID: 17732
  Gene Name: threonyl-tRNA synthetase 2, mitochondrial (putative)
  ENST ID: ENST00000438568
  CDS Start-End: 312-1643
tttgttggaccagaagccaatgaagaattacgtggaggagaagcggcgataatctgtttgaggatgtaggcactggtgtgaaggaacatggccctgtatcagaggtggcggtgtctccggctccaaggtttacaggcttgcaggctacacacggcagttgtgtcgacccctccacgctggttggcagagcggcttggcctttttgaggagctgtgggctgctcaggtaaagagattagcaagcatggcacagaaggaaccccggactattaagatatcacttcctggaggccagaaaattgatgctgtggcatggaacacaaccccctaccaactagcccggcagatcagttcaacactggcagatactgcagaggtccaagtacagaatatggcttttaccatgatttcttcctgggaaaggagaggtgtggcacattggttgacctttgccagggcccccaccttcggcatactggacagattggaggactgaagctgctatcggctgagtatgcccatcgtggtttctccgaggtgaaaactcccacactgttttctacgaagctctgggaacagtcagggcactgggagcattatcaggaagacatgtttgccgtgcagcccccaggctctgacaggcctcccagctcccagagtgacgattctaccaggcatatcacagatacactcgccctcaagcctatgaactgccctgcacactgcctgatgttcgcccaccggcccagatcctggcgggaactgcccctgcgactagctgactttggggctctacaccgggccgaagcctctggtggtctggggggactgacccgactgcggtgcttccagcaggatgacgctcacatcttctgtacaacagatcagctggaagcagagatccaaagctgtcttgatttcctccgttccgtctatgccgttcttggcttctccttccgcctggcactgtccacccggccatctggcttcctgggggacccttgcctttgggaccaggccgaacaggtccttaaacaggccctgaaggaatttggagaaccctgggacctcaactctggagatggtgccttctatggacctaagattgacgtgcacctccacgatgccctgggccggccacatcagtgtgggacaattcagcttgacttccaactgcccctgagatttgacctccagtataaggggcaggcgggtgccctggagcgtccagtcctcattcaccgagcagtgctcggttctgtggaaagactgttgggagtgctggcagaaagctgcggggggaaatggccactgtggctgtccccgttccaggtggtggtcatccctgtggggagtgagcaagaggaatacgccaaagaggcacagcagagcctgcgggctgcaggactggtcagtgacctggatgcagactctggactgaccctcagccggagaatccgccgggcccagcttgcccactacaattttcagtttgtggttggccagaaagagcaaagtaagagaacagtgaacattcggactcgagataatcgtcgccttggggagtgggacttgcctgaggctgtgcagcgactggtggagctacagaacacgagggtcccaaatgccgaagaaattttctgagcctttgtacatagatgaggcaaaaacctgcgagtgccatcagcctccctcacatgggagaccccaacccagctgacaatgtggagcccccagaacttcagaactgtgtggaggcacatgtctgctctcctgaaaagagacttggtttggggaccccacaaaaggagggaagctgtagctgtttggatgtgaggagaatgaaactacaaaaaaaaataaattgggccaggcgcagtggctcatgcctgtaatcccagcactctgggaggctgaggcggacggatcatgaggtcaggagatcaagaccaccctggctaacacggtgaaaccctgtctctactaaaaatacaaaaaattagccgggcatggtggcacacgcctgtaatcccagctactcaggaggctgaggcaggagaatcgcttgaacccgggaggtagaggttgcagtgagctgagattgcgccactgcacccccctaggcgacagagcgagactctgtctctaaataaataaataaataaataaatacaaactggaagctgctg

SEQ ID NO: 191028 - DNA, 1855 bp, Homo sapiens
  Payload ID: 17732
  Gene Name: threonyl-tRNA synthetase 2, mitochondrial (putative)
  ENST ID: ENST00000467982
  CDS Start-End: 1-432
acccctccacgctggttggcagagcggcttggcctttttgaggagctgtgggctgctcaggtaaagagattagcaagcatggcacagaaggaaccccggactattaagatatcacttcctggaggccagaaaattgatgctgtggcatggaacacaaccccctaccaactagcccggcagatcagttcaacactggcagatactgcagtggctgctcaagtgaatggagaaccttatgatctggagcggcccttggagacagattctgacctcagatttctgacattcgattccccagaggggaaagcagacaatccggggctcagagctgcctgttttggagcggatttgccaggaacttacagctgctgctcgacccttccggaggctagaggcttcacgggatcagcttcgccagttgttcaaggataacccctttaagcttcacttgattgaggagaaagtgacaggtccaacagcaacagtatatgggtgtggcacattggttgacctttgccagggcccccaccttcggcatactggacagattggaggactgaagctgctatcgaactcatcatccttatggaggtcttcaggggccccagagacactgcagagagtgtcagggatttccttccccacaacagaattgctgagggtctgggaagcatggagggaggaagcagaattgcgggaccaccggcgcattgggaaggaacaggagctcttcttcttccatgaactgagccctgggagctgcttcttcctgccacgagggacaagggtgtataatgcactagtggcgtttatcaggcctgatgttcgcccaccggcccagatcctggcgggaactgcccctgcgactagctgactttggggctctacaccgggccgaagcctctggtggtctggggggactgacccgactgcggtgcttccagcaggatgacgctcacatcttctgtacaacagatcagctggaagcagagatccaaagctgtcttgatttcctccgttccgtctatgccgttcttggcttctccttccgcctggcactgtccacccggccatctggcttcctgggggacccttgcctttgggaccaggccgaacaggtccttaaacaggccctgaaggaatttggagaaccctgggacctcaactctggagatggtgccttctatggacctaagattgacgtgcacctccacgatgccctgggccggccacatcagtgtgggacaattcagcttgacttccaactgcccctgagatttgacctccagtataaggggcaggcgggtgccctggagcgtccagtcctcattcaccgagcagtgctcggttctgtggaaagactgttgggagtgctggcagaaagctgcggggggaaatggccactgtggctgtccccgttccaggtggtggtcatccctgtggggagtgagcaagaggaatacgccaaagaggcacagcagagcctgcgggctgcaggactggtcagtgacctggatgcagactctggactgaccctcagccggagaatccgccgggcccagcttgcccactacaattttcagtttgtggttggccagaaagagcaaagtaagagaacagtgaacattcggactcgagataatcgtcgccttggggagtgggacttgcctgaggctgtgcagcgactggtggagctacagaacacgagggtcccaaatgccgaagaaattttctgagcctttgtacatagatgaggcaaaaacctgcgagtgccatcagcctccctcacatgggagaccccaacccagctgacaatgtggagcccccagaacttcagaactgtgtggaggcacat

SEQ ID NO: 191029 - DNA, 2162 bp, Homo sapiens
  Payload ID: 17732
  Gene Name: threonyl-tRNA synthetase 2, mitochondrial (putative)
  ENST ID: ENST00000606933
  CDS Start-End: 32-1942
tttgaggatgtaggcactggtgtgaaggaacatggccctgtatcagaggtggcggtgtctccggctccaaggtttacaggcttgcaggctacacacggcagttgtgtcgacccctccacgctggttggcagagcggcttggcctttttgaggagctgtgggctgctcaggtaaagagattagcaagcatggcacagaaggaaccccggactattaagatatcacttcctggaggccagaaaattgatgctgtggcatggaacacaaccccctaccaactagcccggcagatcagttcaacactggcagatactgcagtggctgctcaagtgaatggagaaccttatgatctggagcggcccttggagacagattctgacctcagatttctgacattcgattccccagaggggaaagcagtgttctggcactccagcacccatgtcctgggggcagcagctgaacaattcctaggtgctgttctctgcagaggtccaagtacagaatatggcttttaccatgatttcttcctgggaaaggagaggacaatccggggctcagagctgcctgttttggagcggatttgccaggaacttacagctgctgctcgacccttccggaggctagaggcttcacgggatcagcttcgccagttgttcaaggataacccctttaagcttcacttgattgaggagaaagtgacaggtccaacagcaacagtatatgggtgtggcacattggttgacctttgccagggcccccaccttcggcatactggacagattggaggactgaagctgctatcggctgagtatgcccatcgtggtttctccgaggtgaaaactcccacactgttttctacgaagctctgggaacagtcagggcactgggagcattatcaggaagacatgtttgccgtgcagcccccaggctctgacaggcctcccagctcccagagtgacgattctaccaggcatatcacagatacactcgccctcaagcctatgaactgccctgcacactgcctgatgttcgcccaccggcccagatcctggcgggaactgcccctgcgactagctgactttggggctctacaccgggccgaagcctctggtggtctggggggactgacccgactgcggtgcttccagcaggatgacgctcacatcttctgtacaacagatcagctggaagcagagatccaaagctgtcttgatttcctccgttccgtctatgccgttcttggcttctccttccgcctggcactgtccacccggccatctggcttcctgggggacccttgcctttgggaccaggccgaacaggtccttaaacaggccctgaaggaatttggagaaccctgggacctcaactctggagatggtgccttctatggacctaagattgacgtgcacctccacgatgccctgggccggccacatcagtgtgggacaattcagcttgacttccaactgcccctgagatttgacctccagtataaggggcaggcgggtgccctggagcgtccagtcctcattcaccgagcagtgctcggttctgtggaaagactgttgggagtgctggcagaaagctgcggggggaaatggccactgtggctgtccccgttccaggtggtggtcatccctgtggggagtgagcaagaggaatacgccaaagaggcacagcagagcctgcgggctgcaggactggtcagtgacctggatgcagactctggactgaccctcagccggagaatccgccgggcccagcttgcccactacaattttcagtttgtggttggccagaaagagcaaagtaagagaacagtgaacattcggactcgagataatcgtcgccttggggagtgggacttgcctgaggctgtgcagcgactggtggagctacagaacacgagggtcccaaatgccgaagaaattttctgagcctttgtacatagatgaggcaaaaacctgcgagtgccatcagcctccctcacatgggagaccccaacccagctgacaatgtggagcccccagaacttcagaactgtgtggaggcacatgtctgctctcctgaaaagagacttggtttggggaccccacaaaaggagggaagctgtagctgtttggatgtgaggagaatgaaactacaaaaaaaaataaa

SEQ ID NO: 191030 - DNA, 3610 bp, Homo sapiens
  Payload ID: 17733
  Gene Name: threonyl-tRNA synthetase-like 2
  Uniprot ID: A2RTX5
  ENST ID: ENST00000335968
  CDS Start-End: 218-2626
ctgcagggtatctggcctaggccccgcccctccccgcccagcgccccgcccctgcaacgtgtaggcctcggctccaacgaggccccatggctccgtccccgccccatcgccccgcccctcccgggagccctgtcttctgccgtgcgctgagtgtccgcgtcgccctcgccgcagtcgcgggcaccccgctcggcgtcggtgcctgagggaggccgcgatggcggccgaggccctggcggcggaggccgtggcgtcgcgcctggagcggcaggaggaggacatccgctggctgtggtcggaggtcgagcgcctgagggacgagcagctgaacgcgccctacagctgccaggcggaggggccgtgcctcacgcgggaggtggcgcagctccgggccgagaactgcgacctgcgccaccgcctgtgcagcctgcggctgtgcctcgccgaggagcggagccgccaggccacgctggagagcgcggagctagaggcggcgcaggaggccggcgcacagcctcctcctagtcaaagccaagacaaggacatgaaaaagaagaaaatgaaggaaagcgaggctgacagcgaggtgaagcatcaaccaattttcataaaagaaagattgaagctttttgaaatactgaagaaagaccatcagctcttacttgccatttatggaaaaaagggggatacaagcaacatcatcacagtaagagtggctgatgggcaaacagtgcaaggggaagtctggaaaacaacgccttaccaagtggctgctgaaattagtcaggaactggctgaaagcacggtaatagccaaagtcaatggtgaactgtgggacctggaccgcccattggaaggggactcttctctagagctgcttacatttgataatgaggaagctcaagctgtgtactggcactccagtgctcacattcttggggaggccatggagctttactatggaggccacctgtgctacggtccgcccattgaaaatggattttattatgacatgttcattgaagacagagcagtgtccagcacagaattgtcagccctggagaatatatgtaaagccatcataaaagaaaagcaaccttttgaaagactagaagtcagcaaggaaatcctcctggaaatgtttaagtacaataaatttaaatgccgcattctgaatgagaaagttaacactgcaactaccaccgtgtacaggtgcggtccattaattgacctttgcaaaggtccacatgtaagacacactggaaaaattaaaaccatcaaaatttttaagaattcctcaacatattgggagggcaatccggaaatggaaacattgcagaggatctatggaatatcctttcctgataacaagatgatgagagactgggaaaagttccaagaggaagcaaagaaccgagatcacaggaagatcgggaaggaacaagaacttttctttttccacgatttgagtcctggaagctgttttttccttcccagaggagccttcatttataatacgcttacagatttcatacgagaggaatatcacaaacgggacttcacggaggtgctctctcccaatatgtacaacagtaaactctgggaagcctcaggccactggcagcattacagcgagaacatgtttacctttgagattgaaaaggacacttttgccctcaaacccatgaattgtccagggcactgtctaatgtttgcccatcgtccacgatcttggagggaaatgcctattagatttgctgattttggagttctgcatagaaatgaactgtcggggactctcagcggcttgaccagagtgaggcgcttccagcaggacgatgctcacattttttgcacagtggagcagattgaagaagaaataaaggggtgtttgcagtttttgcaatctgtttactcaacatttggcttctcctttcaattaaacctgtcaacaaggccggaaaacttcctaggagagattgagatgtggaatgaggctgagaagcaactgcagaacagcttgatggactttggagaaccgtggaaaatgaacccaggagatggagcattttatggccctaaaattgacataaaaatcaaggatgctattggcagataccatcaatgtgctacaattcagctggacttccaactgcctattagatttaatctcacatatgttagtaaggatggggatgataagaagagacctgtgatcattcatcgagccattttgggatcagtggaaagaatgatagccattctttcagaaaactatggcggaaaatggcctttctggctatctcctcgtcaggtgatggtcatccctgtggggccaacttgtgaaaaatatgcacttcaggtatccagtgaattttttgaagaaggatttatggctgacgttgacttggatcacagttgtacactaaataagaaaatacgaaatgcacagctggctcagtataattttattttggtggttggagaaaaggaaaagatagataatgctgtaaacgtgcgaacaagagacaacaaaattcatggagagattttagtaacttctgccattgataaactgaagaatctcaggaagacacggacactcaatgctgaggaggccttttgaagtccttccctgatatttgcttctgtgtaactttgttttgacccttaaaaatgtatttttcttaacatgttagtacttctacgactttggagccactgatgggtccactcatggcctcagctgagaaaggagacgatgaacgtgtagctgacatgcacgaagtttaatttactcatgtccacgggggacgtttagagggcacgtgggaaattttccagcaatcaatgccttgagaaacttaaatggggaaatattattcatcgagaaagtgaaacaaaacactaggaaatgattatgaaatgttagtgattttcaaaagatgggcttcaaataaaagtctgcagagttttttttaaataggagggaaaatcttattttctaatatgtctcaggtatttttatgacttctactaaaattcacactgaaactttatcttctaaactggaatcattacttaattttaactaaccaacaaccacaaaagcagcagctactgctaaatattggattactgacaaaggaattcagttttgtggaatctggtgtttgcactataggttaagagttgccatttaaatgtttcttattcataattaggttttgttccgctttagaaaaaaataaattcccaaatgaattgcatcagtgtttccagcgtttcagctgtgggcttctaccaccactaagccgctcacctagagttgttacttttttgatgggatgacattccatggatttatgtactgaaatggatttcagattttaaagagaggaatgctctacgtgctcagaactgaattaaaatggcattatgtcaatagagaattcagctaccaaacaagaagtattgtttattttgcgatatgctgtgaaattcaaaagaaatgtaagaaataatctcttttcaatatactgatcatttagttaacttcctgagggatgtgaacagtgaaacagttggcaaacaaaacaatatatatcag

SEQ ID NO: 191031 - DNA, 2774 bp, Homo sapiens
  Payload ID: 17733
  Gene Name: threonyl-tRNA synthetase-like 2
  ENST ID: ENST00000539112
  CDS Start-End: 24-2324
gtcggtgcctgagggaggccgcgatggcggccgaggccctggcggcggaggccgtggcgtcgcgcctggagcggcaggaggaggacatccgctggctgtggtcggaggtcgagcgcctgagggacgagcagctgaacgcgccctacagctgccaggcggaggggccgtgcctcacgcgggaggtggcgcagctccgggccgagaactgcgacctgcgccaccgcctgtgcagcctgcggctgtgcctcgccgaggagcggagccgccaggccacgctggagagcgcggagctagaggcggcgcaggaggccggcgcacagcctcctcctagtcaaagccaagacaaggacatgaaaaagaagaaaatgaaggaaagcgaggctgacagcgaggtgaagcatcaaccaattttcataaaagaaagattgaagctttttgaaatactgaagaaagaccatcagctcttacttgccatttatggaaaaaagggggatacaagcaacatcatcacagtaagagtggctgatgggcaaacagtgcaaggggaagtctggaaaacaacgccttaccaagtggctgctgaaattagtcaggaactggctgaaagcacggtaatagccaaagtcaatggtgaactgtgggacctggaccgcccattggaaggggactcttctctagagctgcttacatttgataatgaggaagctcaagctgtgtactggcactccagtgctcacattcttggggaggccatggagctttactatggaggccacctgtgctacggtccgcccattgaaaatggattttattatgacatgttcattgaagacagagcagtgtccagcacagaattgtcagccctggagaatatatgtaaagccatcataaaagaaaagcaaccttttgaaagactagaagtcagcaaggaaatcctcctggaaatgtttaagtacaataaatttaaatgccgcattctgaatgagaaagttaacactgcaactaccaccgtgtacaggtgcggtccattaattgacctttgcaaaggtccacatgtaagacacactggaaaaattaaaaccatcaaaatttttaagaattcctcaacatattgggagggcaatccggaaatggaaacattgcagaggatctatggaatatcctttcctgataacaagatgatgagagactgggaaaagttccaagaggaagcaaagaaccgagatcacaggaagatcgggaaggaacaagaacttttctttttccacgatttgagtcctggaagctgttttttccttcccagaggagccttcatttataatacgcttacagatttcatacgagaggaatatcacaaacgggacttcacggaggtgctctctcccaatatgtacaacagtaaactctgggaagcctcaggccactggcagcattacagcgagaacatgtttacctttgagattgaaaaggacacttttgccctcaaacccatgaattgtccagggcactgtctaatgtttgcccatcgtccacgatcttggagggaaatgcctattagatttgctgattttggagttctgcatagaaatgaactgtcggggactctcagcggcttgaccagagtgaggcgcttccagcaggacgatgctcacattttttgcacagtggagcagattgaagaagaaataaaggggtgtttgcagtttttgcaatctgtttactcaacatttggcttctcctttcaattaaacctgtcaacaaggccggaaaacttcctaggagagattgagatgtggaatgaggctgagaagcaactgcagaacagcttgatggactttggagaaccgtggaaaatgaacccaggagatggagcattttatggccctaaaattgacataaaaatcaaggatgctattggcagataccatcaatgtgctacaattcagctggacttccaactgcctattagatttaatctcacatatgttagtaaggatggggatgataagaagagacctgtgatcattcatcgagccattttgggatcagtggaaagaatgatagccattctttcagaaaactatggcggaaaatggcctttctggctatctcctcgtcaggtgatggtcatccctgtggggccaacttgtgaaaaatatgcacttcaggtatccagtgaattttttgaagaaggatttatggctgacgttgacttggatcacagttgtacactaaataagaaaatacgaaatgcacagctggctcagtataattttattttggaccggtttcttccttctgtgtggcaagaagcatggctgtagattcctgcatcatctcacaatatgggtcactagagagaacaaactttttacccacattccagaaagttctggctggctcgcatgggtctggtgtccactccttggctcatcagtggttggagaaaaggaaaagatagataatgctgtaaacgtgcgaacaagagacaacaaaattcatggagagattttagtaacttctgccattgataaactgaagaatctcaggaagacacggacactcaatgctgaggaggccttttgaagtccttccctgatatttgcttctgtgtaactttgttttgacccttaaaaatgtatttttcttaacatgttagtacttctacgactttggagccactgatgggtccactcatggcctcagctgagaaaggagacgatgaacgtgtagctgacatgcacgaagtttaatttactcatgtccacggggga

SEQ ID NO: 191032 - DNA, 1916 bp, Homo sapiens
  Payload ID: 17733
  Gene Name: threonyl-tRNA synthetase-like 2
  ENST ID: ENST00000558533
  CDS Start-End: 1-447
gaagtcagcaaggaaatcctcctggaaatgtttaagtacaataaatttaaatgccgcattctgaatgagaaagttaacactgcaactaccaccgtgtacaggtgcggtccattaattgacctttgcaaaggtccacatgtaagacacactggaaaaattaaaaccatcaaaatttttaagaattcctcaacatattgggagggcaatccggaaatggaaacattgcagaggatctatggaatatcctttcctgataacaagatgatgagagactgggaaaagttccaagaggaagcaaagaaccgagatcacaggaagatcgggaaggaacaagaacttttctttttccacgatttgagtcctggaagctgttttttccttcccagaggagccttcatttataatacgcttacagatttcatacgaatgcaagacagatgtggctgatgaacaggagcagggcctgattgtgagggtcaccaaactgtaaaggcacttaaatgcacaaacccagtgatctcttattctaaggaggaatatcacaaacgggacttcacggaggtgctctctcccaatatgtacaacagtaaactctgggaagcctcaggccactggcagcattacagcgagaacatgtttacctttgagattgaaaaggacacttttgccctcaaacccatgaattgtccagggcactgtctaatgtttgcccatcgtccacgatcttggagggaaatgcctattagatttgctgattttggagttctgcatagaaatgaactgtcggggactctcagcggcttgaccagagtgaggcgcttccagcaggacgatgctcacattttttgcacagtggagcagattgaagaagaaataaaggggtgtttgcagtttttgcaatctgtttactcaacatttggcttctcctttcaattaaacctgtcaacaaggccggaaaacttcctaggagagattgagatgtggaatgaggctgagaagcaactgcagaacagcttgatggactttggagaaccgtggaaaatgaacccaggagatggagcattttatggccctaaaattgacataaaaatcaaggatgctattggcagataccatcaatgtgctacaattcagctggacttccaactgcctattagatttaatctcacatatgttagtaaggatggggatgataagaagagacctgtgatcattcatcgagccattttgggatcagtggaaagaatgatagccattctttcagaaaactatggcggaaaatggtatccagtgaattttttgaagaaggatttatggctgacgttgacttggatcacagttgtacactaaataagaaaatacgaaatgcacagctggctcagtataattttattttggtggttggagaaaaggaaaagatagataatgctgtaaacgtgcgaacaagagacaacaaaattcatggagagattttagtaacttctgccattgataaactgaagaatctcaggaagacacggacactcaatgctgaggaggccttttgaagtccttccctgatatttgcttctgtgtaactttgttttgacccttaaaaatgtatttttcttaacatgttagtacttctacgactttggagccactgatgggtccactcatggcctcagctgagaaaggagacgatgaacgtgtagctgacatgcacgaagtttaatttactcatgtccacgggggacgtttagagggcacgtgggaaattttccagcaatcaatgccttgagaaacttaaatggggaaatattattcatcgagaaagtgaaacaaaacactaggaaatgattatgaaatgttagtgattttcaaaagatgggcttcaaataaaagtctgcagagttttttttaaataggagggaaaa

SEQ ID NO: 191033 - DNA, 2356 bp, Homo sapiens
  Payload ID: 17733
  Gene Name: threonyl-tRNA synthetase-like 2
  ENST ID: ENST00000615656
  CDS Start-End: 56-2356
ccctcgccgcagtcgcgggcaccccgctcggcgtcggtgcctgagggaggccgcgatggcggccgaggccctggcggcggaggccgtggcgtcgcgcctggagcggcaggaggaggacatccgctggctgtggtcggaggtcgagcgcctgagggacgagcagctgaacgcgccctacagctgccaggcggaggggccgtgcctcacgcgggaggtggcgcagctccgggccgagaactgcgacctgcgccaccgcctgtgcagcctgcggctgtgcctcgccgaggagcggagccgccaggccacgctggagagcgcggagctagaggcggcgcaggaggccggcgcacagcctcctcctagtcaaagccaagacaaggacatgaaaaagaagaaaatgaaggaaagcgaggctgacagcgaggtgaagcatcaaccaattttcataaaagaaagattgaagctttttgaaatactgaagaaagaccatcagctcttacttgccatttatggaaaaaagggggatacaagcaacatcatcacagtaagagtggctgatgggcaaacagtgcaaggggaagtctggaaaacaacgccttaccaagtggctgctgaaattagtcaggaactggctgaaagcacggtaatagccaaagtcaatggtgaactgtgggacctggaccgcccattggaaggggactcttctctagagctgcttacatttgataatgaggaagctcaagctgtgtactggcactccagtgctcacattcttggggaggccatggagctttactatggaggccacctgtgctacggtccgcccattgaaaatggattttattatgacatgttcattgaagacagagcagtgtccagcacagaattgtcagccctggagaatatatgtaaagccatcataaaagaaaagcaaccttttgaaagactagaagtcagcaaggaaatcctcctggaaatgtttaagtacaataaatttaaatgccgcattctgaatgagaaagttaacactgcaactaccaccgtgtacaggtgcggtccattaattgacctttgcaaaggtccacatgtaagacacactggaaaaattaaaaccatcaaaatttttaagaattcctcaacatattgggagggcaatccggaaatggaaacattgcagaggatctatggaatatcctttcctgataacaagatgatgagagactgggaaaagttccaagaggaagcaaagaaccgagatcacaggaagatcgggaaggaacaagaacttttctttttccacgatttgagtcctggaagctgttttttccttcccagaggagccttcatttataatacgcttacagatttcatacgagaggaatatcacaaacgggacttcacggaggtgctctctcccaatatgtacaacagtaaactctgggaagcctcaggccactggcagcattacagcgagaacatgtttacctttgagattgaaaaggacacttttgccctcaaacccatgaattgtccagggcactgtctaatgtttgcccatcgtccacgatcttggagggaaatgcctattagatttgctgattttggagttctgcatagaaatgaactgtcggggactctcagcggcttgaccagagtgaggcgcttccagcaggacgatgctcacattttttgcacagtggagcagattgaagaagaaataaaggggtgtttgcagtttttgcaatctgtttactcaacatttggcttctcctttcaattaaacctgtcaacaaggccggaaaacttcctaggagagattgagatgtggaatgaggctgagaagcaactgcagaacagcttgatggactttggagaaccgtggaaaatgaacccaggagatggagcattttatggccctaaaattgacataaaaatcaaggatgctattggcagataccatcaatgtgctacaattcagctggacttccaactgcctattagatttaatctcacatatgttagtaaggatggggatgataagaagagacctgtgatcattcatcgagccattttgggatcagtggaaagaatgatagccattctttcagaaaactatggcggaaaatggcctttctggctatctcctcgtcaggtgatggtcatccctgtggggccaacttgtgaaaaatatgcacttcaggtatccagtgaattttttgaagaaggatttatggctgacgttgacttggatcacagttgtacactaaataagaaaatacgaaatgcacagctggctcagtataattttattttggaccggtttcttccttctgtgtggcaagaagcatggctgtag

SEQ ID NO: 191034 - DNA, 4109 bp, Homo sapiens
  Payload ID: 17734
  Gene Name: thrombomodulin
  Uniprot ID: P07204
  ENST ID: ENST00000377103
  CDS Start-End: 238-1965
ccttccttttcccgaacgtccagggagggagggccgggcacttataaactcgagccctggccgatccgcatgtcagaggctgcctcgcaggggctgcgcgcagcggcaagaagtgtctgggctgggacggacaggagaggctgtcgccatcggcgtcctgtgcccctctgctccggcacggccctgtcgcagtgcccgcgctttccccggcgcctgcacgcggcgcgcctgggtaacatgcttggggtcctggtccttggcgcgctggccctggccggcctggggttccccgcacccgcagagccgcagccgggtggcagccagtgcgtcgagcacgactgcttcgcgctctacccgggccccgcgaccttcctcaatgccagtcagatctgcgacggactgcggggccacctaatgacagtgcgctcctcggtggctgccgatgtcatttccttgctactgaacggcgacggcggcgttggccgccggcgcctctggatcggcctgcagctgccacccggctgcggcgaccccaagcgcctcgggcccctgcgcggcttccagtgggttacgggagacaacaacaccagctatagcaggtgggcacggctcgacctcaatggggctcccctctgcggcccgttgtgcgtcgctgtctccgctgctgaggccactgtgcccagcgagccgatctgggaggagcagcagtgcgaagtgaaggccgatggcttcctctgcgagttccacttcccagccacctgcaggccactggctgtggagcccggcgccgcggctgccgccgtctcgatcacctacggcaccccgttcgcggcccgcggagcggacttccaggcgctgccggtgggcagctccgccgcggtggctcccctcggcttacagctaatgtgcaccgcgccgcccggagcggtccaggggcactgggccagggaggcgccgggcgcttgggactgcagcgtggagaacggcggctgcgagcacgcgtgcaatgcgatccctggggctccccgctgccagtgcccagccggcgccgccctgcaggcagacgggcgctcctgcaccgcatccgcgacgcagtcctgcaacgacctctgcgagcacttctgcgttcccaaccccgaccagccgggctcctactcgtgcatgtgcgagaccggctaccggctggcggccgaccaacaccggtgcgaggacgtggatgactgcatactggagcccagtccgtgtccgcagcgctgtgtcaacacacagggtggcttcgagtgccactgctaccctaactacgacctggtggacggcgagtgtgtggagcccgtggacccgtgcttcagagccaactgcgagtaccagtgccagcccctgaaccaaactagctacctctgcgtctgcgccgagggcttcgcgcccattccccacgagccgcacaggtgccagatgttttgcaaccagactgcctgtccagccgactgcgaccccaacacccaggctagctgtgagtgccctgaaggctacatcctggacgacggtttcatctgcacggacatcgacgagtgcgaaaacggcggcttctgctccggggtgtgccacaacctccccggtaccttcgagtgcatctgcgggcccgactcggcccttgcccgccacattggcaccgactgtgactccggcaaggtggacggtggcgacagcggctctggcgagcccccgcccagcccgacgcccggctccaccttgactcctccggccgtggggctcgtgcattcgggcttgctcataggcatctccatcgcgagcctgtgcctggtggtggcgcttttggcgctcctctgccacctgcgcaagaagcagggcgccgccagggccaagatggagtacaagtgcgcggccccttccaaggaggtagtgctgcagcacgtgcggaccgagcggacgccgcagagactctgagcggcctccgtccaggagcctggctccgtccaggagcctgtgcctcctcacccccagctttgctaccaaagcaccttagctggcattacagctggagaagaccctccccgcaccccccaagctgttttcttctattccatggctaactggcgagggggtgattagagggaggagaatgagcctcggcctcttccgtgacgtcactggaccactgggcaatgatggcaattttgtaacgaagacacagactgcgatttgtcccaggtcctcactaccgggcgcaggagggtgagcgttattggtcggcagccttctgggcagaccttgacctcgtgggctagggatgactaaaatatttattttttttaagtatttaggtttttgtttgtttcctttgttcttacctgtatgtctccagtatccactttgcacagctctccggtctctctctctctacaaactcccacttgtcatgtgacaggtaaactatcttggtgaatttttttttcctagccctctcacatttatgaagcaagccccacttattccccattcttcctagttttctcctcccaggaactgggccaactcacctgagtcaccctacctgtgcctgaccctacttcttttgctcttagctgtctgctcagacagaacccctacatgaaacagaaacaaaaacactaaaaataaaaatggccatttgctttttcaccagatttgctaatttatcctgaaatttcagattcccagagcaaaataattttaaacaaaggttgagatgtaaaaggtattaaattgatgttgctggactgtcatagaaattacacccaaagaggtatttatctttacttttaaacagtgagcctgaattttgttgctgttttgatttgtactgaaaaatggtaattgttgctaatcttcttatgcaatttccttttttgttattattacttatttttgacagtgttgaaaatgttcagaaggttgctctagattgagagaagagacaaacacctcccaggagacagttcaagaaagcttcaaactgcatgattcatgccaattagcaattgactgtcactgttccttgtcactggtagaccaaaataaaaccagctctactggtcttgtggaattgggagcttgggaatggatcctggaggatgcccaattagggcctagccttaatcaggtcctcagagaatttctaccatttcagagaggccttttggaatgtggcccctgaacaagaattggaagctgccctgcccatgggagctggttagaaatgcagaatcctaggctccaccccatccagttcatgagaatctatatttaacaagatctgcagggggtgtgtctgctcagtaatttgaggacaaccattccagactgcttccaattttctggaatacatgaaatatagatcagttataagtagcaggccaagtcaggcccttattttcaagaaactgaggaattttctttgtgtagctttgctctttggtagaaaaggctaggtacacagctctagacactgccacacagggtctgcaaggtctttggttcagctaagctaggaatgaaatcctgcttcagtgtatggaaataaatgtatcatagaaatgtaacttttgtaagacaaaggttttcctcttctattttgtaaactcaaaatatttgtacatagttatttatttattggagataatctagaacacaggcaaaatccttgcttatgacatcacttgtacaaaataaacaaataacaatgtgctctcgggttgtgtgtctgttcacttttcctccctcagtgccctcattttatgtcattaaatggggctcacaaaccatgcaaatgctatgagatgcatggagggctgccctgtaccccagcacttgtgttgtctggtggtggcaccatctctgattttcaaagctttttccagaggctattattttcactgtagaatgatttcatgctatctctgtgtgcacaaatatttattttctttctgtaaccataacaacttcatatatgaggacttgtgtctctgtgcttttaaatgcataaatgcattataggatcatttgttggaatgaattaaataaacccttcctggggcatctggcgaatccca

SEQ ID NO: 191035 - DNA, 1855 bp, Homo sapiens
  Payload ID: 17735
  Gene Name: thrombopoietin
  Uniprot ID: P40225
  ENST ID: ENST00000204615
  CDS Start-End: 216-1277
tcttcctacccatctgctccccagagggctgcctgctgtgcacttgggtcctggagcccttctccacccggatagattcttcacccttggcccgcctttgccccaccctactctgcccagaagtgcaagagcctaagccgcctccatggccccaggaaggattcaggggagaggccccaaacagggagccacgccagccagacaccccggccagaatggagctgactgaattgctcctcgtggtcatgcttctcctaactgcaaggctaacgctgtccagcccggctcctcctgcttgtgacctccgagtcctcagtaaactgcttcgtgactcccatgtccttcacagcagactgagccagtgcccagaggttcaccctttgcctacacctgtcctgctgcctgctgtggactttagcttgggagaatggaaaacccagatggaggagaccaaggcacaggacattctgggagcagtgacccttctgctggagggagtgatggcagcacggggacaactgggacccacttgcctctcatccctcctggggcagctttctggacaggtccgtctcctccttggggccctgcagagcctccttggaacccagcttcctccacagggcaggaccacagctcacaaggatcccaatgccatcttcctgagcttccaacacctgctccgaggaaaggtgcgtttcctgatgcttgtaggagggtccaccctctgcgtcaggcgggccccacccaccacagctgtccccagcagaacctctctagtcctcacactgaacgagctcccaaacaggacttctggattgttggagacaaacttcactgcctcagccagaactactggctctgggcttctgaagtggcagcagggattcagagccaagattcctggtctgctgaaccaaacctccaggtccctggaccaaatccccggatacctgaacaggatacacgaactcttgaatggaactcgtggactctttcctggaccctcacgcaggaccctaggagccccggacatttcctcaggaacatcagacacaggctccctgccacccaacctccagcctggatattctccttccccaacccatcctcctactggacagtatacgctcttccctcttccacccaccttgcccacccctgtggtccagctccaccccctgcttcctgacccttctgctccaacgcccacccctaccagccctcttctaaacacatcctacacccactcccagaatctgtctcaggaagggtaaggttctcagacactgccgacatcagcattgtctcgtgtacagctcccttccctgcagggcgcccctgggagacaactggacaagatttcctactttctcctgaaacccaaagccctggtaaaagggatacacaggactgaaaagggaatcatttttcactgtacattataaaccttcagaagctatttttttaagctatcagcaatactcatcagagcagctagctctttggtctattttctgcagaaatttgcaactcactgattctctacatgctctttttctgtgataactctgcaaaggcctgggctggcctggcagttgaacagagggagagactaaccttgagtcagaaaacagagaaagggtaatttcctttgcttcaaattcaaggccttccaacgcccccatcccctttactatcattctcagtgggactctgatcccatattcttaacagatctttactcttgagaaatgaataagctttctctcagaaatgctgtccctatacactagacaaaactgagcctgtataaggaataaatgggagcgccgaaaagctccctaaaaagcaa

SEQ ID NO: 191036 - DNA, 1505 bp, Homo sapiens
  Payload ID: 17735
  Gene Name: thrombopoietin
  Uniprot ID: P40225
  ENST ID: ENST00000445696
  CDS Start-End: 212-1261
cctacccatctgctccccagagggctgcctgctgtgcacttgggtcctggagcccttctccacccggatagattcttcacccttggcccgcctttgccccaccctactctgcccagaagtgcaagagcctaagccgcctccatggccccaggaaggattcaggggagaggccccaaacagggagccacgccagccagacaccccggccagaatggagctgactgaattgctcctcgtggtcatgcttctcctaactgcaaggctaacgctgtccagcccggctcctcctgcttgtgacctccgagtcctcagtaaactgcttcgtgactcccatgtccttcacagcagactgagccagtgcccagaggttcaccctttgcctacacctgtcctgctgcctgctgtggactttagcttgggagaatggaaaacccagatggaggagaccaaggcacaggacattctgggagcagtgacccttctgctggagggagtgatggcagcacggggacaactgggacccacttgcctctcatccctcctggggcagctttctggacaggtccgtctcctccttggggccctgcagagcctccttggaacccagggcaggaccacagctcacaaggatcccaatgccatcttcctgagcttccaacacctgctccgaggaaaggtgcgtttcctgatgcttgtaggagggtccaccctctgcgtcaggcgggccccacccaccacagctgtccccagcagaacctctctagtcctcacactgaacgagctcccaaacaggacttctggattgttggagacaaacttcactgcctcagccagaactactggctctgggcttctgaagtggcagcagggattcagagccaagattcctggtctgctgaaccaaacctccaggtccctggaccaaatccccggatacctgaacaggatacacgaactcttgaatggaactcgtggactctttcctggaccctcacgcaggaccctaggagccccggacatttcctcaggaacatcagacacaggctccctgccacccaacctccagcctggatattctccttccccaacccatcctcctactggacagtatacgctcttccctcttccacccaccttgcccacccctgtggtccagctccaccccctgcttcctgacccttctgctccaacgcccacccctaccagccctcttctaaacacatcctacacccactcccagaatctgtctcaggaagggtaaggttctcagacactgccgacatcagcattgtctcgtgtacagctcccttccctgcagggcgcccctgggagacaactggacaagatttcctactttctcctgaaacccaaagccctggtaaaagggatacacaggactgaaaagggaatcatttttcactgtacattataaaccttcagaagctatttttttaagctatcagcaatactcatcagagcagctagctctttggtctattttctgc

SEQ ID NO: 191037 - DNA, 1132 bp, Homo sapiens
  Payload ID: 17735
  Gene Name: thrombopoietin
  ENST ID: ENST00000421442
  CDS Start-End: 1-861
atggagctgactgaattgctcctcgtggtcatgcttctcctaactgcaaggctaacgctgtccagcccggctcctcctgcttgtgacctccgagtcctcagtaaactgcttcgtgactcccatgtccttcacagcagactgagccagtgcccagaggttcaccctttgcctacacctgtcctgctgcctgctgtggactttagcttgggagaatggaaaacccagatggaggagaccaaggcacaggacattctgggagcagtgacccttctgctggagggagtgatggcagcacggggacaactgggacccacttgcctctcatccctcctggggcagctttctggacaggtccgtctcctccttggggccctgcagagcctccttggaacccagcttcctccacagggcaggaccacagctcacaaggatcccaatgccatcttcctgagcttccaacacctgctccgaggaaaggacttctggattgttggagacaaacttcactgcctcagccagaactactggctctgggcttctgaagtggcagcagggattcagagccaagattcctggtctgctgaaccaaacctccaggtccctggaccaaatccccggatacctgaacaggatacacgaactcttgaatggaactcgtggactctttcctggaccctcacgcaggaccctaggagccccggacatttcctcaggaacatcagacacaggctccctgccacccaacctccagcctggatattctccttccccaacccatcctcctactggacagtatacgctcttccctcttccacccaccttgcccacccctgtggtccagctccaccccctgcttcctgacccttctgctccaacgcccacccctaccagccctcttctaaacacatcctacacccactcccagaatctgtctcaggaagggtaaggttctcagacactgccgacatcagcattgtctcgtgtacagctcccttccctgcagggcgcccctgggagacaactggacaagatttcctactttctcctgaaacccaaagccctggtaaaagggatacacaggactgaaaagggaatcatttttcactgtacattataaaccttcagaagctat

SEQ ID NO: 191038 - DNA, 7775 bp, Homo sapiens
  Payload ID: 17736
  Gene Name: thrombospondin 1
  Uniprot ID: P07996
  ENST ID: ENST00000260356
  CDS Start-End: 166-3678
agctggcctgcgagttcagggctcctgtcgctctccaggagcaacctctactccggacgcacaggcattccccgcgcccctccagccctcgccgccctcgccaccgctcccggccgccgcgctccggtacacacaggatccctgctgggcaccaacagctccaccatggggctggcctggggactaggcgtcctgttcctgatgcatgtgtgtggcaccaaccgcattccagagtctggcggagacaacagcgtgtttgacatctttgaactcaccggggccgcccgcaaggggtctgggcgccgactggtgaagggccccgacccttccagcccagctttccgcatcgaggatgccaacctgatcccccctgtgcctgatgacaagttccaagacctggtggatgctgtgcgggcagaaaagggtttcctccttctggcatccctgaggcagatgaagaagacccggggcacgctgctggccctggagcggaaagaccactctggccaggtcttcagcgtggtgtccaatggcaaggcgggcaccctggacctcagcctgaccgtccaaggaaagcagcacgtggtgtctgtggaagaagctctcctggcaaccggccagtggaagagcatcaccctgtttgtgcaggaagacagggcccagctgtacatcgactgtgaaaagatggagaatgctgagttggacgtccccatccaaagcgtcttcaccagagacctggccagcatcgccagactccgcatcgcaaaggggggcgtcaatgacaatttccagggggtgctgcagaatgtgaggtttgtctttggaaccacaccagaagacatcctcaggaacaaaggctgctccagctctaccagtgtcctcctcacccttgacaacaacgtggtgaatggttccagccctgccatccgcactaactacattggccacaagacaaaggacttgcaagccatctgcggcatctcctgtgatgagctgtccagcatggtcctggaactcaggggcctgcgcaccattgtgaccacgctgcaggacagcatccgcaaagtgactgaagagaacaaagagttggccaatgagctgaggcggcctcccctatgctatcacaacggagttcagtacagaaataacgaggaatggactgttgatagctgcactgagtgtcactgtcagaactcagttaccatctgcaaaaaggtgtcctgccccatcatgccctgctccaatgccacagttcctgatggagaatgctgtcctcgctgttggcccagcgactctgcggacgatggctggtctccatggtccgagtggacctcctgttctacgagctgtggcaatggaattcagcagcgcggccgctcctgcgatagcctcaacaaccgatgtgagggctcctcggtccagacacggacctgccacattcaggagtgtgacaagagatttaaacaggatggtggctggagccactggtccccgtggtcatcttgttctgtgacatgtggtgatggtgtgatcacaaggatccggctctgcaactctcccagcccccagatgaacgggaaaccctgtgaaggcgaagcgcgggagaccaaagcctgcaagaaagacgcctgccccatcaatggaggctggggtccttggtcaccatgggacatctgttctgtcacctgtggaggaggggtacagaaacgtagtcgtctctgcaacaaccccacaccccagtttggaggcaaggactgcgttggtgatgtaacagaaaaccagatctgcaacaagcaggactgtccaattgatggatgcctgtccaatccctgctttgccggcgtgaagtgtactagctaccctgatggcagctggaaatgtggtgcttgtccccctggttacagtggaaatggcatccagtgcacagatgttgatgagtgcaaagaagtgcctgatgcctgcttcaaccacaatggagagcaccggtgtgagaacacggaccccggctacaactgcctgccctgccccccacgcttcaccggctcacagcccttcggccagggtgtcgaacatgccacggccaacaaacaggtgtgcaagccccgtaacccctgcacggatgggacccacgactgcaacaagaacgccaagtgcaactacctgggccactatagcgaccccatgtaccgctgcgagtgcaagcctggctacgctggcaatggcatcatctgcggggaggacacagacctggatggctggcccaatgagaacctggtgtgcgtggccaatgcgacttaccactgcaaaaaggataattgccccaaccttcccaactcagggcaggaagactatgacaaggatggaattggtgatgcctgtgatgatgacgatgacaatgataaaattccagatgacagggacaactgtccattccattacaacccagctcagtatgactatgacagagatgatgtgggagaccgctgtgacaactgtccctacaaccacaacccagatcaggcagacacagacaacaatggggaaggagacgcctgtgctgcagacattgatggagacggtatcctcaatgaacgggacaactgccagtacgtctacaatgtggaccagagagacactgatatggatggggttggagatcagtgtgacaattgccccttggaacacaatccggatcagctggactctgactcagaccgcattggagatacctgtgacaacaatcaggatattgatgaagatggccaccagaacaatctggacaactgtccctatgtgcccaatgccaaccaggctgaccatgacaaagatggcaagggagatgcctgtgaccacgatgatgacaacgatggcattcctgatgacaaggacaactgcagactcgtgcccaatcccgaccagaaggactctgacggcgatggtcgaggtgatgcctgcaaagatgattttgaccatgacagtgtgccagacatcgatgacatctgtcctgagaatgttgacatcagtgagaccgatttccgccgattccagatgattcctctggaccccaaagggacatcccaaaatgaccctaactgggttgtacgccatcagggtaaagaactcgtccagactgtcaactgtgatcctggactcgctgtaggttatgatgagtttaatgctgtggacttcagtggcaccttcttcatcaacaccgaaagggacgatgactatgctggatttgtctttggctaccagtccagcagccgcttttatgttgtgatgtggaagcaagtcacccagtcctactgggacaccaaccccacgagggctcagggatactcgggcctttctgtgaaagttgtaaactccaccacagggcctggcgagcacctgcggaacgccctgtggcacacaggaaacacccctggccaggtgcgcaccctgtggcatgaccctcgtcacataggctggaaagatttcaccgcctacagatggcgtctcagccacaggccaaagacgggtttcattagagtggtgatgtatgaagggaagaaaatcatggctgactcaggacccatctatgataaaacctatgctggtggtagactagggttgtttgtcttctctcaagaaatggtgttcttctctgacctgaaatacgaatgtagagatccctaatcatcaaattgttgattgaaagactgatcataaaccaatgctggtattgcaccttctggaactatgggcttgagaaaacccccaggatcacttctccttggcttccttcttttctgtgcttgcatcagtgtggactcctagaacgtgcgacctgcctcaagaaaatgcagttttcaaaaacagactcagcattcagcctccaatgaataagacatcttccaagcatataaacaattgctttggtttccttttgaaaaagcatctacttgcttcagttgggaaggtgcccattccactctgcctttgtcacagagcagggtgctattgtgaggccatctctgagcagtggactcaaaagcattttcaggcatgtcagagaagggaggactcactagaattagcaaacaaaaccaccctgacatcctccttcaggaacacggggagcagaggccaaagcactaaggggagggcgcatacccgagacgattgtatgaagaaaatatggaggaactgttacatgttcggtactaagtcattttcaggggattgaaagactattgctggatttcatgatgctgactggcgttagctgattaacccatgtaaataggcacttaaatagaagcaggaaagggagacaaagactggcttctggacttcctccctgatccccacccttactcatcacctgcagtggccagaattagggaatcagaatcaaaccagtgtaaggcagtgctggctgccattgcctggtcacattgaaattggtggcttcattctagatgtagcttgtgcagatgtagcaggaaaataggaaaacctaccatctcagtgagcaccagctgcctcccaaaggaggggcagccgtgcttatatttttatggttacaatggcacaaaattattatcaacctaactaaaacattccttttctcttttttcctgaattatcatggagttttctaattctctcttttggaatgtagattttttttaaatgctttacgatgtaaaatatttattttttacttattctggaagatctggctgaaggattattcatggaacaggaagaagcgtaaagactatccatgtcatctttgttgagagtcttcgtgactgtaagattgtaaatacagattatttattaactctgttctgcctggaaatttaggcttcatacggaaagtgtttgagagcaagtagttgacatttatcagcaaatctcttgcaagaacagcacaaggaaaatcagtctaataagctgctctgccccttgtgctcagagtggatgttatgggattctttttttctctgttttatcttttcaagtggaattagttggttatccatttgcaaatgttttaaattgcaaagaaagccatgaggtcttcaatactgttttaccccatcccttgtgcatatttccagggagaaggaaagcatatacacttttttctttcatttttccaaaagagaaaaaaatgacaaaaggtgaaacttacatacaaatattacctcatttgttgtgtgactgagtaaagaatttttggatcaagcggaaagagtttaagtgtctaacaaacttaaagctactgtagtacctaaaaagtcagtgttgtacatagcataaaaactctgcagagaagtattcccaataaggaaatagcattgaaatgttaaatacaatttctgaaagttatgttttttttctatcatctggtataccattgctttatttttataaattattttctcattgccattggaatagatatctcagattgtgtagatatgctatttaaataatttatcaggaaatactgcctgtagagttagtatttctatttttatataatgtttgcacactgaattgaagaattgttggttttttcttttttttgttttgtttttttttttttttttttttgcttttgacctcccatttttactatttgccaatacctttttctaggaatgtgcttttttttgtacacatttttatccattttacattctaaagcagtgtaagttgtatattactgtttcttatgtacaaggaacaacaataaatcatatggaaatttatatttatacttactgtatccatgcttatttgttctctactggctttatgtcatgaagtatatgcgtaaataccattcataaatcaatatagcatatacaaaaataaattacagtaagtcatagcaacattcacagtttgtatgtgattgagaaagactgagttgctcaggcctaggcttagaatttgctgcgtttgtggaataaaagaacaaaatgatacattagcctgccatatcaaaaacatataaaagagaaattatccctaagtcaagggcccccataagaataaaatttcttattaaggtcattagatgtcattgaatccttttcaaagtgcagtatgaaaacaaagggaaaaacactgaagcacacgcaactctcacagcgacattttctgacccacgaatgatgccttgggtgggcaacacgattgcatgttgtggagacacttcggaagtaaatgtggatgagggaggagctgtccttgcaatgttgagccaagcattacagatacctcctcttgaagaaggaataataagtttaatcaaaaaagaagactaaaaaatgtaaaatttggaaggaatccataaatgcgtgtgtgtctaaatacaaattatcatgtgaagaaaaggcccaagtgtaccaataagcagaccttgatttttggatgggctaattatgaatgtggaatactgaccagttaatttccagttttaatgaaaacagatcaaagaagaaattttatgagtaggttaaaggtctggctttgaggtctattaaacactagaaaggactggctgggtgagataaaatcttccttgttgattttcactctcattctataaatactcatctttctgagtagccatgatcacatacaaatgtaaattgccaaatcattttatagtaccaaggtgaagaagcaggaactagaaagtgttgataatagctgtggagttaggaaaactgatgtgaaggaaataattctttgaaatggcaaagaattaaataccatcattcattatcagaagagttcaacgtttgaagtgctgggagataattctaattcattcttggatagtgaagcaaaactgattgaaaataccaagataagacagaaaaagtgactggaaagaggagcttttcttccaggcatgttccagtttcaccctaagactgaccttcaaataatcaggttgtactgaaataaaggacttgttaaaaattaaaattatgtcatcgagatgatagcttttttcctcctccaacagtttattgtcatgtgttgtgggagagctcgagtgaagagcaataaactccaggtcttataagaatgtacatacaataaaggtggtgccagcagtttttttttttctaaagagtcacatgtagaaaagcctccagtattaagctcctgaattcattccttaaataaattggctctctctctcttctataatttctttttctttttatttttgagatgaagtcttgctctgtcgcccaggctggagtgcagtgacacaatctcggctcactgcaacctctgcctccccggttcaagcaattctccctcctgcctcagcctcccaagtagctgggactacaagcgcccgccaccaagcctggctaattctgtatttttagtaaagacggggtttcaccttgttccggacaaacactaagccctaaagggaaatccaaaataaaaacatctatttttaataacactttctatctaaatcagggtgactttttaaaaaaaatccggaagctttttgttgaattacgttacagacttagttaccagtccttgttagagttaccttcagttgacatgctgtgaatggtcccacctcttttatggcagaattcattacttaaaataactctattttcttcccccttacctaaataacagaaaggctcactatgtcccaaatatcattggcagaagcaaactataaagtcataagccctttgcagtgcaagtctagaaataatttt

SEQ ID NO: 191039 - DNA, 582 bp, Homo sapiens
  Payload ID: 17736
  Gene Name: thrombospondin 1
  ENST ID: ENST00000397591
  CDS Start-End: 301-582
agccgctgcgcccgagctggcctgcgagttcagggctcctgtcgctctccaggagcaacctctactccggacgcacaggcattccccgcgcccctccagccctcgccgccctcgccaccgctcccggccgccgcgctccggtacacacagcaaacgcggggtcaaagagggatggtcccggccctgtccccatgcccagccccgtttctgcgcaccgtccctccctgcctagctgatctctgaccctcggctcttgtgcttcctgctacaggatccctgctgggcaccaacagctccaccatggggctggcctggggactaggcgtcctgttcctgatgcatgtgtgtggcaccaaccgcattccagagtctggcggagacaacagcgtgtttgacatctttgaactcaccggggccgcccgcaaggggtctgggcgccgactggtgaagggccccgacccttccagcccagctttccgcatcgaggatgccaacctgatcccccctgtgcctgatgacaagttccaagacctggtggatgctgtgcgggcagaaaagggtttcctccttctggcatccctg

SEQ ID NO: 191040 - DNA, 5811 bp, Homo sapiens
  Payload ID: 17737
  Gene Name: thrombospondin 2
  Uniprot ID: P35442
  ENST ID: ENST00000366787
  CDS Start-End: 251-3769
aggaggaggagacggcatccagtacagaggggctggacttggacccctgcagcagccctgcacaggagaagcggcatataaagccgcgctgcccgggagccgctcggccacgtccaccggagcatcctgcactgcagggccggtctctcgctccagcagagcctgcgcctttctgactcggtccggaacactgaaaccagtcatcactgcatctttttggcaaaccaggagctcagctgcaggaggcaggatggtctggaggctggtcctgctggctctgtgggtgtggcccagcacgcaagctggtcaccaggacaaagacacgaccttcgaccttttcagtatcagcaacatcaaccgcaagaccattggcgccaagcagttccgcgggcccgaccccggcgtgccggcttaccgcttcgtgcgctttgactacatcccaccggtgaacgcagatgacctcagcaagatcaccaagatcatgcggcagaaggagggcttcttcctcacggcccagctcaagcaggacggcaagtccaggggcacgctgttggctctggagggccccggtctctcccagaggcagttcgagatcgtctccaacggccccgcggacacgctggatctcacctactggattgacggcacccggcatgtggtctccctggaggacgtcggcctggctgactcgcagtggaagaacgtcaccgtgcaggtggctggcgagacctacagcttgcacgtgggctgcgacctcatagacagcttcgctctggacgagcccttctacgagcacctgcaggcggaaaagagccggatgtacgtggccaaaggctctgccagagagagtcacttcaggggtttgcttcagaacgtccacctagtgtttgaaaactctgtggaagatattctaagcaagaagggttgccagcaaggccagggagctgagatcaacgccatcagtgagaacacagagacgctgcgcctgggtccgcatgtcaccaccgagtacgtgggccccagctcggagaggaggcccgaggtgtgcgaacgctcgtgcgaggagctgggaaacatggtccaggagctctcggggctccacgtcctcgtgaaccagctcagcgagaacctcaagagagtgtcgaatgataaccagtttctctgggagctcattggtggccctcctaagacaaggaacatgtcagcttgctggcaggatggccggttctttgcggaaaatgaaacgtgggtggtggacagctgcaccacgtgtacctgcaagaaatttaaaaccatttgccaccaaatcacctgcccgcctgcaacctgcgccagtccatcctttgtggaaggcgaatgctgcccttcctgcctccactcggtggacggtgaggagggctggtctccgtgggcagagtggacccagtgctccgtgacgtgtggctctgggacccagcagagaggccggtcctgtgacgtcaccagcaacacctgcttggggccctccatccagacacgggcttgcagtctgagcaagtgtgacacccgcatccggcaggacggcggctggagccactggtcaccttggtcttcatgctctgtgacctgtggagttggcaatatcacacgcatccgtctctgcaactccccagtgccccagatggggggcaagaattgcaaagggagtggccgggagaccaaagcctgccagggcgccccatgcccaatcgatggccgctggagcccctggtccccgtggtcggcctgcactgtcacctgtgccggtgggatccgggagcgcacccgggtctgcaacagccctgagcctcagtacggagggaaggcctgcgtgggggatgtgcaggagcgtcagatgtgcaacaagaggagctgccccgtggatggctgtttatccaacccctgcttcccgggagcccagtgcagcagcttccccgatgggtcctggtcatgcggctcctgccctgtgggcttcttgggcaatggcacccactgtgaggacctggacgagtgtgccctggtccccgacatctgcttctccaccagcaaggtgcctcgctgtgtcaacactcagcctggcttccactgcctgccctgcccgccccgatacagagggaaccagcccgtcggggtcggcctggaagcagccaagacggaaaagcaagtgtgtgagcccgaaaacccatgcaaggacaagacacacaactgccacaagcacgcggagtgcatctacctgggccacttcagcgaccccatgtacaagtgcgagtgccagacaggctacgcgggcgacgggctcatctgcggggaggactcggacctggacggctggcccaacctcaatctggtctgcgccaccaacgccacctaccactgcatcaaggataactgcccccatctgccaaattctgggcaggaagactttgacaaggacgggattggcgatgcctgtgatgatgacgatgacaatgacggtgtgaccgatgagaaggacaactgccagctcctcttcaatccccgccaggctgactatgacaaggatgaggttggggaccgctgtgacaactgcccttacgtgcacaaccctgcccagatcgacacagacaacaatggagagggtgacgcctgctccgtggacattgatggggacgatgtcttcaatgaacgagacaattgtccctacgtctacaacactgaccagagggacacggatggtgacggtgtgggggatcactgtgacaactgccccctggtgcacaaccctgaccagaccgacgtggacaatgaccttgttggggaccagtgtgacaacaacgaggacatagatgacgacggccaccagaacaaccaggacaactgcccctacatctccaacgccaaccaggctgaccatgacagagacggccagggcgacgcctgtgaccctgatgatgacaacgatggcgtccccgatgacagggacaactgccggcttgtgttcaacccagaccaggaggacttggacggtgatggacggggtgatatttgtaaagatgattttgacaatgacaacatcccagatattgatgatgtgtgtcctgaaaacaatgccatcagtgagacagacttcaggaacttccagatggtccccttggatcccaaagggaccacccaaattgatcccaactgggtcattcgccatcaaggcaaggagctggttcagacagccaactcggaccccggcatcgctgtaggttttgacgagtttgggtctgtggacttcagtggcacattctacgtaaacactgaccgggacgacgactatgccggcttcgtctttggttaccagtcaagcagccgcttctatgtggtgatgtggaagcaggtgacgcagacctactgggaggaccagcccacgcgggcctatggctactccggcgtgtccctcaaggtggtgaactccaccacggggacgggcgagcacctgaggaacgcgctgtggcacacggggaacacgccggggcaggtgcgaaccttatggcacgaccccaggaacattggctggaaggactacacggcctataggtggcacctgactcacaggcccaagactggctacatcagagtcttagtgcatgaaggaaaacaggtcatggcagactcaggacctatctatgaccaaacctacgctggcgggcggctgggtctatttgtcttctctcaagaaatggtctatttctcagacctcaagtacgaatgcagagatatttaaacaagatttgctgcatttccggcaatgccctgtgcatgccatggtccctagacacctcagttcattgtggtccttgtggcttctctctctagcagcacctcctgtcccttgaccttaactctgatggttcttcacctcctgccagcaaccccaaacccaagtgccttcagaggataaatatcaatggaactcagagatgaacatctaacccactagaggaaaccagtttggtgatatatgagactttatgtggagtgaaaattgggcatgccattacattgctttttcttgtttgtttaaaaagaatgacgtttacatataaaatgtaattacttattgtatttatgtgtatatggagttgaagggaatactgtgcataagccattatgataaattaagcatgaaaaatattgctgaactacttttggtgcttaaagttgtcactattcttgaattagagttgctctacaatgacacacaaatcccattaaataaattataaacaagggtcaattcaaatttgaagtaatgttttagtaaggagagattagaagacaacaggcatagcaaatgacataagctaccgattaactaatcggaacatgtaaaacagttacaaaaataaacgaactctcctcttgtcctacaatgaaagccctcatgtgcagtagagatgcagtttcatcaaagaacaaacatccttgcaaatgggtgtgacgcggttccagatgtggatttggcaaaacctcatttaagtaaaaggttagcagagcaaagtgcggtgctttagctgctgcttgtgccgctgtggcgtcggggaggctcctgcctgagcttccttccccagctttgctgcctgagaggaaccagagcagacgcacaggccggaaaaggcgcatctaacgcgtatctaggctttggtaactgcggacaagttgcttttacctgatttgatgatacatttcattaaggttccagttataaatattttgttaatatttattaagtgactatagaatgcaactccatttaccagtaacttattttaaatatgcctagtaacacatatgtagtataatttctagaaacaaacatctaataagtatataatcctgtgaaaatatgaggcttgataatattaggttgtcacgatgaagcatgctagaagctgtaacagaatacatagagaataatgaggagtttatgatggaaccttaaatatataatgttgccagcgattttagttcaatatttgttactgttatctatctgctgtatatggaattcttttaattcaaacgctgaaaagaatcagcatttagtcttgccaggcacacccaataatcagtcatgtgtaatatgcacaagtttgtttttgtttttgttttttttgttggttggtttgtttttttgctttaagttgcatgatctttctgcaggaaatagtcactcatcccactccacataaggggtttagtaagagaagtctgtctgtctgatgatggatagggggcaaatctttttcccctttctgttaatagtcatcacatttctatgccaaacaggaacaatccataactttagtcttaatgtacacattgcattttgataaaattaattttgttgtttcctttgaggttgatcgttgtgttgttgttttgctgcactttttacttttttgcgtgtggagctgtattcccgagaccaacgaagcgttgggatacttcattaaatgtagcgactgtcaacagcgtgcaggttttctgtttctgtgttgtggggtcaaccgtacaatggtgtgggagtgacgatgatgtgagtatttagaatgtaccatattttttgtaaattatttatgtttttctaaacaaatttatcgtataggttgatgaaacgtcatgtgttttgccaaagactgtaaatatttatttatgtgttcacatggtcaaaatttcaccactgaaaccctgcacttagctagaacctcatttttaaagattaacaacaggaaataaattgtaaaaaaggttttctatacatga

SEQ ID NO: 191041 - DNA, 437 bp, Homo sapiens
  Payload ID: 17737
  Gene Name: thrombospondin 2
  ENST ID: ENST00000435791
  CDS Start-End: 187-437
acattctgctccggtaacccatgcctgtggctcgctgggctaagtcagcccctggtgaagtttcatttgccgaattcatctctcatgacaacccgatgaggtgggcattttacatgacgctacgtttcattctacggatgaggaaactgagacagagaagttaagagctcagctgcaggaggcaggatggtctggaggctggtcctgctggctctgtgggtgtggcccagcacgcaagctggtcaccaggacaaagacacgaccttcgaccttttcagtatcagcaacatcaaccgcaagaccattggcgccaagcagttccgcgggcccgaccccggcgtgccggcttaccgcttcgtgcgctttgactacatcccaccggtgaacgcagatgacctcagcaagatcaccaagatcatgcggcagaaggagggctt

SEQ ID NO: 191042 - DNA, 5280 bp, Homo sapiens
  Payload ID: 17737
  Gene Name: thrombospondin 2
  Uniprot ID: P35442
  ENST ID: ENST00000617924
  CDS Start-End: 132-3650
gagcatcctgcactgcagggccggtctctcgctccagcagagcctgcgcctttctgactcggtccggaacactgaaaccagtcatcactgcatctttttggcaaaccaggagctcagctgcaggaggcaggatggtctggaggctggtcctgctggctctgtgggtgtggcccagcacgcaagctggtcaccaggacaaagacacgaccttcgaccttttcagtatcagcaacatcaaccgcaagaccattggcgccaagcagttccgcgggcccgaccccggcgtgccggcttaccgcttcgtgcgctttgactacatcccaccggtgaacgcagatgacctcagcaagatcaccaagatcatgcggcagaaggagggcttcttcctcacggcccagctcaagcaggacggcaagtccaggggcacgctgttggctctggagggccccggtctctcccagaggcagttcgagatcgtctccaacggccccgcggacacgctggatctcacctactggattgacggcacccggcatgtggtctccctggaggacgtcggcctggctgactcgcagtggaagaacgtcaccgtgcaggtggctggcgagacctacagcttgcacgtgggctgcgacctcatagacagcttcgctctggacgagcccttctacgagcacctgcaggcggaaaagagccggatgtacgtggccaaaggctctgccagagagagtcacttcaggggtttgcttcagaacgtccacctagtgtttgaaaactctgtggaagatattctaagcaagaagggttgccagcaaggccagggagctgagatcaacgccatcagtgagaacacagagacgctgcgcctgggtccgcatgtcaccaccgagtacgtgggccccagctcggagaggaggcccgaggtgtgcgaacgctcgtgcgaggagctgggaaacatggtccaggagctctcggggctccacgtcctcgtgaaccagctcagcgagaacctcaagagagtgtcgaatgataaccagtttctctgggagctcattggtggccctcctaagacaaggaacatgtcagcttgctggcaggatggccggttctttgcggaaaatgaaacgtgggtggtggacagctgcaccacgtgtacctgcaagaaatttaaaaccatttgccaccaaatcacctgcccgcctgcaacctgcgccagtccatcctttgtggaaggcgaatgctgcccttcctgcctccactcggtggacggtgaggagggctggtctccgtgggcagagtggacccagtgctccgtgacgtgtggctctgggacccagcagagaggccggtcctgtgacgtcaccagcaacacctgcttggggccctccatccagacacgggcttgcagtctgagcaagtgtgacacccgcatccggcaggacggcggctggagccactggtcaccttggtcttcatgctctgtgacctgtggagttggcaatatcacacgcatccgtctctgcaactccccagtgccccagatggggggcaagaattgcaaagggagtggccgggagaccaaagcctgccagggcgccccatgcccaatcgatggccgctggagcccctggtccccgtggtcggcctgcactgtcacctgtgccggtgggatccgggagcgcacccgggtctgcaacagccctgagcctcagtacggagggaaggcctgcgtgggggatgtgcaggagcgtcagatgtgcaacaagaggagctgccccgtggatggctgtttatccaacccctgcttcccgggagcccagtgcagcagcttccccgatgggtcctggtcatgcggctcctgccctgtgggcttcttgggcaatggcacccactgtgaggacctggacgagtgtgccctggtccccgacatctgcttctccaccagcaaggtgcctcgctgtgtcaacactcagcctggcttccactgcctgccctgcccgccccgatacagagggaaccagcccgtcggggtcggcctggaagcagccaagacggaaaagcaagtgtgtgagcccgaaaacccatgcaaggacaagacacacaactgccacaagcacgcggagtgcatctacctgggccacttcagcgaccccatgtacaagtgcgagtgccagacaggctacgcgggcgacgggctcatctgcggggaggactcggacctggacggctggcccaacctcaatctggtctgcgccaccaacgccacctaccactgcatcaaggataactgcccccatctgccaaattctgggcaggaagactttgacaaggacgggattggcgatgcctgtgatgatgacgatgacaatgacggtgtgaccgatgagaaggacaactgccagctcctcttcaatccccgccaggctgactatgacaaggatgaggttggggaccgctgtgacaactgcccttacgtgcacaaccctgcccagatcgacacagacaacaatggagagggtgacgcctgctccgtggacattgatggggacgatgtcttcaatgaacgagacaattgtccctacgtctacaacactgaccagagggacacggatggtgacggtgtgggggatcactgtgacaactgccccctggtgcacaaccctgaccagaccgacgtggacaatgaccttgttggggaccagtgtgacaacaacgaggacatagatgacgacggccaccagaacaaccaggacaactgcccctacatctccaacgccaaccaggctgaccatgacagagacggccagggcgacgcctgtgaccctgatgatgacaacgatggcgtccccgatgacagggacaactgccggcttgtgttcaacccagaccaggaggacttggacggtgatggacggggtgatatttgtaaagatgattttgacaatgacaacatcccagatattgatgatgtgtgtcctgaaaacaatgccatcagtgagacagacttcaggaacttccagatggtccccttggatcccaaagggaccacccaaattgatcccaactgggtcattcgccatcaaggcaaggagctggttcagacagccaactcggaccccggcatcgctgtaggttttgacgagtttgggtctgtggacttcagtggcacattctacgtaaacactgaccgggacgacgactatgccggcttcgtctttggttaccagtcaagcagccgcttctatgtggtgatgtggaagcaggtgacgcagacctactgggaggaccagcccacgcgggcctatggctactccggcgtgtccctcaaggtggtgaactccaccacggggacgggcgagcacctgaggaacgcgctgtggcacacggggaacacgccggggcaggtgcgaaccttatggcacgaccccaggaacattggctggaaggactacacggcctataggtggcacctgactcacaggcccaagactggctacatcagagtcttagtgcatgaaggaaaacaggtcatggcagactcaggacctatctatgaccaaacctacgctggcgggcggctgggtctatttgtcttctctcaagaaatggtctatttctcagacctcaagtacgaatgcagagatatttaaacaagatttgctgcatttccggcaatgccctgtgcatgccatggtccctagacacctcagttcattgtggtccttgtggcttctctctctagcagcacctcctgtcccttgaccttaactctgatggttcttcacctcctgccagcaaccccaaacccaagtgccttcagaggataaatatcaatggaactcagagatgaacatctaacccactagaggaaaccagtttggtgatatatgagactttatgtggagtgaaaattgggcatgccattacattgctttttcttgtttgtttaaaaagaatgacgtttacatataaaatgtaattacttattgtatttatgtgtatatggagttgaagggaatactgtgcataagccattatgataaattaagcatgaaaaatattgctgaactacttttggtgcttaaagttgtcactattcttgaattagagttgctctacaatgacacacaaatcccattaaataaattataaacaagggtcaattcaaatttgaagtaatgttttagtaaggagagattagaagacaacaggcatagcaaatgacataagctaccgattaactaatcggaacatgtaaaacagttacaaaaataaacgaactctcctcttgtcctacaatgaaagccctcatgtgcagtagagatgcagtttcatcaaagaacaaacatccttgcaaatgggtgtgacgcggttccagatgtggatttggcaaaacctcatttaagtaaaaggttagcagagcaaagtgcggtgctttagctgctgcttgtgccgctgtggcgtcggggaggctcctgcctgagcttccttccccagctttgctgcctgagaggaaccagagcagacgcacaggccggaaaaggcgcatctaacgcgtatctaggctttggtaactgcggacaagttgcttttacctgatttgatgatacatttcattaaggttccagttataaatattttgttaatatttattaagtgactatagaatgcaactccatttaccagtaacttattttaaatatgcctagtaacacatatgtagtataatttctagaaacaaacatctaataagtatataatcctgtgaaaatatgaggcttgataatattaggttgtcacgatgaagcatgctagaagctgtaacagaatacatagagaataatgaggagtttatgatggaaccttaaatatataatgttgccagcgattttagttcaatatttgttactgttatctatctgctgtatatggaattcttttaattcaaacgctgaaaagaatcagcatttagtcttgccaggcacacccaataatcagtcatgtgtaatatgcacaagtttgtttttgtttttgttttttttgttggttggtttgtttttttgctttaagttgcatgatctttctgcaggaaatagtcactcatcccactccacataaggggtttagtaagagaagtctgtctgtctgatgatggatagggggcaaatctttttcccctttctgttaatagtcatcacatttctatgccaaacaggaacaatccataactttagtcttaatgtacacattgcattttgataaaattaattttgttgtttc

SEQ ID NO: 191043 - DNA, 3145 bp, Homo sapiens
  Payload ID: 17738
  Gene Name: thrombospondin 3
  Uniprot ID: P49746
  ENST ID: ENST00000368378
  CDS Start-End: 22-2892
gtagtgagccggctgagaggcatggagacgcaggaacttcggggggccctggctcttctcctcctttgctttttcacatctgccagtcaggatctgcaggtaattgacctgctgactgtgggcgagtctcggcagatggtagctgtggcagagaagatccggacagccttgctcactgctggggacatctacctcttatccaccttccgcctgccccccaagcagggtggtgtcctctttggcctctattctcgccaagacaacactcgatggctggaggcctctgttgtaggcaagatcaacaaagtactggtgcgataccagcgggaggatggcaaagtccacgccgtgaacctacagcaagcgggcctggctgatgggcgcacacacacagttctcctgcgactccgaggtccctccagacccagccctgccctacatctctacgtggactgcaaactgggtgaccaacatgcaggccttccagcactggcccccattcctccagcggaggtcgatgggctggagattaggactggacagaaggcgtatttgaggatgcagggctttgtggaatctatgaaaattattctgggtgggtccatggcccgggtaggagccctgagtgagtgtccattccaaggggacgagtccatccacagtgcagtgaccaatgcactgcactccattctaggggagcagaccaaggcgctggtcacccaactcaccctcttcaaccagatcctggtggagctgcgggatgatatacgagaccaggtgaaggaaatgtccctgatccgaaacaccattatggagtgtcaggtgtgcggcttccatgagcagcgttcccactgcagccccaatccctgcttccgaggtgtggactgcatggaagtgtacgagtacccaggctaccgctgtgggccctgcccccctggcctgcagggcaacggcacccactgcagtgacatcaatgagtgtgctcacgctgacccctgtttcccgggctccagctgcatcaacaccatgcccggcttccactgtgaggcctgtcctcgagggtacaagggcacacaggtgtctggtgtgggcattgactatgcccgggccagcaaacaggtctgcaatgacatcgatgaatgcaacgatggcaacaatggtggctgtgacccaaactccatctgcaccaacactgtgggctctttcaagtgtggtccctgccgcctgggtttcctgggcaaccagagccagggctgcctcccagcccggacctgccacagcccagcccacagcccctgccacatccatgctcactgtctctttgaacgcaatggtgcagtgtcctgccagtgtaacgtgggctgggctgggaatgggaacgtgtgtgggactgacacagacatcgatggctacccagaccaagcactgccctgcatggacaacaacaaacactgcaaacaggacaactgccttttgacacccaactctgggcaggaagatgctgataatgatggtgtgggggaccagtgtgatgatgatgctgatggggatgggatcaagaatgttgaggacaactgccggctgttccccaacaaagaccagcagaactcagatacagattcatttggtgatgcctgtgacaattgccccaacgttcccaacaatgaccagaaggacacagatggcaatggggaaggagatgcctgtgacaacgacgtggatggggatggcatccccaatggattggacaattgccctaaagtccccaacccactacagacagacagggatgaggacggggtgggagatgcttgcgacagctgccctgaaatgagcaatcctacccagacagatgcagacagcgacctggtgggggatgtctgtgatactaatgaagacagcgatggggatgggcatcaggacaccaaggacaactgcccacagctgccaaatagctcccagctggactctgataacgatggacttggagatgagtgtgatggggatgatgacaatgatggcatcccagattatgtgcctcctggtcccgataactgccgcctggtacccaatcccaatcagaaggactcagatggcaatggcgttggtgatgtgtgtgaggatgactttgacaatgatgctgtggtcgaccccctggatgtgtgtcctgaaagtgcagaggtaacgcttacggattttcgggcctatcagaccgtcgtcctggatcctgagggtgatgctcagattgacccaaactgggttgtgctcaaccagggcatggaaatcgttcagaccatgaacagtgaccctggcttggcagttggatacacggccttcaatggtgtggactttgaaggcaccttccatgtgaacacagtgactgatgatgactacgcaggctttctcttcagttatcaagacagtggccgcttctacgtagtcatgtggaagcagaccgagcagacctactggcaggctacacccttccgggcggttgcccagcccgggctgcagctcaaggcagtgacatcagtgtctggcccaggtgagcacctccgaaatgccctgtggcatactggccacacccctgatcaggtacgactgctgtggacagacccacgaaatgtgggctggcgggacaagacctcctatcgctggcagcttctgcaccggcctcaagttggctacattcgggtgaagctctatgagggaccccagcttgtggcggattctggggtgatcattgacacatccatgcgaggggggcgtcttggtgtattctgcttctcccaagaaaacataatttggtccaatctccagtatcgatgcaatgacacagtgcctgaggactttgagccattccggaggcagctgctccagggaagggtgtgaggaggaggccaccagattcagaattcagaattttagaccctttggccttggggtccatcctggagaccctgaggtctaagctacagcccctcagccaaccacagacccttctctggctcccaaaaggagttcagtcccagaggggtggtcaccccacccttcaggggatgagaagttttcaaggggtattactcaggcactaaccccaggaaagatgacagcacattgccataaagttttggttgttttctaa

SEQ ID NO: 191044 - DNA, 2727 bp, Homo sapiens
  Payload ID: 17738
  Gene Name: thrombospondin 3
  Uniprot ID: P49746
  ENST ID: ENST00000457183
  CDS Start-End: 42-2552
cagctgcctgcctgccaggggtagtgagccggctgagaggcatggagacgcaggaacttcggggggccctggctcttctcctcctttgctttttcacatctgccagtcaggatctgcaggtaattgacctgctgactgtgggcgagtctcggcagatggtagctgtggcagagaagatccggacagccttgctcactgctggggacatctacctcttatccaccttccgcctgccccccaagcagggtggtgtcctctttggcctctattctcgccaagacaacactcgatggctggaggcctctgttgtaggcaagatcaacaaagtgaccaatgcactgcactccattctaggggagcagaccaaggcgctggtcacccaactcaccctcttcaaccagatcctggtggagctgcgggatgatatacgagaccaggtgaaggaaatgtccctgatccgaaacaccattatggagtgtcaggtgtgcggcttccatgagcagcgttcccactgcagccccaatccctgcttccgaggtgtggactgcatggaagtgtacgagtacccaggctaccgctgtgggccctgcccccctggcctgcagggcaacggcacccactgcagtgacatcaatgagtgtgctcacgctgacccctgtttcccgggctccagctgcatcaacaccatgcccggcttccactgtgaggcctgtcctcgagggtacaagggcacacaggtgtctggtgtgggcattgactatgcccgggccagcaaacaggtctgcaatgacatcgatgaatgcaacgatggcaacaatggtggctgtgacccaaactccatctgcaccaacactgtgggctctttcaagtgtggtccctgccgcctgggtttcctgggcaaccagagccagggctgcctcccagcccggacctgccacagcccagcccacagcccctgccacatccatgctcactgtctctttgaacgcaatggtgcagtgtcctgccagtgtaacgtgggctgggctgggaatgggaacgtgtgtgggactgacacagacatcgatggctacccagaccaagcactgccctgcatggacaacaacaaacactgcaaacaggacaactgccttttgacacccaactctgggcaggaagatgctgataatgatggtgtgggggaccagtgtgatgatgatgctgatggggatgggatcaagaatgttgaggacaactgccggctgttccccaacaaagaccagcagaactcagatacagattcatttggtgatgcctgtgacaattgccccaacgttcccaacaatgaccagaaggacacagatggcaatggggaaggagatgcctgtgacaacgacgtggatggggatggcatccccaatggattggacaattgccctaaagtccccaacccactacagacagacagggatgaggacggggtgggagatgcttgcgacagctgccctgaaatgagcaatcctacccagacagatgcagacagcgacctggtgggggatgtctgtgatactaatgaagacagcgatggggatgggcatcaggacaccaaggacaactgcccacagctgccaaatagctcccagctggactctgataacgatggacttggagatgagtgtgatggggatgatgacaatgatggcatcccagattatgtgcctcctggtcccgataactgccgcctggtacccaatcccaatcagaaggactcagatggcaatggcgttggtgatgtgtgtgaggatgactttgacaatgatgctgtggtcgaccccctggatgtgtgtcctgaaagtgcagaggtaacgcttacggattttcgggcctatcagaccgtcgtcctggatcctgagggtgatgctcagattgacccaaactgggttgtgctcaaccagggcatggaaatcgttcagaccatgaacagtgaccctggcttggcagttggatacacggccttcaatggtgtggactttgaaggcaccttccatgtgaacacagtgactgatgatgactacgcaggctttctcttcagttatcaagacagtggccgcttctacgtagtcatgtggaagcagaccgagcagacctactggcaggctacacccttccgggcggttgcccagcccgggctgcagctcaaggcagtgacatcagtgtctggcccaggtgagcacctccgaaatgccctgtggcatactggccacacccctgatcaggtacgactgctgtggacagacccacgaaatgtgggctggcgggacaagacctcctatcgctggcagcttctgcaccggcctcaagttggctacattcgggtgaagctctatgagggaccccagcttgtggcggattctggggtgatcattgacacatccatgcgaggggggcgtcttggtgtattctgcttctcccaagaaaacataatttggtccaatctccagtatcgatgcaatgacacagtgcctgaggactttgagccattccggaggcagctgctccagggaagggtgtgaggaggaggccaccagattcagaattcagaattttagaccctttggccttggggtccatcctggagaccctgaggtctaagctacagcccctcagccaaccacagacccttctctggctcccaaaaggagttcagtcccagaggggtggtcaccccacccttcaggggatgagaag

SEQ ID NO: 191045 - DNA, 1833 bp, Homo sapiens
  Payload ID: 17738
  Gene Name: thrombospondin 3
  ENST ID: ENST00000428962
  CDS Start-End: 24-1226
gggtagtgagccggctgagaggcatggagacgcaggaacttcggggggccctggctcttctcctcctttgctttttcacatctgccagtcaggatctgcaggtaattgacctgctgactgtgggcgagtctcggcagatggtagctgtggcagagaagatccggacagccttgctcactgctggggacatctacctcttatccaccttccgcctgccccccaagcagggtggtgtcctctttggcctctattctcgccaagacaacactcgatggctggaggcctctgttgtaggcaagatcaacaaagtgaccaatgcactgcactccattctaggtgaaggaaatgtccctgatccgaaacaccattatggagtgtcaggcttccatgagcagcgttcccactgcagccccaatccctgcttccgaggtgtggactgcatggaagtgtacgagtacccaggctaccgctgtgggccctgcccccctggcctgcagggcaacggcacccactgcagtgacatcaatgagtgtgctcacgctgacccctgtttcccgggctccagctgcatcaacaccatgcccggcttccactgtgaggcctgtcctcgagggtacaagggcacacaggtgtctggtgtgggcattgactatgcccgggccagcaaacaggtctgcaatgacatcgatgaatgcaacgatggcaacaatggtggctgtgacccaaactccatctgcaccaacactgtgggctctttcaagtgtggtccctgccgcctgggtttcctgggcaaccagagccagggctgcctcccagcccggacctgccacagcccagcccacagcccctgccacatccatgctcactgtctctttgaacgcaatggtgcagtgtcctgccagtgtaacgtgggctgggctgggaatgggaacgtgtgtgggactgacacagacatcgatggctacccagaccaagcactgccctgcatggacaacaacaaacactgcaaacaggacaactgccttttgacacccaactctgggcaggaagatgctgataatgatggtgtgggggaccagtgtgatgatgatgctgatggggatgggatcaagaatgttgaggcatccccaatggattggacaattgccctaaagtccccaacccactacagacagacagggatgaggacggggtgggagatgcttgcgacagctgccctgaaatgagcaatcctacccagacagatgcagacagcgacctggtgggggatgtctgtgatactaatgaagacagaccttcacctcacctggctgactgccaggggtctgattgtatggagagcaggctccagagactcccaggcagaagcgaagggaaggacaaggagtacctttaaatcctttatttggtacctgttcttctgattagcgatggggatgggcatcaggacaccaaggacaactgcccacagctgccaaatagctcccagctggactctgataacgatggacttggagatgagtgtgatggggatgatgacaatgatggcatcccagattatgtgcctcctggtcccgataactgccgcctggtacccaatcccaatcagaaggactcagatggcaatggcgttggtgatgtgtgtgaggatgactttgacaatgatgctgtggtcgaccccctggatgtgtgtcctgaaagtgcagaggtaacgcttacggattttcgggcctatcagaccgtcgtcctggatcctgagggtgatgctcagattgacccaaactgggttgtgctcaaccagggcatggaaatcgttcagaccatgaacagtga

SEQ ID NO: 191046 - DNA, 2928 bp, Homo sapiens
  Payload ID: 17738
  Gene Name: thrombospondin 3
  ENST ID: ENST00000541990
  CDS Start-End: 1421-2878
gggtagtgagccggctgagaggcatggagacgcaggaacttcggggggccctggctcttctcctcctttgctttttcacatctgccagtcaggatctgcaggtaattgacctgctgactgtgggcgagtctcggcagatggtagctgtggcagagaagatccggacagccttgctcactgctggggacatctacctcttatccaccttccgcctgccccccaagcagggtggtgtcctctttggcctctattctcgccaagacaacactcgatggctggaggcctctgttgtaggcaagatcaacaaaggtgactgtactggtgcgataccagcgggaggatggcaaagtccacgccgtgaacctacagcaagcgggcctggctgatgggcgcacacacacagttctcctgcgactccgaggtccctccagacccagccctgccctacatctctacgtggactgcaaactgggtgaccaacatgcaggccttccagcactggcccccattcctccagcggaggtcgatgggctggagattaggactggacagaaggcgtatttgaggatgcagtgaccaatgcactgcactccattctaggggagcagaccaaggcgctggtcacccaactcaccctcttcaaccagatcctggtggagctgcgggatgatatacgagaccaggtgaaggaaatgtccctgatccgaaacaccattatggagtgtcaggtgtgcggcttccatgagcagcgttcccactgcagccccaatccctgcttccgaggtgtggactgcatggaagtgtacgagtacccaggctaccgctgtgggccctgcccccctggcctgcagggcaacggcacccactgcagtgacatcaatgagtgtgctcacgctgacccctgtttcccgggctccagctgcatcaacaccatgcccggcttccactgtgaggcctgtcctcgagggtacaagggcacacaggtgtctggtgtgggcattgactatgcccgggccagcaaacagataaggccataccagtgtcctctgctgtatctgaggagacccaccataggtctggttccacccaaagtctgccccttcaggtctgcaatgacatcgatgaatgcaacgatggcaacaatggtggctgtgacccaaactccatctgcaccaacactgtgggctctttcaagtgtggtccctgccgcctgggtttcctgggcaaccagagccagggctgcctcccagcccggacctgccacagcccagcccacagcccctgccacatccatgctcactgtctctttgaacgcaatggtgcagtgtcctgccagtgtaacgtgggctgggctgggaatgggaacgtgtgtgggactgacacagacatcgatggctacccagaccaagcactgccctgcatggacaacaacaaacactgcaaacaggacaactgccttttgacacccaactctgggcaggaagatgctgataatgatggtgtgggggaccagtgtgatgatgatgctgatggggatgggatcaagaatgttgaggacaactgccggctgttccccaacaaagaccagcagaactcagatacagattcatttggtgatgcctgtgacaattgccccaacgttcccaacaatgaccagaaggacacagatggcaatggggaaggagatgcctgtgacaacgacgtggatggggatggcatccccaatggattggacaattgccctaaagtccccaacccactacagacagacagggatgaggacggggtgggagatgcttgcgacagctgccctgaaatgagcaatcctacccagacagatgcagacagcgacctggtgggggatgtctgtgatactaatgaagacagcgatggggatgggcatcaggacaccaaggacaactgcccacagctgccaaatagctcccagctggactctgataacgatggacttggagatgagtgtgatggggatgatgacaatgatggcatcccagattatgtgcctcctggtcccgataactgccgcctggtacccaatcccaatcagaaggactcagatggcaatggcgttggtgatgtgtgtgaggatgactttgacaatgatgctgtggtcgaccccctggatgtgtgtcctgaaagtgcagaggtaacgcttacggattttcgggcctatcagaccgtcgtcctggatcctgagggtgatgctcagattgacccaaactgggttgtgctcaaccagggcatggaaatcgttcagaccatgaacagtgaccctggcttggcagttggatacacggccttcaatggtgtggactttgaaggcaccttccatgtgaacacagtgactgatgatgactacgcaggctttctcttcagttatcaagacagtggccgcttctacgtagtcatgtggaagcagaccgagcagacctactggcaggctacacccttccgggcggttgcccagcccgggctgcagctcaaggcagtgacatcagtgtctggcccaggtgagcacctccgaaatgccctgtggcatactggccacacccctgatcaggtacgactgctgtggacagacccacgaaatgtgggctggcgggacaagacctcctatcgctggcagcttctgcaccggcctcaagttggctacattcgggtgaagctctatgagggaccccagcttgtggcggattctggggtgatcattgacacatccatgcgaggggggcgtcttggtgtattctgcttctcccaagaaaacataatttggtccaatctccagtatcgatgcaatgacacagtgcctgaggactttgagccattccggaggcagctgctccagggaagggtgtgaggaggaggccaccagattcagaattcagaattttagaccctttggccttg

SEQ ID NO: 191047 - DNA, 3200 bp, Homo sapiens
  Payload ID: 17738
  Gene Name: thrombospondin 3
  ENST ID: ENST00000541576
  CDS Start-End: 106-2949
ccccctccaattctgtccctccgccccccggctcctgctctctccgcctagccttttcccctcccagctgcctgcctgccaggggtagtgagccggctgagaggcatggagacgcaggaacttcggggggccctggctcttctcctcctttgctttttcacatctgccagtcaggatctgcaggtaattgacctgctgactgtgggcgagtctcggcagatggtagctgtggcagagaagatccggacagccttgctcactgctggggacatctacctcttatccaccttccgcctgccccccaagcagggtggtgtcctctttggcctctattctcgccaagacaacactcgatggctggaggcctctgttgtaggcaagatcaacaaagtactggtgcgataccagcgggaggatggcaaagtccacgccgtgaacctacagcaagcgggcctggctgatgggcgcacacacacagttctcctgcgactccgaggtccctccagacccagccctgccctacatctctacgtggactgcaaactgggtgaccaacatgcaggccttccagcactggcccccattcctccagcggaggtcgatgggctggagattaggactggacagaaggcgtatttgaggatgcagggctttgtggaatctatgaaaattattctgggtgggtccatggcccgggtaggagccctgagtgagtgtccattccaaggggacgagtccatccacagtgcaggggagcagaccaaggcgctggtcacccaactcaccctcttcaaccagatcctggtggagctgcgggatgatatacgagaccaggtgaaggaaatgtccctgatccgaaacaccattatggagtgtcaggtgtgcggcttccatgagcagcgttcccactgcagccccaatccctgcttccgaggtgtggactgcatggaagtgtacgagtacccaggctaccgctgtgggccctgcccccctggcctgcagggcaacggcacccactgcagtgacatcaatgagtgtgctcacgctgacccctgtttcccgggctccagctgcatcaacaccatgcccggcttccactgtgaggcctgtcctcgagggtacaagggcacacaggtgtctggtgtgggcattgactatgcccgggccagcaaacaggtctgcaatgacatcgatgaatgcaacgatggcaacaatggtggctgtgacccaaactccatctgcaccaacactgtgggctctttcaagtgtggtccctgccgcctgggtttcctgggcaaccagagccagggctgcctcccagcccggacctgccacagcccagcccacagcccctgccacatccatgctcactgtctctttgaacgcaatggtgcagtgtcctgccagtgtaacgtgggctgggctgggaatgggaacgtgtgtgggactgacacagacatcgatggctacccagaccaagcactgccctgcatggacaacaacaaacactgcaaacaggacaactgccttttgacacccaactctgggcaggaagatgctgataatgatggtgtgggggaccagtgtgatgatgatgctgatggggatgggatcaagaatgttgaggacaactgccggctgttccccaacaaagaccagcagaactcagatacagattcatttggtgatgcctgtgacaattgccccaacgttcccaacaatgaccagaaggacacagatggcaatggggaaggagatgcctgtgacaacgacgtggatggggatggcatccccaatggattggacaattgccctaaagtccccaacccactacagacagacagggatgaggacggggtgggagatgcttgcgacagctgccctgaaatgagcaatcctacccagacagatgcagacagcgacctggtgggggatgtctgtgatactaatgaagacagcgatggggatgggcatcaggacaccaaggacaactgcccacagctgccaaatagctcccagctggactctgataacgatggacttggagatgagtgtgatggggatgatgacaatgatggcatcccagattatgtgcctcctggtcccgataactgccgcctggtacccaatcccaatcagaaggactcagatggcaatggcgttggtgatgtgtgtgaggatgactttgacaatgatgctgtggtcgaccccctggatgtgtgtcctgaaagtgcagaggtaacgcttacggattttcgggcctatcagaccgtcgtcctggatcctgagggtgatgctcagattgacccaaactgggttgtgctcaaccagggcatggaaatcgttcagaccatgaacagtgaccctggcttggcagttggatacacggccttcaatggtgtggactttgaaggcaccttccatgtgaacacagtgactgatgatgactacgcaggctttctcttcagttatcaagacagtggccgcttctacgtagtcatgtggaagcagaccgagcagacctactggcaggctacacccttccgggcggttgcccagcccgggctgcagctcaaggcagtgacatcagtgtctggcccaggtgagcacctccgaaatgccctgtggcatactggccacacccctgatcaggtacgactgctgtggacagacccacgaaatgtgggctggcgggacaagacctcctatcgctggcagcttctgcaccggcctcaagttggctacattcgggtgaagctctatgagggaccccagcttgtggcggattctggggtgatcattgacacatccatgcgaggggggcgtcttggtgtattctgcttctcccaagaaaacataatttggtccaatctccagtatcgatgcaatgacacagtgcctgaggactttgagccattccggaggcagctgctccagggaagggtgtgaggaggaggccaccagattcagaattcagaattttagaccctttggccttggggtccatcctggagaccctgaggtctaagctacagcccctcagccaaccacagacccttctctggctcccaaaaggagttcagtcccagaggggtggtcaccccacccttcaggggatgagaagttttcaaggggtattactcaggcactaaccccaggaaagatgacagcacattgccataaagttttggttgttttct

SEQ ID NO: 191048 - DNA, 3222 bp, Homo sapiens
  Payload ID: 17739
  Gene Name: thrombospondin 4
  Uniprot ID: P35443
  ENST ID: ENST00000350881
  CDS Start-End: 191-3076
agcagccagctccccagcaccgcacggcggggacgcgagcgcgcccccgacggcagcccggacgccgagcacgggtcacctgcggcgccggcccgggcgccgaccgaggttcaacgcacggcccggggacccccaggcggggccaacgccgccgtcgcccccggcctcgcggggagcaggaagagccaacatgctggccccgcgcggagccgccgtcctcctgctgcacctggtcctgcagcggtggctagcggcaggcgcccaggccaccccccaggtctttgaccttctcccatcttccagtcagaggctaaacccaggcgctctgctgccagtcctgacagaccccgccctgaatgatctctatgtgatttccaccttcaagctgcagactaaaagttcagccaccatcttcggtctttactcttcaactgacaacagtaaatattttgaatttactgtgatgggacgcttaaacaaagccatcctccgttacctgaagaacgatgggaaggtgcatttggtggttttcaacaacctgcagctggcagacggaaggcggcacaggatcctcctgaggctgagcaatttgcagcgaggggccggctccctagagctctacctggactgcatccaggtggattccgttcacaatctccccagggcctttgctggcccctcccagaaacctgagaccattgaattgaggactttccagaggaagccacaggacttcttggaagagctgaagctggtggtgagaggctcactgttccaggtggccagcctgcaagactgcttcctgcagcagagtgagccactggctgccacaggcacaggggactttaaccggcagttcttgggtcaaatgacacaattaaaccaactcctgggagaggtgaaggaccttctgagacagcaggttaaggaaacatcatttttgcgaaacaccatagctgaatgccaggcttgcggtcctctcaagtttcagtctccgaccccaagcacggtggtgcccccggctccccctgcaccgccaacacgcccacctcgtcggtgtgactccaacccatgtttccgaggtgtccaatgtaccgacagtagagatggcttccagtgtgggccctgccccgagggctacacaggaaacgggatcacctgtattgatgttgatgagtgcaaataccatccctgctacccgggcgtgcactgcataaatttgtctcctggcttcagatgtgacgcctgcccagtgggcttcacagggcccatggtgcagggtgttgggatcagttttgccaagtcaaacaagcaggtctgcactgacattgatgagtgtcgaaatggagcgtgcgttcccaactcgatctgcgttaatactttgggatcttaccgctgtgggccttgtaagccggggtatactggtgatcagataaggggatgcaaagcggaaagaaactgcagaaacccagagctgaacccttgcagtgtgaatgcccagtgcattgaagagaggcagggggatgtgacatgtgtgtgtggagtcggttgggctggagatggctatatctgtggaaaggatgtggacatcgacagttaccccgacgaagaactgccatgctctgccaggaactgtaaaaaggacaactgcaaatatgtgccaaattctggccaagaagatgcagacagagatggcattggcgacgcttgtgacgaggatgctgacggagatgggatcctgaatgagcaggataactgtgtcctgattcataatgtggaccaaaggaacagcgataaagatatctttggggatgcctgtgataactgcctgagtgtcttaaataacgaccagaaagacaccgatggggatggaagaggagatgcctgtgatgatgacatggatggagatggaataaaaaacattctggacaactgcccaaaatttcccaatcgtgaccaacgggacaaggatggtgatggtgtgggggatgcctgtgacagttgtcctgatgtcagcaaccctaaccagtctgatgtggataatgatctggttggggactcctgtgacaccaatcaggacagtgatggagatgggcaccaggacagcacagacaactgccccaccgtcattaacagtgcccagctggacaccgataaggatggaattggtgacgagtgtgatgatgatgatgacaatgatggtatcccagacctggtgccccctggaccagacaactgccggctggtccccaacccagcccaggaggatagcaacagcgacggagtgggagacatctgtgagtctgactttgaccaggaccaggtcatcgatcggatcgacgtctgcccagagaacgcagaggtcaccctgaccgacttcagggcttaccagaccgtggtcctggatcctgaaggggatgcccagatcgatcccaactgggtggtcctgaaccagggcatggagattgtacagaccatgaacagtgatcctggcctggcagtggggtacacagcttttaatggagttgacttcgaagggaccttccatgtgaatacccagacagatgatgactatgcaggctttatctttggctaccaagatagctccagcttctacgtggtcatgtggaagcagacggagcagacatattggcaagccaccccattccgagcagttgcagaacctggcattcagctcaaggctgtgaagtctaagacaggtccaggggagcatctccggaactccctgtggcacacgggggacaccagtgaccaggtcaggctgctgtggaaggactccaggaatgtgggctggaaggacaaggtgtcctaccgctggttcctacagcacaggccccaggtgggctacatcagggtacgattttatgaaggctctgagttggtggctgactctggcgtcaccatagacaccacaatgcgtggaggccgacttggcgttttctgcttctctcaagaaaacatcatctggtccaacctcaagtatcgctgcaatgacaccatccctgaggacttccaagagtttcaaacccagaatttcgaccgcttcgataattaaaccaaggaagcaatctgtaactgcttttcggaacactaaaaccatatatattttaacttcaattttctttagcttttaccaacccaaatatatcaaaacgttttatgtgaatgtggcaataaaggagaagagatcatttttaaaaa

SEQ ID NO: 191049 - DNA, 3094 bp, Homo sapiens
  Payload ID: 17739
  Gene Name: thrombospondin 4
  ENST ID: ENST00000511733
  CDS Start-End: 341-2953
ggagcgatgtatgcccagagtctgctcttgacatccctgagaaagacgcagaattactctacttgccctgccacctgcattttctgctctgactttgcttgaacgacaaaaagaaagtttatttcaaggattggcttgatgtcttaatttctgagtctttgaccttctcccatcttccagtcagaggctaaacccaggcgctctgctgccagtcctgacagaccccgccctgaatgatctctatgtgatttccaccttcaagctgcagactaaaagttcagccaccatcttcggtctttactcttcaactgacaacagtaaatattttgaatttactgtgatgggacgcttaaacaaagccatcctccgttacctgaagaacgatgggaaggtgcatttggtggttttcaacaacctgcagctggcagacggaaggcggcacaggatcctcctgaggctgagcaatttgcagcgaggggccggctccctagagctctacctggactgcatccaggtggattccgttcacaatctccccagggcctttgctggcccctcccagaaacctgagaccattgaattgaggactttccagaggaagccacaggacttcttggaagagctgaagctggtggtgagaggctcactgttccaggtggccagcctgcaagactgcttcctgcagcagagtgagccactggctgccacaggcacaggggactttaaccggcagttcttgggtcaaatgacacaattaaaccaactcctgggagaggtgaaggaccttctgagacagcaggttaaggaaacatcatttttgcgaaacaccatagctgaatgccaggcttgcggtcctctcaagtttcagtctccgaccccaagcacggtggtgcccccggctccccctgcaccgccaacacgcccacctcgtcggtgtgactccaacccatgtttccgaggtgtccaatgtaccgacagtagagatggcttccagtgtgggccctgccccgagggctacacaggaaacgggatcacctgtattgatgttgatgagtgcaaataccatccctgctacccgggcgtgcactgcataaatttgtctcctggcttcagatgtgacgcctgcccagtgggcttcacagggcccatggtgcagggtgttgggatcagttttgccaagtcaaacaagcaggtctgcactgacattgatgagtgtcgaaatggagcgtgcgttcccaactcgatctgcgttaatactttgggatcttaccgctgtgggccttgtaagccggggtatactggtgatcagataaggggatgcaaagcggaaagaaactgcagaaacccagagctgaacccttgcagtgtgaatgcccagtgcattgaagagaggcagggggatgtgacatgtgtgtgtggagtcggttgggctggagatggctatatctgtggaaaggatgtggacatcgacagttaccccgacgaagaactgccatgctctgccaggaactgtaaaaaggacaactgcaaatatgtgccaaattctggccaagaagatgcagacagagatggcattggcgacgcttgtgacgaggatgctgacggagatgggatcctgaatgagcaggataactgtgtcctgattcataatgtggaccaaaggaacagcgataaagatatctttggggatgcctgtgataactgcctgagtgtcttaaataacgaccagaaagacaccgatggggatggaagaggagatgcctgtgatgatgacatggatggagatggaataaaaaacattctggacaactgcccaaaatttcccaatcgtgaccaacgggacaaggatggtgatggtgtgggggatgcctgtgacagttgtcctgatgtcagcaaccctaaccagtctgatgtggataatgatctggttggggactcctgtgacaccaatcaggacagtgatggagatgggcaccaggacagcacagacaactgccccaccgtcattaacagtgcccagctggacaccgataaggatggaattggtgacgagtgtgatgatgatgatgacaatgatggtatcccagacctggtgccccctggaccagacaactgccggctggtccccaacccagcccaggaggatagcaacagcgacggagtgggagacatctgtgagtctgactttgaccaggaccaggtcatcgatcggatcgacgtctgcccagagaacgcagaggtcaccctgaccgacttcagggcttaccagaccgtggtcctggatcctgaaggggatgcccagatcgatcccaactgggtggtcctgaaccagggcatggagattgtacagaccatgaacagtgatcctggcctggcagtggggtacacagcttttaatggagttgacttcgaagggaccttccatgtgaatacccagacagatgatgactatgcaggctttatctttggctaccaagatagctccagcttctacgtggtcatgtggaagcagacggagcagacatattggcaagccaccccattccgagcagttgcagaacctggcattcagctcaaggctgtgaagtctaagacaggtccaggggagcatctccggaactccctgtggcacacgggggacaccagtgaccaggtcaggctgctgtggaaggactccaggaatgtgggctggaaggacaaggtgtcctaccgctggttcctacagcacaggccccaggtgggctacatcagggtacgattttatgaaggctctgagttggtggctgactctggcgtcaccatagacaccacaatgcgtggaggccgacttggcgttttctgcttctctcaagaaaacatcatctggtccaacctcaagtatcgctgcaatgacaccatccctgaggacttccaagagtttcaaacccagaatttcgaccgcttcgataattaaaccaaggaagcaatctgtaactgcttttcggaacactaaaaccatatatattttaacttcaattttctttagcttttaccaacccaaatatatcaaaacgttttatgtgaatgtggcaataaaggagaagagatcattttt

SEQ ID NO: 191050 - DNA, 2962 bp, Homo sapiens
  Payload ID: 17740
  Gene Name: thrombospondin, type I, domain containing 1
  Uniprot ID: Q9NS62
  ENST ID: ENST00000258613
  CDS Start-End: 180-2738
cgggatgcttggcgctctacctcgccgcccctgagccttcccgtccgcctcgccacgcgcccggacggcctggggttgctgcccgtcagtctcgaaaggtgtttttggggaaaaaaatcacaatctggacgtgagaaaggacatgaggagactaaagacctgggattttgtcaatcagaatgaaaccaatgttgaaagacttttcaaatctattgttggtggtactctgtgactatgttcttggagaagctgaatatcttctcttgagagagccaggccatgtagcactaagcaacgacacagtgtatgtggatttccagtattttgatggtgctaatgggacactgaggaatgtatctgtcctgctgttggaggccaacaccaatcagactgtaactaccaagtacctcctgaccaaccagtcccagggaacactaaagtttgagtgcttctatttcaaggaggctggtgactactggttcacaatgactccagaagcaacagacaacagcactccattcccctggtgggagaaaagtgcctttctgaaggtggaatggcctgtctttcacgttgacttgaataggagtgccaaggcagcagaaggcaccttccaagtgggcctatttaccagtcaaccactgtgcccgtttcctgtggacaagcccaacatcgtagtggatgtcatcttcaccaacagtcttcctgaggcaagaagaaattcaagacagccgctggaaataagaaccagcaaaaggacagaacttgctcaaggtcagtgggttgagtttggctgtgcacccttggggccagaagcctatgtcaccgtggtgctgaagctgcttgggcgagactcagtcattacctccacaggacccattgacctggcccagaaatttggatacaaactggtgatggtgccagaactcacatgtgagtccggggtagaggtgacagtgctgcctccaccatgcaccttcgtccaaggagtggtcactgtcttcaaggaggcccccagataccctgggaagaggaccattcacttggctgaaaacagcctgcccctgggagagaggaggacaatttttaactgtactttgtttgacatggggaagaataagtactgctttgactttggcatttcaagcagaagccatttttctgcaaaggaggagtgcatgctaattcagagaaatacagaaacttggggactgtggcagccatggagccagtgtagtgccacatgtggggatggtgtcagagagcgtcgccgagtgtgtctcacttccttcccctccagtcctgtctgccctggaatgtccttggaggcctccctgtgttccctggaggagtgtgctgctttccagccatccagcccatctcctcttcagccccagggtccagtgaagtccaacaacatcgtgactgtcactggtatatccttgtgcttgttcatcatcattgccactgtgctcatcacgctgtggaggaggttcggccggccagccaagtgcagcacacctgctcgacacaactccatccactcccccagcttccggaagaactcggacgaggagaatatctgcgagctgagcgagcagcgcgggagcttctcggatgggggagacgggcccacggggagtccaggggacacaggcatccctctgacctacaggcggagcgggccggtacctcccgaggatgatgcctctggcagcgagagcttccagtccaacgcccagaagataatcccacctctgttcagctaccgccttgcccagcagcagttaaaggagatgaaaaagaaaggtctgacggaaactaccaaagtgtatcacgtgtctcagagtcccctgacagacactgccattgatgcggcccccagcgctcccttagatttggaaagcccggaagaagctgcagcaaacaagttccggatcaaatccccatttccggagcagcccgcggtcagtgccggggaaaggcctccctccaggctggatctaaatgtgactcaggccagttgtgccataagccccagccagactctgatccgcaagtcacaggcaaggcacgtgggcagcagagggggcccgtccgaaaggagccatgccaggaacgcccatttcaggaggacagcgagtttccatgaagccaggcaggcccggccgttccgagagaggagcatgtccactctgactccacggcaggcccctgcctacagctctaggacgcggacctgcgagcaggcagaggacagatttaggcctcagagtcgaggtgcccacctgtttcctgaaaaactggagcatttccaagaggcaagtggaacccgtggtccattaaaccctctccctaaatcctacactttggggcagcccttgaggaaaccagaccttggggatcaccaggcaggattagtggccggaattgagagaacagagccccacagagctcgtcggggaccgtcccccagtcacaagagtgtctcaaggaagcagtcttctcccatatcccccaaagataactaccagagggtcagttctctgagcccttctcagtgtagaaaagacaagtgtcaaagcttccccactcaccctgagtttgccttctatgacaatacgtcgtttggcctcactgaggctgagcagaggatgctggacctcccaggatattttgggtcaaatgaagaggatgaaaccacaagtacacttagcgtggagaagctggtgatctagactgagaatcagcctgagctttacacagctggggtctgctactcgcgttttgtagacttttgtgtaactatttgtaccgtaggacagaatgtgaggaggaagtaacacacagaggaggatgtgtgtgtatgcatgtgtttgaattcacaaggaagaaattatttatcttgagctttttcctttgttattcaatttctattgatttattagtaataacaatgata

SEQ ID NO: 191051 - DNA, 3189 bp, Homo sapiens
  Payload ID: 17740
  Gene Name: thrombospondin, type I, domain containing 1
  Uniprot ID: Q9NS62
  ENST ID: ENST00000349258
  CDS Start-End: 546-2945
actagagtagaagtgattgaatgtgaagtgtcaggagattgctcgctcgtccttcgttaaacccctggtccggctgtgtgctgtggatgcgggtgtgtgttgaggggacctgcgtctgccggggccgcaccccctcccgcaggaccttggctggccgcgcgtttcctgcctgtttcctgtccagcagctggcgagctggggaccggcaggaaaggatgcgctgcccagaaggggcgggaaccgaccacgcccggtcccgtgtgccccccgccctcccggcgcccgccctccccacgccgtcgggggcgggccccgcggggctgtgggagccgaacgccgcggggtcagggcgtgcagtctgggacgcgggatgcttggcgctctacctcgccgcccctgagccttcccgtccgcctcgccacgcgcccggacggcctggggttgctgcccgtcagtctcgaaaggtgtttttggggaaaaaaatcacaatctggacgtgagaaaggacatgaggagactaaagacctgggattttgtcaatcagaatgaaaccaatgttgaaagacttttcaaatctattgttggtggtactctgtgactatgttcttggagaagctgaatatcttctcttgagagagccaggccatgtagcactaagcaacgacacagtgtatgtggatttccagtattttgatggtgctaatgggacactgaggaatgtatctgtcctgctgttggaggccaacaccaatcagactgtaactaccaagtacctcctgaccaaccagtcccagggaacactaaagtttgagtgcttctatttcaaggaggctggtgactactggttcacaatgactccagaagcaacagacaacagcactccattcccctggtgggagaaaagtgcctttctgaaggtggaatggcctgtctttcacgttgacttgaataggagtgccaaggcagcagaaggcaccttccaagtgggcctatttaccagtcaaccactgtgcccgtttcctgtggacaagcccaacatcgtagtggatgtcatcttcaccaacagtcttcctgaggcaagaagaaattcaagacagccgctggaaataagaaccagcaaaaggacagaacttgctcaaggtcagtgggttgagtttggctgtgcacccttggggccagaagcctatgtcaccgtggtgctgaagctgcttgggcgagactcagtcattacctccacaggacccattgacctggcccagaaatttggatacaaactggtgatggtgccagaactcacatgtgagtccggggtagaggtgacagtgctgcctccaccatgcaccttcgtccaaggagtggtcactgtcttcaaggaggcccccagataccctgggaagaggaccattcacttggctgaaaacagcctgcccctgggagagaggaggacaatttttaactgtactttgtttgacatggggaagaataagtactgctttgactttggcatttcaagcagaagccatttttctgcaaaggaggagtgcatgctaattcagagaaatacagctttccagccatccagcccatctcctcttcagccccagggtccagtgaagtccaacaacatcgtgactgtcactggtatatccttgtgcttgttcatcatcattgccactgtgctcatcacgctgtggaggaggttcggccggccagccaagtgcagcacacctgctcgacacaactccatccactcccccagcttccggaagaactcggacgaggagaatatctgcgagctgagcgagcagcgcgggagcttctcggatgggggagacgggcccacggggagtccaggggacacaggcatccctctgacctacaggcggagcgggccggtacctcccgaggatgatgcctctggcagcgagagcttccagtccaacgcccagaagataatcccacctctgttcagctaccgccttgcccagcagcagttaaaggagatgaaaaagaaaggtctgacggaaactaccaaagtgtatcacgtgtctcagagtcccctgacagacactgccattgatgcggcccccagcgctcccttagatttggaaagcccggaagaagctgcagcaaacaagttccggatcaaatccccatttccggagcagcccgcggtcagtgccggggaaaggcctccctccaggctggatctaaatgtgactcaggccagttgtgccataagccccagccagactctgatccgcaagtcacaggcaaggcacgtgggcagcagagggggcccgtccgaaaggagccatgccaggaacgcccatttcaggaggacagcgagtttccatgaagccaggcaggcccggccgttccgagagaggagcatgtccactctgactccacggcaggcccctgcctacagctctaggacgcggacctgcgagcaggcagaggacagatttaggcctcagagtcgaggtgcccacctgtttcctgaaaaactggagcatttccaagaggcaagtggaacccgtggtccattaaaccctctccctaaatcctacactttggggcagcccttgaggaaaccagaccttggggatcaccaggcaggattagtggccggaattgagagaacagagccccacagagctcgtcggggaccgtcccccagtcacaagagtgtctcaaggaagcagtcttctcccatatcccccaaagataactaccagagggtcagttctctgagcccttctcagtgtagaaaagacaagtgtcaaagcttccccactcaccctgagtttgccttctatgacaatacgtcgtttggcctcactgaggctgagcagaggatgctggacctcccaggatattttgggtcaaatgaagaggatgaaaccacaagtacacttagcgtggagaagctggtgatctagactgagaatcagcctgagctttacacagctggggtctgctactcgcgttttgtagacttttgtgtaactatttgtaccgtaggacagaatgtgaggaggaagtaacacacagaggaggatgtgtgtgtatgcatgtgtttgaattcacaaggaagaaattatttatcttgagctttttcctttgttattcaatttctattgatttattagtaataacaatgataataaaatgtaaatgagcaaa

SEQ ID NO: 191052 - DNA, 3133 bp, Homo sapiens
  Payload ID: 17741
  Gene Name: thrombospondin, type I, domain containing 4
  Uniprot ID: Q6ZMP0
  ENST ID: ENST00000261862
  CDS Start-End: 129-788
gccgagggaaccagcgcggtgcctagcggaactccagggctggaatcccgagacacaagtgcatctgctagctgttagcacttggcagacggagttctcctctagggtagttctaactttgggtaataatgtttgtcagctacctgatattaacattgctccacgttcaaacagcagtgttagcaagacctgggggagagagcattggctgtgatgactacttaggctccgacaaagtcgtggacaaatgtggggtgtgtggaggagacaacacgggctgtcaggttgtgtcgggcgtgtttaagcatgccctcaccagcctgggctaccaccgcgtcgtggagattcccgagggagccacgaaaatcaacatcacggagatgtacaagagcaacaaaaaaaaaagccatttaaagccagccactagagggagtcagttcagttccgtaaaggtatgctcagtgcccgctgcctgcaagctgttggggaccccagggagggcaaggcagcctgtccccgcccccagggaactagaacatgacaagaattctccgcactgtgcctacctgtccctttaccttacctctctggcccagagttcttggagggttttttctttattttcttatgtactcatctacttattctcaaagtatttagcattcaacactctttttgctttaaaaagaatggccttacaaagggacagaaaagagaagacacgagcttggtgtattttcatcaagttatgtggcagagaaatccagatattaccaggacctgtctaaacaaatgttgtgggttttcttttcattcggatagccactttatagttggaatatcaattctaatgaggaggaagacataaatataagtggtaaaaagaaacatgacttcccttaaaacaggctggataatctatatcagccttgtgggtggagactagtatttgatccttgccatataaaacattttaatatggtttacatgggaaaatatcgatggcttcctcacaaaatgtatgggtgacgtgaagttgaagagccaatggcttgggtgacacgtgctggatccaaaaagatcagggagactagaataaaacttggatgttaaaaattcaccaggaatccacataaagtactatatttgggctaaaatgaaaaactaaatacaaggtgggagagaggcaagaatttcagttgactaagctcagtgtgagtcaaagtgggatggaaccatgcaaaaacaaaacccacagacatgcaggctacgtgaggagaaaacagtggtgaggatcacatcacattgtgtttgcatttgccggaaccatactttaagaagaaaaccgatcatctataataacatcagtttatcaatgccccgtcctgatgaagtgtgcagactctcagaaacagcaggaaggacttcatgagaaccctcaggctggagaaggcactagggcacaaggagagctctcctaggaccaggaccaagaagctacaggcaggcacagtttagctcctgcagagacccagcttttcacaagttggagccttccagagatagagggactgtggtaggtggtgacccacccatcactggaggtggaagcagaggccgtttgccagggatgctggagaggggattcaagcatctggctgggcaacgtgatgctcagggccgtctccactcagggcttaggggagtctgtgagtagaagagctttaggtgatttgtttggtgggggaaggcaagtacacagctatgcactttccgtttctgacttttgccaccctgtcagccatggggagcccactgtgggactgaaaccctgagctgaatgcggcctcatgtctcagagaaacactggcaagttggtcagagccgccgtctgcatcgaggcgtagctgagcggcaggatggggggctgcctgcccagggtctctcaccgtggtgtaagcagagccatggcttgcctaggaccctatagataccatcactctttctcagctcgactggagtttctgcacctttgcaggggcaaagtaactccctgcaccctgaaccaccccccattcctgttcatttcagcagataatgatggagggggggggtgtccatcgtgctgagggtgtgaccgcaagagggtgaaaacttccagccaactttctcagtcctttctcttgcgagagggaagccacctgctatacaaactaataccccctgccttgaccccttccccacgactcagttgacagaaggatatactttgttataacttattattttgttctctgtaaatacaagatgtttataggaaatatgtattctgaactctatctgcagaatgagtcactacaccaaaatagttctattatttagaatgtgttaattttaaagggacctgataggtatttatttacatatgcgatccacatttgtgtgaaagcatgtgatcatactaacccagcctcctggaatgtcgctgtacgatgattgatgtctttttctcagtccatagttacaattgtttagtatgctaatcagtccagttccctgaggtttaagatcaaatataaattactctgcttttcgactcattcaggtagcattgtacctgaacctgattgctactttttcatcttaaatattatatttcctcatctaatctgccttcccctcatccacagacatttggagaaggaaatgggagggtgtctgttatccctttctctttgctttgtccccgttgttagactggcagcgtcagttgctcggtgggcttggttagagccgtgggtgaggcaggtggctggcggggacagggagaggctgagagggaagtggtggcatttactgctctgacacttccactgtccctgctggggatgctggggccaaggcctgtggggcctgtgaactgcacagccaggagcaaggaacccactaaatactccgtcacctccatgtcccctctacagtgttaaattattacataagcaggtgaaaggtagaaggcgaattatgtgagtaaatatggtctgttttctcttcagcaaaaatgactatttttgtgtgtgactaatttatttttattattgtaaagatacaataaaccggttgaaatatctgc

SEQ ID NO: 191053 - DNA, 9200 bp, Homo sapiens
  Payload ID: 17741
  Gene Name: thrombospondin, type I, domain containing 4
  Uniprot ID: Q6ZMP0
  ENST ID: ENST00000355327
  CDS Start-End: 135-3191
atcagaccaacgtgaattgaatcacagcagttcagaaagaggaaactggattcaggacttgaacgcaactcccaattgcagaaaattggcaacgtctctgaagagcccttgcttttgcctggacccccagcatcatggtttcccatttcatggggtctctcagtgtcctgtgtttccttctgctgcttggattccagttcgtctgcccacagccctccactcaacacaggaaggtcccgcagcggatggcggcggagggcgcccccgaggacgacggcggcggcggcgccccgggagtgtggggcgcctggggcccctggtcggcctgctcgcgtagctgcagcggcggcgtgatggagcagacgcggccctgcctgccccgctcctaccgcctgcgcggcggccagcggcctggcgcccctgcgcgcgccttcgcggaccacgtggtgtcggcggtgcgcacgtcggtgccactgcaccggagccgcgacgagacgccagcgctggccggtacggacgccagccgccagggccccacggtgctgcgaggcagccggcacccacagccccagggcctcgaagtcactggggacagaaggagcaggacccgtggtaccattggccctggcaagtatggctatggtaaggccccatatatcttaccactgcagacagacactgcacacacgccacagaggctccggagacagaagctctcatcccgccattccaggtcccagggagcatcttctgctaggcatggctacagttcaccagcccaccaggtcccccaacatgggcctttgtaccaaagtgacagtggccctcgctctggactgcaggctgcggaggcccccatctaccagctacctttgacccatgatcaaggctaccctgcagcttcaagtctctttcacagcccagaaacaagcaacaaccacggtgtggggacccatggggcaactcagagcttctctcagcctgcccgatctacagcaatctcatgcatcggggcctatcggcagtacaagctgtgcaacaccaacgtatgtccagaaagcagtagaagtatccgggaggtacagtgtgcatcctacaacaacaagccattcatgggccggttttatgagtgggaaccatttgcagaagtaaaaggcaatcgcaaatgtgagttgaactgccaggcaatgggctaccgcttctatgtacggcaagctgagaaagtcatcgatggcaccccctgtgaccagaacggcacggccatctgtgtgtctgggcagtgcaagagcattggctgtgatgactacttaggctccgacaaagtcgtggacaaatgtggggtgtgtggaggagacaacacgggctgtcaggttgtgtcgggcgtgtttaagcatgccctcaccagcctgggctaccaccgcgtcgtggagattcccgagggagccacgaaaatcaacatcacggagatgtacaagagcaacaactatttggccctgagaagtcgttctggacgctccatcatcaatgggaactgggcaattgatcgaccaggaaaatacgagggcggagggaccatgttcacctacaagcgtccaaatgagatttcgagcactgccggagagtcctttttggcggaaggtcccaccaacgagatcttggatgtctacatgatacaccagcagccaaacccaggcgtgcactacgagtacgtgatcatggggaccaacgccatcagcccccaggtgccaccccacaggagaccaggggaacccttcaatggccagatggtgacagaaggcaggagccaggaggagggagaacagaaagggaggaacgaggagaaggaagacttgcgtggggaggcccctgagatgttcacctcagaatcggcacagaccttcccagtcaggcatccagacagattttctccccatcgaccggacaacttggtgccaccagcaccgcagcccccacggcgcagccgggatcacaactggaagcagcttgggacaacagaatgttccacgacctgtgggaaaggatcgcagtaccctattttccgctgtgtgcacagaagcactcatgaagaggctcctgagagttactgtgactccagcatgaagccgacccccgaggaggagccctgcaacatcttcccttgcccagccttctgggacatcggggagtggtctgagtgcagcaagacctgtggcctgggcatgcagcaccgccaggttctgtgccgccaggtgtacgccaaccgcagcctgacggtgcagccctaccgctgccagcacctggagaaacctgagaccaccagcacctgccaactcaagatctgcagcgagtggcagatccggaccgactggacctcgtgctcggtgccctgcggcgtgggacagaggacccgtgatgtgaagtgtgtgagcaacattggggatgtggttgacgatgaggaatgcaacatgaagctccggccgaatgacattgagaactgcgacatgggaccctgtgccaagagctggttcctcaccgagtggagcgaaaggtgctcagcggagtgtggggccggagtgcggacacgctcggtggtgtgcatgaccaaccatgtcagcagcctgcccctggagggctgtgggaacaaccggccggcagaggccaccccatgtgacaacggaccctgcacgggcaaggtggagtggtttgccgggagctggagtcagtgttccatcgagtgtgggagcgggacgcaacagagggaggtgatttgtgttagaaagaatgcagacacctttgaagtgttggacccctctgaatgttctttcctggagaaaccccccagccagcaatcctgccacctcaagccttgcggagccaaatggtttagcaccgaatggagcatgtgttccaagagctgccagggtggctttcgggtccgggaagtgcggtgtctgtctgatgacatgactctaagtaacctctgtgaccctcagttgaaaccagaagagagagaatcttgtaaccctcaggactgtgtccctgaagttgatgaaaactgcaaggacaagtactacaactgcaacgtggtggtccaggcaagactctgtgtctacaactactacaagaccgcctgctgtgcctcctgcacccgtgtggccaacaggcagacgggcttcctggggagcagataacactcctgcacccccatcagtagggcagcatcactgccttcccgggggcttcagcagtgcgcctggctggctgctgctccaccacgggccccctggcccaggcgctgccaaccaacttagtcaccacccctgcctccggtgaatgcaccccgtggtacccaggggctttttacacaagatgtttgaaagccacagtcagtcctttaagcatcaccatgtactgatgatcccctccttggacctggcatctgctaatggtgccctttgaaagtcaagcagtgggaagtacatggagctctcagccctgctcccatctggcaccttcaagtcagcagatgggccactgactgagcactgccccgtccctggtgctactggtctttctaaacttagcaccctggagagtccaaggaggcagcgcccccaacccagcgccccactaagccttgctgacacgcgtgcatccctctgtgacctcagcccagatgtgcctgttttcattctcaaagacattagactgttttcctgccctatgacacagatagctcacatgaatattgtgctttatttagcaggtgtactcacagatactagctccttagcagctcacaacatcccagaatgggaggcagggggtgactcattatccccattttactgacagggaaactgaggctcaacttaagtaattgacctgccaggtatattcacccatccagtggaagagctgagtccccgccccagtcatctaccagtatccagcctggggcctgtacttagatgtgaaaggtgctgcttcatttctgaccaagagactgagaagtttcccagaatgcaaacaaagcccaggcccctgaaatctttccggtcaagcctttatcccagcactcagttgttttggatgtctgttcctacttgcccttacccccaaagttacagatcctagttacaggactctgccagctttgttaaactgtccgtgagacaagaaagccattggggaaaccaggtgattgcctgaaattcttactccgttccaagtgctgttcctcccaggaaatcaaaggccagggtccttatggccgtggagccttcccgaccacagagccaacttgtgaagcacacagctctgcagcctgggctctgccctgcctcagccgcctcccccacgctcttcaccacgttcctggagagtccggccaacctgtcccagccgaaacactgctgtattagaaaaagtctctttctggtctttctggttttgtttatgaatttccctctgtggccacaaattcctcccctcccccatgactcacagtccatatggcccacccccagacttgagcaccaagctctgcattaatgcagttggcctgcgacaaggagctgtggacccttccccatctcttccaattcactttccccaactatccagttccagaggccgcaggcctggaaggatgcagtgcatattgaaaggtggaccctctgaaaacagttaagaggaatatatgtatgttttacccattaagaaaaaatggcaagctaaacaaatgttaaacttacagaaaatttgtcttatggtcctgagcatatttcccttttagagcaagcctggattcttagcaaagtgtttcccccatttgctcttttagctgacaaatctgccactgtgatgatggtttgcagcttttggaagcagtatggcaacctggcctgacatgctctttaggcttccactaacctggggctttcagaaattctatttggcctttctgtgggtagctttccagcttctcttctagggagccccaggcatcatttcccaaaagcatccccatctcctgattctcttggaactcctacagataagcatcctggcagaggcccaggctcccaaaccgacaaagtgaaaagagaccagagaggccaagcatattgactggtgctgttcagggcctgctcttttccactcaccacttgttttgctgcttgtcacgaggagagttgttcctgtatgtggctgctctcagatctttccaagcaagccagtcatttgaagaggttttcttttcatgctggagggcaggctaagatcaatgagtggaagagagaaaggctgttttagctcaagttaaaggaacaccttctagccatcaaagccgcccaacagaggcaagggccaccacacatgagagagcgctctgtccttaaagggaattctctgttgagtgggaggtgaacaccctggttcttccaactcaggaattctcgtggctgggctgggtcagtgatggctttgtctctttatgtctaaagtgccctatggctgctgaaggttacctaaccattctttaaaaggagaatgaccctccatgggaatggccagcctgccaactgtgcaattgaagaagacccgatggatcaaccccatgtctcccttggggagaaagtgcataaaccaggggtctctttttttttttcaacaaaccattgagctgttcttggagttcatctctggagaggttatacattattagaagtttgattattattatagtttgatcaatttatttgtcttagagatccaatttttactaattccctagttttttatttcagcatctgaatgtctttctccctagcacagtgcatacaatcagggccttgggtatttccagtgataactttccttggagaggatctaagaaaagcccagatttcggtagccatctccctccaaatatgtctctttctgctttcttagtgcccattatttccccctctcctttcttctgtcactgccatctccttcttggtcttcccattgttctttaactggccgtaatgtggaattgatatttacattttgatacggtttttttcttggcctgtgtacgggattgcctcatttcctgctctgaattttaaaattagatattaaagctgtcatatggtttcctcacaaaagtcaacaaagtccaaacaaaaatagtttgccgttttactttcatccattgaaaaaggaaattgtgcctcttgcagcctaggcaaaggacatttagtactatcgattctttccaccctcacgatgacttgcggttctctctgtagaaaagggatggcctaagaaatacaactaaaaaaacaaacaaaaacaccaaaagaaaaaaaaaagccatttaaagccagccactagagggagtcagttcagttccgtaaaggtatgctcagtgcccgctgcctgcaagctgttggggaccccagggagggcaaggcagcctgtccccgcccccagggaactagaacatgacaagaattctccgcactgtgcctacctgtccctttaccttacctctctggcccagagttcttggagggttttttctttattttcttatgtactcatctacttattctcaaagtatttagcattcaacactctttttgctttaaaaagaatggccttacaaagggacagaaaagagaagacacgagcttggtgtattttcatcaagttatgtggcagagaaatccagatattaccaggacctgtctaaacaaatgttgtgggttttcttttcattcggatagccactttatagttggaatatcaattctaatgaggaggaagacataaatataagtggtaaaaagaaacatgacttcccttaaaacaggctggataatctatatcagccttgtgggtggagactagtatttgatccttgccatataaaacattttaatatggtttacatgggaaaatatcgatggcttcctcacaaaatgtatgggtgacgtgaagttgaagagccaatggcttgggtgacacgtgctggatccaaaaagatcagggagactagaataaaacttggatgttaaaaattcaccaggaatccacataaagtactatatttgggctaaaatgaaaaactaaatacaaggtgggagagaggcaagaatttcagttgactaagctcagtgtgagtcaaagtgggatggaaccatgcaaaaacaaaacccacagacatgcaggctacgtgaggagaaaacagtggtgaggatcacatcacattgtgtttgcatttgccggaaccatactttaagaagaaaaccgatcatctataataacatcagtttatcaatgccccgtcctgatgaagtgtgcagactctcagaaacagcaggaaggacttcatgagaaccctcaggctggagaaggcactagggcacaaggagagctctcctaggaccaggaccaagaagctacaggcaggcacagtttagctcctgcagagacccagcttttcacaagttggagccttccagagatagagggactgtggtaggtggtgacccacccatcactggaggtggaagcagaggccgtttgccagggatgctggagaggggattcaagcatctggctgggcaacgtgatgctcagggccgtctccactcagggcttaggggagtctgtgagtagaagagctttaggtgatttgtttggtgggggaaggcaagtacacagctatgcactttccgtttctgacttttgccaccctgtcagccatggggagcccactgtgggactgaaaccctgagctgaatgcggcctcatgtctcagagaaacactggcaagttggtcagagccgccgtctgcatcgaggcgtagctgagcggcaggatggggggctgcctgcccagggtctctcaccgtggtgtaagcagagccatggcttgcctaggaccctatagataccatcactctttctcagctcgactggagtttctgcacctttgcaggggcaaagtaactccctgcaccctgaaccaccccccattcctgttcatttcagcagataatgatggagggggggggtgtccatcgtgctgagggtgtgaccgcaagagggtgaaaacttccagccaactttctcagtcctttctcttgcgagagggaagccacctgctatacaaactaataccccctgccttgaccccttccccacgactcagttgacagaaggatatactttgttataacttattattttgttctctgtaaatacaagatgtttataggaaatatgtattctgaactctatctgcagaatgagtcactacaccaaaatagttctattatttagaatgtgttaattttaaagggacctgataggtatttatttacatatgcgatccacatttgtgtgaaagcatgtgatcatactaacccagcctcctggaatgtcgctgtacgatgattgatgtctttttctcagtccatagttacaattgtttagtatgctaatcagtccagttccctgaggtttaagatcaaatataaattactctgcttttcgactcattcaggtagcattgtacctgaacctgattgctactttttcatcttaaatattatatttcctcatctaatctgccttcccctcatccacagacatttggagaaggaaatgggagggtgtctgttatccctttctctttgctttgtccccgttgttagactggcagcgtcagttgctcggtgggcttggttagagccgtgggtgaggcaggtggctggcggggacagggagaggctgagagggaagtggtggcatttactgctctgacacttccactgtccctgctggggatgctggggccaaggcctgtggggcctgtgaactgcacagccaggagcaaggaacccactaaatactccgtcacctccatgtcccctctacagtgttaaattattacataagcaggtgaaaggtagaaggcgaattatgtgagtaaatatggtctgttttctcttcagcaaaaatgactatttttgtgtgtgactaatttatttttattattgtaaagatacaataaaccggttgaaatatctgctttgttgacaagcgtgtgctttctctggccttattcgcgttctgttctcctgcaaatagcgccctctaaaaagaagagtcagacaataaactggttgaaatatc

SEQ ID NO: 191054 - DNA, 3403 bp, Homo sapiens
  Payload ID: 17741
  Gene Name: thrombospondin, type I, domain containing 4
  Uniprot ID: Q6ZMP0
  ENST ID: ENST00000357769
  CDS Start-End: 175-2151
agaacagaggctgagctcgaagcgccgggcagtacagtgagggagagccgagggaaccagcgcggtgcctagcggaactccagggctggaatcccgagacacaagtgcatctgctagctgttagcacttggcagacggagttctcctctagggtagttctaactttgggtaataatgtttgtcagctacctgatattaacattgctccacgttcaaacagcagtgttagcaagacctgggggagagagcattggctgtgatgactacttaggctccgacaaagtcgtggacaaatgtggggtgtgtggaggagacaacacgggctgtcaggttgtgtcgggcgtgtttaagcatgccctcaccagcctgggctaccaccgcgtcgtggagattcccgagggagccacgaaaatcaacatcacggagatgtacaagagcaacaactatttggccctgagaagtcgttctggacgctccatcatcaatgggaactgggcaattgatcgaccaggaaaatacgagggcggagggaccatgttcacctacaagcgtccaaatgagatttcgagcactgccggagagtcctttttggcggaaggtcccaccaacgagatcttggatgtctacatgatacaccagcagccaaacccaggcgtgcactacgagtacgtgatcatggggaccaacgccatcagcccccaggtgccaccccacaggagaccaggggaacccttcaatggccagatggtgacagaaggcaggagccaggaggagggagaacagaaagggaggaacgaggagaaggaagacttgcgtggggaggcccctgagatgttcacctcagaatcggcacagaccttcccagtcaggcatccagacagattttctccccatcgaccggacaacttggtgccaccagcaccgcagcccccacggcgcagccgggatcacaactggaagcagcttgggacaacagaatgttccacgacctgtgggaaaggatcgcagtaccctattttccgctgtgtgcacagaagcactcatgaagaggctcctgagagttactgtgactccagcatgaagccgacccccgaggaggagccctgcaacatcttcccttgcccagccttctgggacatcggggagtggtctgagtgcagcaagacctgtggcctgggcatgcagcaccgccaggttctgtgccgccaggtgtacgccaaccgcagcctgacggtgcagccctaccgctgccagcacctggagaaacctgagaccaccagcacctgccaactcaagatctgcagcgagtggcagatccggaccgactggacctcgtgctcggtgccctgcggcgtgggacagaggacccgtgatgtgaagtgtgtgagcaacattggggatgtggttgacgatgaggaatgcaacatgaagctccggccgaatgacattgagaactgcgacatgggaccctgtgccaagagctggttcctcaccgagtggagcgaaaggtgctcagcggagtgtggggccggagtgcggacacgctcggtggtgtgcatgaccaaccatgtcagcagcctgcccctggagggctgtgggaacaaccggccggcagaggccaccccatgtgacaacggaccctgcacgggcaaggtggagtggtttgccgggagctggagtcagtgttccatcgagtgtgggagcgggacgcaacagagggaggtgatttgtgttagaaagaatgcagacacctttgaagtgttggacccctctgaatgttctttcctggagaaaccccccagccagcaatcctgccacctcaagccttgcggagccaaatggtttagcaccgaatggagcatgtgttccaagagctgccagggtggctttcgggtccgggaagtgcggtgtctgtctgatgacatgactctaagtaacctctgtgaccctcagttgaaaccagaagagagagaatcttgtaaccctcaggactgtgtccctgaagttgatgaaaactgcaaggacaagtactacaactgcaacgtggtggtccaggcaagactctgtgtctacaactactacaagaccgcctgctgtgcctcctgcacccgtgtggccaacaggcagacgggcttcctggggagcagataacactcctgcacccccatcagtagggcagcatcactgccttcccgggggcttcagcagtgcgcctggctggctgctgctccaccacgggccccctggcccaggcgctgccaaccaacttagtcaccacccctgcctccggtgaatgcaccccgtggtacccaggggctttttacacaagatgtttgaaagccacagtcagtcctttaagcatcaccatgtactgatgatcccctccttggacctggcatctgctaatggtgccctttgaaagtcaagcagtgggaagtacatggagctctcagccctgctcccatctggcaccttcaagtcagcagatgggccactgactgagcactgccccgtccctggtgctactggtctttctaaacttagcaccctggagagtccaaggaggcagcgcccccaacccagcgccccactaagccttgctgacacgcgtgcatccctctgtgacctcagcccagatgtgcctgttttcattctcaaagacattagactgttttcctgccctatgacacagatagctcacatgaatattgtgctttatttagcaggtgtactcacagatactagctccttagcagctcacaacatcccagaatgggaggcagggggtgactcattatccccattttactgacagggaaactgaggctcaacttaagtaattgacctgccaggtatattcacccatccagtggaagagctgagtccccgccccagtcatctaccagtatccagcctggggcctgtacttagatgtgaaaggtgctgcttcatttctgaccaagagactgagaagtttcccagaatgcaaacaaagcccaggcccctgaaatctttccggtcaagcctttatcccagcactcagttgttttggatgtctgttcctacttgcccttacccccaaagttacagatcctagttacaggactctgccagctttgttaaactgtccgtgagacaagaaagccattggggaaaccaggtgattgcctgaaattcttactccgttccaagtgctgttcctcccaggaaatcaaaggccagggtccttatggccgtggagccttcccgaccacagagccaacttgtgaagcacacagctctgcagcctgggctctgccctgcctcagccgcctcccccacgctcttcaccacgttcctggagagtccggccaacctgtcccagccgaaacactgctgtattagaaaaagtctctttctggtc

SEQ ID NO: 191055 - DNA, 416 bp, Homo sapiens
  Payload ID: 17741
  Gene Name: thrombospondin, type I, domain containing 4
  ENST ID: ENST00000620694
  CDS Start-End: 114-416
cggccgccggtcgctccgggacgcggaccgccaggacttgaacgcaactcccaattgcagaaaattggcaacgtctctgaagagcccttgcttttgcctggacccccagcatcatggtttcccatttcatggggtctctcagtgtcctgtgtttccttctgctgcttggattccagttcgtctgcccacagccctccactcaacacaggaaggtcccgcagcggatggcggcggagggcgcccccgaggacgacggcggcggcggcgccccgggagtgtggggcgcctggggcccctggtcggcctgctcgcgtagctgcagcggcggcgtgatggagcagacgcggccctgcctgccccgctcctaccgcctgcgcggcggccagcggcctggcgcccctgcgcgcgccttcgcg

SEQ ID NO: 191056 - DNA, 10663 bp, Homo sapiens
  Payload ID: 17742
  Gene Name: thrombospondin, type I, domain containing 7A
  Uniprot ID: Q9UPZ6
  ENST ID: ENST00000423059
  CDS Start-End: 253-5226
attctgcgaggaatggcagcggcagcagcatccccgccagaggcggcggcggcggcggcagcggccacggccaccaccgcggacgctattgttccctggtgttagacgcgctctccctccttctcatctgaagcgaacaatagcaggaaagagctttgctttctgtactctttgaaaagacgttccaagagcggagaaaaattccctgccgagcgtgctacggctctggaccctggagtggctgcaggcggcatggggctgcaagccaggcgctgggcgtccgggagccggggcgctgcggggccgcgccggggcgtcctgcagctgctgccgctgccgctgccgctgccgctgctcctgctgctgctgctacgcccgggcgccggcagggctgcggcgcagggcgaggcggaggcgcccaccctctatctgtggaagactggtccatggggccgatgtatgggagatgaatgtggtcccggaggcatccaaacgagggctgtgtggtgtgctcatgtggagggatggactacactgcatactaactgtaagcaggccgagagacccaataaccagcagaattgtttcaaagtttgcgattggcacaaagagttgtacgactggagactgggaccttggaatcagtgtcagcccgtgatttcaaaaagcctagagaaacctcttgagtgcattaagggggaagaaggtattcaggtgagggagatagcgtgcatccagaaagacaaagacattcctgcggaggatatcatctgtgagtactttgagcccaagcctctcctggagcaggcttgcctcattccttgccagcaagattgcatcgtgtctgaattttctgcctggtccgaatgctccaagacctgcggcagcgggctccagcaccggacgcgtcatgtggtggcgcccccgcagttcggaggctctggctgtccaaacctgacggagttccaggtgtgccaatccagtccatgcgaggccgaggagctcaggtacagcctgcatgtggggccctggagcacctgctcaatgccccactcccgacaagtaagacaagcaaggagacgcgggaagaataaagaacgggaaaaggaccgcagcaaaggagtaaaggatccagaagcccgcgagcttattaagaaaaagagaaacagaaacaggcagaacagacaagagaacaaatattgggacatccagattggatatcagaccagagaggttatgtgcattaacaagacggggaaagctgctgatttaagcttttgccagcaagagaagcttccaatgaccttccagtcctgtgtgatcaccaaagagtgccaggtttccgagtggtcagagtggagcccctgctcaaaaacatgccatgacatggtgtcccctgcaggcactcgtgtaaggacacgaaccatcaggcagtttcccattggcagtgaaaaggagtgtccagaatttgaagaaaaagaaccctgtttgtctcaaggagatggagttgtcccctgtgccacgtatggctggagaactacagagtggactgagtgccgtgtggaccctttgctcagtcagcaggacaagaggcgcggcaaccagacggccctctgtggagggggcatccagacccgagaggtgtactgcgtgcaggccaacgaaaacctcctctcacaattaagtacccacaagaacaaagaagcctcaaagccaatggacttaaaattatgcactggacctatccctaatactacacagctgtgccacattccttgtccaactgaatgtgaagtttcaccttggtcagcttggggaccttgtacttatgaaaactgtaatgatcagcaagggaaaaaaggcttcaaactgaggaagcggcgcattaccaatgagcccactggaggctctggggtaaccggaaactgccctcacttactggaagccattccctgtgaagagcctgcctgttatgactggaaagcagtgagactgggaaactgcgagccagataacggaaaggagtgtggtccaggcacgcaagttcaagaggttgtgtgcatcaacagtgatggagaagaagttgacagacagctgtgcagagatgccatcttccccatccctgtggcctgtgatgccccatgcccgaaagactgtgtgctcagcacatggtctacgtggtcctcctgctcacacacctgctcagggaaaacgacagaagggaaacagatacgagcacgatccattctggcctatgcgggtgaagaaggtggaattcgctgtccaaatagcagtgctttgcaagaagtacgaagctgtaatgagcatccttgcacagtgtaccactggcaaactggtccctggggccagtgcattgaggacacctcagtatcgtccttcaacacaactacgacttggaatggggaggcctcctgctctgtcggcatgcagacaagaaaagtcatctgtgtgcgagtcaatgtgggccaagtgggacccaaaaaatgtcctgaaagccttcgacctgaaactgtaaggccttgtctgcttccttgtaagaaggactgtattgtgaccccatatagtgactggacatcatgcccctcttcgtgtaaagaaggggactccagtatcaggaagcagtctaggcatcgggtcatcattcagctgccagccaacgggggccgagactgcacagatcccctctatgaagagaaggcctgtgaggcacctcaagcgtgccaaagctacaggtggaagactcacaaatggcgcagatgccaattagtcccttggagcgtgcaacaagacagccctggagcacaggaaggctgtgggcctgggcgacaggcaagagccattacttgtcgcaagcaagatggaggacaggctggaatccatgagtgcctacagtatgcaggccctgtgccagcccttacccaggcctgccagatcccctgccaggatgactgtcaattgaccagctggtccaagttttcttcatgcaatggagactgtggtgcagttaggaccagaaagcgcactcttgttggaaaaagtaaaaagaaggaaaaatgtaaaaattcccatttgtatcccctgattgagactcagtattgtccttgtgacaaatataatgcacaacctgtggggaactggtcagactgtattttaccagagggaaaagtggaagtgttgctgggaatgaaagtacaaggagacatcaaggaatgcggacaaggatatcgttaccaagcaatggcatgctacgatcaaaatggcaggcttgtggaaacatctagatgtaacagccatggttacattgaggaggcctgcatcatcccctgcccctcagactgcaagctcagtgagtggtccaactggtcgcgctgcagcaagtcctgtgggagtggtgtgaaggttcgttctaaatggctgcgtgaaaaaccatataatggaggaaggccttgccccaaactggaccatgtcaaccaggcacaggtgtatgaggttgtcccatgccacagtgactgcaaccagtacctatgggtcacagagccctggagcatctgcaaggtgacctttgtgaatatgcgggagaactgtggagagggcgtgcaaacccgaaaagtgagatgcatgcagaatacagcagatggcccttctgaacatgtagaggattacctctgtgacccagaagagatgcccctgggctctagagtgtgcaaattaccatgccctgaggactgtgtgatatctgaatggggtccatggacccaatgtgttttgccttgcaatcaaagcagtttccggcaaaggtcagctgatcccatcagacaaccagctgatgaaggaagatcttgccctaatgctgttgagaaagaaccctgtaacctgaacaaaaactgctaccactatgattataatgtaacagactggagtacatgtcagctgagtgagaaggcagtttgtggaaatggaataaaaacaaggatgttggattgtgttcgaagtgatggcaagtcagttgacctgaaatattgtgaagcgcttggcttggagaagaactggcagatgaacacgtcctgcatggtggaatgccctgtgaactgtcagctttctgattggtctccttggtcagaatgttctcaaacatgtggcctcacaggaaaaatgatccgaagacgaacagtgacccagccctttcaaggtgatggaagaccatgcccttccctgatggaccagtccaaaccctgcccagtgaagccttgttatcggtggcaatatggccagtggtctccatgccaagtgcaggaggcccagtgtggagaagggaccagaacaaggaacatttcttgtgtagtaagtgatgggtcagctgatgatttcagcaaagtggtggatgaggaattctgtgctgacattgaactcattatagatggtaataaaaatatggttctggaggaatcctgcagccagccttgcccaggtgactgttatttgaaggactggtcttcctggagcctgtgtcagctgacctgtgtgaatggtgaggatctaggctttggtggaatacaggtcagatccagaccggtgattatacaagaactagagaatcagcatctgtgcccagagcagatgttagaaacaaaatcatgttatgatggacagtgctatgaatataaatggatggccagtgcttggaagggctcttcccgaacagtgtggtgtcaaaggtcagatggtataaatgtaacagggggctgcttggtgatgagccagcctgatgccgacaggtcttgtaacccaccgtgtagtcaaccccactcgtactgtagcgagacaaaaacatgccattgtgaagaagggtacactgaagtcatgtcttctaacagcacccttgagcaatgcacacttatccccgtggtggtattacccaccatggaggacaaaagaggagatgtgaaaaccagtcgggctgtacatccaacccaaccctccagtaacccagcaggacggggaaggacctggtttctacagccatttgggccagatgggagactaaagacctgggtttacggtgtagcagctggggcatttgtgttactcatctttattgtctccatgatttatctagcttgcaaaaagccaaagaaaccccaaagaaggcaaaacaaccgactgaaacctttaaccttagcctatgatggagatgccgacatgtaacatataacttttcctggcaacaaccagtttcggctttctgacttcatagatgtccagaggccacaacaaatgtatccaaactgtgtggattaaaatatattttaatttttaaaaatggcatcataaagacaagagtgaaaatcatactgccactggagatatttaagacagtaccacttatatacagaccatcaaccgtgagaattataggagatttagctgaatacatgctgcattctgaaagttttatgtcatcttttctgaaatctaccgactgaaaaaccactttcatctctaaaaaataatggtggaattggccagttaggatgcctgatacaagaccgtctgcagtgttaatccataaaacttcctagcatgaagagtttctaccaagatctccacaatactatggtcaaattaacatgtgtactcagttgaatgacacacattatgtcagattatgtacttgctaataagcaattttaacaatgcataacaaataaactctaagctaagcagaaaatccactgaataaattcagcatcttggtggtcgatggtagattttattgacctgcatttcagagacaaagcctcttttttaagacttcttgtctctctccaaagtaagaatgctggacaagtactagtgtcttagaagaacgagtcctcaagttcagtattttatagtggtaattgtctggaaaactaatttacttgtgttaatacaatacgtttctactttccctgattttcaaactggttgcctgcatcttttttgctatatggaaggcacatttttgcactatattagtgcagcacgataggcgcttaaccagtattgccatagaaactgcctcttttcatgtgggatgaagacatctgtgccaagagtggcatgaagacatttgcaagttcttgtatcctgaagagagtaaagttcagtttggatggcagcaagatgaaatcagctattacacctgctgtacacacacttcctcatcactgcagccattgtgaaattgacaacatggcggtaatttaagtgttgaagtccctaaccccttaaccctctaaaaggtggattcctctagttggtttgtaattgttctttgaaggctgtttatgactagatttttatatttgttatctttgttaagaaaaaaaaagaaaaaggaactggatgtctttttaattttgagcagatggagaaaataaataatgtatcaatgacctttgtaactaaaggaaatcaaaattatatgttgatttttctttctctctgatttcccagtttcagattgaatgtctgtcttgcaggcagttatttcaaaatccatagtcttttgcctttctcactggcaaaatttgaagcaatctctctcttcaatgtatgatttcaaaactaaaattttaaaagagaagaataaatatcttatccaagacttcattgcatatctagagcaagagtggcaaactttttctgtaaaggactatatagaaaatattttccacaaggtctatgttgcaacttctcaactttgccattctgctaatgcaatcttagtaaataaaagaatgaacataactgttttcctatataacttcccttacaaaaacagccagtaggccacctttgcaggtcatattttgctgacccctggtctggatgttttttaatgctagctctccatggtgtcatctttcgttttcattcatttttcaaaggtgagaatttacagtcattacatttcccactgtatcagaagtagctgtattttctacagatgtagccctgggaatggcacagtggaacaatatttaactaactcagcagacttcttgcaaatgaaaagaaaactcaaaaggtgccattaaaaagcaataccattttcaggcaacattattgcaacaacctttgtgagagaggacactagcttttcaggatatttgaaaaataatataactaacatgctattttatcttaaacagctgtgttcctgtaaaagtgttttggattagaaggtatttttaccttcatactggagtatgaactccccctgctgttcattagagtatttgcaaagattacaaaagacatcaggttaggatgtcattgtccccaaaatgaaaatatttgtatgtatttcaataagaactaaatgcagtaagcgctaattcctcattcaatattcactatattaggaaatgtaaatcatttcaaagagaacaggtagtcaggaagatgaaaattttactttaaagcaaggatttaaacaaagaaaaccataaaaacaaagtccattttatctgttttattaaagaggaagaaaaaataatattgttactttaaaactgtgattgtcaatatatataatcaggggtcttccagataatcctaaagttgatctctttgaataaaataaactccatttgtccaaaatagttaagaaagactctattgtggttacttgaaaaattcagctaaccctcttatgaaatgtgtgcaacacctattaattttgaaatgtgggatagaatacctactaaagctatatttaaggtattgtaaaatgtcattaattcagaaaagattagtatcatcctacctataagaattaaattagcaaatcaaaattatagaatgttatgaaaaatacattttattcataaattaattagattttacagcatatatgcatgcatatatatatatacacacacacacacacacacccatatatatgagagagaggaaattaggttcaacatgacctaatattagagaacatattggaaggtcactgtttgttaggataaataaatactggataacctcgttagaaaggtggaaagaggagaacgtagcaatctggctattttggacaaagggaaggttattatattcatgtttataacatgaaaatggccttatttttgtttctgacatgagacaataatgagttaaatattttattggaatttcatcaaaaccttatttttactgttccttctaaaaatttgggaggggaatatagtagtaacttctctattgacacttttacctcaccgagggggtaaaagatgtagaactgctgttccctagaatgaaggtctgttgtttggtttttaaaaaaagaagagcagaaaaagtttgacacagtattatatgattttgctggactatttcactagaaaccacgtagaataggactaactgatctcttttgaaaggggctgatttgcttattcatcaataactaatccaatatgtggacagtaatcttaatttcaaagccttttttgaggatactacggtgtagcttaagtgaatttaaaaagagtgcataaaagcttgtttttaattacttataacaaagcacaaattacttctaacaaggcaaatatttattgacatataagacattctgctaggcattgtaaaaaaaaaaaaaaaagtaatggcttttgtatacataggtacttaagacagacatccaaaagaaggaaaaaatgcttaatgagtgaagatagcactgaaacatgttgacttttactctaggtttgtttttagatggggttagtattttcccctacgtaatgtacatgtctttaggccacagtattaggagtttgatttttccctgccccaccctcaggtaggtggcagtggtcattgtagcttaatcagacccctgttaagttcctgggcatttcaaggtaaattcacgtcttccttctcacagaaattgaatagacctctcacacacttatttacctcccccaacaacctgtatccttggccctttctgattttctctgcttggtctctttctactcttgacagctattcttacctacttcccactaaacatgcccaattttttaattaaaaaaaaaagaattcctatatttccttccctattagaatcaaagtgtcactcactcagagtgtgaacatcctgatttacaccaaatccactggtcaaagaaatgaataaagggaaaaggaaaaatgtggaaggcatgcaggaaaaaaaaaaaaaaaaaagcccttttctgtaaaaatgtccatgcctacacttgctttagaccatcccatatcctcctgcctccatctcgagtctttgttcacattccacaccacaagacagtgagggaggactgtacttttcagtaccatacagaagggagagcctgttctaaagctgacgtgggtctcaatagtacatgagaagcacaattcccaaatgatctgggatctcctgtttataaatatattaccaaattcaagtgtgggttcttcttctatttccactgtaagattgagggtgttgaaaaaacagtagtccttgagcaaatctgtgaggaatcttgtcagaatgtgatctttcctgggactagtttagttgtgagaactacatctgcttgttctgggaataagggtctccccaggtcctgccctcaggtggccctggctgcaggacaggatttcaggtatcagaaactggtgtgtgagccaagcaaatagttatccatttataaaaaggatggtttgcagtgtgttataataattttatatctagcagggacaatgaaaaatggttatgtctacattattaaatgaatgaaactaatgctaaacagttaattttgcatttttatttttctgtgtttctaccaagtcagatcttaaaaatgggcagtatatgaagagctttagtttgtgggagtcatgttttcagtgatcaaaaatctctatattatttagaatataattgtcagtcttgttgtgttttgtagatttattgtttttaagccatagtttctagattacctacttttaaccctcaagtaaacttttccctatttttcagaaatctgtttgtgtttatttttagaaagtaaacatttagattccttttctggtactttttttctccatttctatcacacagatttgaagagatcagtatctatcattgtaaaatataactttattaaaatttgcaatctgtctttctataaattattattccctaaatgtgtattttatgttaatttaactacctgaatatttattttgtttaaataaggaggcagctgtctaagaatttttgttaatattactttgtaaattgcgtaatgtaatttattttacattatgtacatttcctttttaacgcacaaaatgtctatgtacaattaactacagatttgcaaataatgtcactaagctttattcagtcaatacagatggcatgtgaagatgtaatatgcttttttacattttcatatgggttatttgtaaataactatattgctgacaaacataaatacggaaatcattttcattctaatcatgtgtatctgtgttttgatttgcaccaattgcttcttaaatatggattaaaatttttttccagtgaatacctaaa

SEQ ID NO: 191057 - DNA, 10583 bp, Homo sapiens
  Payload ID: 17742
  Gene Name: thrombospondin, type I, domain containing 7A
  ENST ID: ENST00000617773
  CDS Start-End: 253-5226
attctgcgaggaatggcagcggcagcagcatccccgccagaggcggcggcggcggcggcagcggccacggccaccaccgcggacgctattgttccctggtgttagacgcgctctccctccttctcatctgaagcgaacaatagcaggaaagagctttgctttctgtactctttgaaaagacgttccaagagcggagaaaaattccctgccgagcgtgctacggctctggaccctggagtggctgcaggcggcatggggctgcaagccaggcgctgggcgtccgggagccggggcgctgcggggccgcgccggggcgtcctgcagctgctgccgctgccgctgccgctgccgctgctcctgctgctgctgctacgcccgggcgccggcagggctgcggcgcagggcgaggcggaggcgcccaccctctatctgtggaagactggtccatggggccgatgtatgggagatgaatgtggtcccggaggcatccaaacgagggctgtgtggtgtgctcatgtggagggatggactacactgcatactaactgtaagcaggccgagagacccaataaccagcagaattgtttcaaagtttgcgattggcacaaagagttgtacgactggagactgggaccttggaatcagtgtcagcccgtgatttcaaaaagcctagagaaacctcttgagtgcattaagggggaagaaggtattcaggtgagggagatagcgtgcatccagaaagacaaagacattcctgcggaggatatcatctgtgagtactttgagcccaagcctctcctggagcaggcttgcctcattccttgccagcaagattgcatcgtgtctgaattttctgcctggtccgaatgctccaagacctgcggcagcgggctccagcaccggacgcgtcatgtggtggcgcccccgcagttcggaggctctggctgtccaaacctgacggagttccaggtgtgccaatccagtccatgcgaggccgaggagctcaggtacagcctgcatgtggggccctggagcacctgctcaatgccccactcccgacaagtaagacaagcaaggagacgcgggaagaataaagaacgggaaaaggaccgcagcaaaggagtaaaggatccagaagcccgcgagcttattaagaaaaagagaaacagaaacaggcagaacagacaagagaacaaatattgggacatccagattggatatcagaccagagaggttatgtgcattaacaagacggggaaagctgctgatttaagcttttgccagcaagagaagcttccaatgaccttccagtcctgtgtgatcaccaaagagtgccaggtttccgagtggtcagagtggagcccctgctcaaaaacatgccatgacatggtgtcccctgcaggcactcgtgtaaggacacgaaccatcaggcagtttcccattggcagtgaaaaggagtgtccagaatttgaagaaaaagaaccctgtttgtctcaaggagatggagttgtcccctgtgccacgtatggctggagaactacagagtggactgagtgccgtgtggaccctttgctcagtcagcaggacaagaggcgcggcaaccagacggccctctgtggagggggcatccagacccgagaggtgtactgcgtgcaggccaacgaaaacctcctctcacaattaagtacccacaagaacaaagaagcctcaaagccaatggacttaaaattatgcactggacctatccctaatactacacagctgtgccacattccttgtccaactgaatgtgaagtttcaccttggtcagcttggggaccttgtacttatgaaaactgtaatgatcagcaagggaaaaaaggcttcaaactgaggaagcggcgcattaccaatgagcccactggaggctctggggtaaccggaaactgccctcacttactggaagccattccctgtgaagagcctgcctgttatgactggaaagcagtgagactgggaaactgcgagccagataacggaaaggagtgtggtccaggcacgcaagttcaagaggttgtgtgcatcaacagtgatggagaagaagttgacagacagctgtgcagagatgccatcttccccatccctgtggcctgtgatgccccatgcccgaaagactgtgtgctcagcacatggtctacgtggtcctcctgctcacacacctgctcagggaaaacgacagaagggaaacagatacgagcacgatccattctggcctatgcgggtgaagaaggtggaattcgctgtccaaatagcagtgctttgcaagaagtacgaagctgtaatgagcatccttgcacagtgtaccactggcaaactggtccctggggccagtgcattgaggacacctcagtatcgtccttcaacacaactacgacttggaatggggaggcctcctgctctgtcggcatgcagacaagaaaagtcatctgtgtgcgagtcaatgtgggccaagtgggacccaaaaaatgtcctgaaagccttcgacctgaaactgtaaggccttgtctgcttccttgtaagaaggactgtattgtgaccccatatagtgactggacatcatgcccctcttcgtgtaaagaaggggactccagtatcaggaagcagtctaggcatcgggtcatcattcagctgccagccaacgggggccgagactgcacagatcccctctatgaagagaaggcctgtgaggcacctcaagcgtgccaaagctacaggtggaagactcacaaatggcgcagatgccaattagtcccttggagcgtgcaacaagacagccctggagcacaggaaggctgtgggcctgggcgacaggcaagagccattacttgtcgcaagcaagatggaggacaggctggaatccatgagtgcctacagtatgcaggccctgtgccagcccttacccaggcctgccagatcccctgccaggatgactgtcaattgaccagctggtccaagttttcttcatgcaatggagactgtggtgcagttaggaccagaaagcgcactcttgttggaaaaagtaaaaagaaggaaaaatgtaaaaattcccatttgtatcccctgattgagactcagtattgtccttgtgacaaatataatgcacaacctgtggggaactggtcagactgtattttaccagagggaaaagtggaagtgttgctgggaatgaaagtacaaggagacatcaaggaatgcggacaaggatatcgttaccaagcaatggcatgctacgatcaaaatggcaggcttgtggaaacatctagatgtaacagccatggttacattgaggaggcctgcatcatcccctgcccctcagactgcaagctcagtgagtggtccaactggtcgcgctgcagcaagtcctgtgggagtggtgtgaaggttcgttctaaatggctgcgtgaaaaaccatataatggaggaaggccttgccccaaactggaccatgtcaaccagtttcaggtgtatgaggttgtcccatgccacagtgactgcaaccagtacctatgggtcacagagccctggagcatctgcaaggtgacctttgtgaatatgcgggagaactgtggagagggcgtgcaaacccgaaaagtgagatgcatgcagaatacagcagatggcccttctgaacatgtagaggattacctctgtgacccagaagagatgcccctgggctctagagtgtgcaaattaccatgccctgaggactgtgtgatatctgaatggggtccatggacccaatgtgttttgccttgcaatcaaagcagtttccggcaaaggtcagctgatcccatcagacaaccagctgatgaaggaagatcttgccctaatgctgttgagaaagaaccctgtaacctgaacaaaaactgctaccactatgattataatgtaacagactggagtacatgtcagctgagtgagaaggcagtttgtggaaatggaataaaaacaaggatgttggattgtgttcgaagtgatggcaagtcagttgacctgaaatattgtgaagcgcttggcttggagaagaactggcagatgaacacgtcctgcatggtggaatgccctgtgaactgtcagctttctgattggtctccttggtcagaatgttctcaaacatgtggcctcacaggaaaaatgatccgaagacgaacagtgacccagccctttcaaggtgatggaagaccatgcccttccctgatggaccagtccaaaccctgcccagtgaagccttgttatcggtggcaatatggccagtggtctccatgccaagtgcaggaggcccagtgtggagaagggaccagaacaaggaacatttcttgtgtagtaagtgatgggtcagctgatgatttcagcaaagtggtggatgaggaattctgtgctgacattgaactcattatagatggtaataaaaatatggttctggaggaatcctgcagccagccttgcccaggtgactgttatttgaaggactggtcttcctggagcctgtgtcagctgacctgtgtgaatggtgaggatctaggctttggtggaatacaggtcagatccagaccggtgattatacaagaactagagaatcagcatctgtgcccagagcagatgttagaaacaaaatcatgttatgatggacagtgctatgaatataaatggatggccagtgcttggaagggctcttcccgaacagtgtggtgtcaaaggtcagatggtataaatgtaacagggggctgcttggtgatgagccagcctgatgccgacaggtcttgtaacccaccgtgtagtcaaccccactcgtactgtagcgagacaaaaacatgccattgtgaagaagggtacactgaagtcatgtcttctaacagcacccttgagcaatgcacacttatccccgtggtggtattacccaccatggaggacaaaagaggagatgtgaaaaccagtcgggctgtacatccaacccaaccctccagtaacccagcaggacggggaaggacctggtttctacagccatttgggccagatgggagactaaagacctgggtttacggtgtagcagctggggcatttgtgttactcatctttattgtctccatgatttatctagcttgcaaaaagccaaagaaaccccaaagaaggcaaaacaaccgactgaaacctttaaccttagcctatgatggagatgccgacatgtaacatataacttttcctggcaacaaccagtttcggctttctgacttcatagatgtccagaggccacaacaaatgtatccaaactgtgtggattaaaatatattttaatttttaaaaatggcatcataaagacaagagtgaaaatcatactgccactggagatatttaagacagtaccacttatatacagaccatcaaccgtgagaattataggagatttagctgaatacatgctgcattctgaaagttttatgtcatcttttctgaaatctaccgactgaaaaaccactttcatctctaaaaaataatggtggaattggccagttaggatgcctgatacaagaccgtctgcagtgttaatccataaaacttcctagcatgaagagtttctaccaagatctccacaatactatggtcaaattaacatgtgtactcagttgaatgacacacattatgtcagattatgtacttgctaataagcaattttaacaatgcataacaaataaactctaagctaagcagaaaatccactgaataaattcagcatcttggtggtcgatggtagattttattgacctgcatttcagagacaaagcctcttttttaagacttcttgtctctctccaaagtaagaatgctggacaagtactagtgtcttagaagaacgagtcctcaagttcagtattttatagtggtaattgtctggaaaactaatttacttgtgttaatacaatacgtttctactttccctgattttcaaactggttgcctgcatcttttttgctatatggaaggcacatttttgcactatattagtgcagcacgataggcgcttaaccagtattgccatagaaactgcctcttttcatgtgggatgaagacatctgtgccaagagtggcatgaagacatttgcaagttcttgtatcctgaagagagtaaagttcagtttggatggcagcaagatgaaatcagctattacacctgctgtacacacacttcctcatcactgcagccattgtgaaattgacaacatggcggtaatttaagtgttgaagtccctaaccccttaaccctctaaaaggtggattcctctagttggtttgtaattgttctttgaaggctgtttatgactagatttttatatttgttatctttgttaagaaaaaaaaagaaaaaggaactggatgtctttttaattttgagcagatggagaaaataaataatgtatcaatgacctttgtaactaaaggaaatcaaaattatatgttgatttttctttctctctgatttcccagtttcagattgaatgtctgtcttgcaggcagttatttcaaaatccatagtcttttgcctttctcactggcaaaatttgaagcaatctctctcttcaatgtatgatttcaaaactaaaattttaaaagagaagaataaatatcttatccaagacttcattgcatatctagagcaagagtggcaaactttttctgtaaaggactatatagaaaatattttccacaaggtctatgttgcaacttctcaactttgccattctgctaatgcaatcttagtaaataaaagaatgaacataactgttttcctatataacttcccttacaaaaacagccagtaggccacctttgcaggtcatattttgctgacccctggtctggatgttttttaatgctagctctccatggtgtcatctttcgttttcattcatttttcaaaggtgagaatttacagtcattacatttcccactgtatcagaagtagctgtattttctacagatgtagccctgggaatggcacagtggaacaatatttaactaactcagcagacttcttgcaaatgaaaagaaaactcaaaaggtgccattaaaaagcaataccattttcaggcaacattattgcaacaacctttgtgagagaggacactagcttttcaggatatttgaaaaataatataactaacatgctattttatcttaaacagctgtgttcctgtaaaagtgttttggattagaaggtatttttaccttcatactggagtatgaactccccctgctgttcattagagtatttgcaaagattacaaaagacatcaggttaggatgtcattgtccccaaaatgaaaatatttgtatgtatttcaataagaactaaatgcagtaagcgctaattcctcattcaatattcactatattaggaaatgtaaatcatttcaaagagaacaggtagtcaggaagatgaaaattttactttaaagcaaggatttaaacaaagaaaaccataaaaacaaagtccattttatctgttttattaaagaggaagaaaaaataatattgttactttaaaactgtgattgtcaatatatataatcaggggtcttccagataatcctaaagttgatctctttgaataaaataaactccatttgtccaaaatagttaagaaagactctattgtggttacttgaaaaattcagctaaccctcttatgaaatgtgtgcaacacctattaattttgaaatgtgggatagaatacctactaaagctatatttaaggtattgtaaaatgtcattaattcagaaaagattagtatcatcctacctataagaattaaattagcaaatcaaaattatagaatgttatgaaaaatacattttattcataaattaattagattttacagcatatatgcatgcatatatatatatacacacacacacacacacacccatatatatgagagagaggaaattaggttcaacatgacctaatattagagaacatattggaaggtcactgtttgttaggataaataaatactggataacctcgttagaaaggtggaaagaggagaacgtagcaatctggctattttggacaaagggaaggttattatattcatgtttataacatgaaaatggccttatttttgtttctgacatgagacaataatgagttaaatattttattggaatttcatcaaaaccttatttttactgttccttctaaaaatttgggaggggaatatagtagtaacttctctattgacacttttacctcaccgagggggtaaaagatgtagaactgctgttccctagaatgaaggtctgttgtttggtttttaaaaaaagaagagcagaaaaagtttgacacagtattatatgattttgctggactatttcactagaaaccacgtagaataggactaactgatctcttttgaaaggggctgatttgcttattcatcaataactaatccaatatgtggacagtaatcttaatttcaaagccttttttgaggatactacggtgtagcttaagtgaatttaaaaagagtgcataaaagcttgtttttaattacttataacaaagcacaaattacttctaacaaggcaaatatttattgacatataagacattctgctaggcattgtaaaaaaaaaaaaaaaagtaatggcttttgtatacataggtacttaagacagacatccaaaagaaggaaaaaatgcttaatgagtgaagatagcactgaaacatgttgacttttactctaggtttgtttttagatggggttagtattttcccctacgtaatgtacatgtctttaggccacagtattaggagtttgatttttccctgccccaccctcaggtaggtggcagtggtcattgtagcttaatcagacccctgttaagttcctgggcatttcaaggtaaattcacgtcttccttctcacagaaattgaatagacctctcacacacttatttacctcccccaacaacctgtatccttggccctttctgattttctctgcttggtctctttctactcttgacagctattcttacctacttcccactaaacatgcccaattttttaattaaaaaaaaaagaattcctatatttccttccctattagaatcaaagtgtcactcactcagagtgtgaacatcctgatttacaccaaatccactggtcaaagaaatgaataaagggaaaaggaaaaatgtggaaggcatgcaggaaaaaaaaaaaaaaaaaagcccttttctgtaaaaatgtccatgcctacacttgctttagaccatcccatatcctcctgcctccatctcgagtctttgttcacattccacaccacaagacagtgagggaggactgtacttttcagtaccatacagaagggagagcctgttctaaagctgacgtgggtctcaatagtacatgagaagcacaattcccaaatgatctgggatctcctgtttataaatatattaccaaattcaagtgtgggttcttcttctatttccactgtaagattgagggtgttgaaaaaacagtagtccttgagcaaatctgtgaggaatcttgtcagaatgtgatctttcctgggactagtttagttgtgagaactacatctgcttgttctgggaataagggtctccccaggtcctgccctcaggtggccctggctgcaggacaggatttcaggtatcagaaactggtgtgtgagccaagcaaatagttatccatttataaaaaggatggtttgcagtgtgttataataattttatatctagcagggacaatgaaaaatggttatgtctacattattaaatgaatgaaactaatgctaaacagttaattttgcatttttatttttctgtgtttctaccaagtcagatcttaaaaatgggcagtatatgaagagctttagtttgtgggagtcatgttttcagtgatcaaaaatctctatattatttagaatataattgtcagtcttgttgtgttttgtagatttattgtttttaagccatagtttctagattacctacttttaaccctcaagtaaacttttccctatttttcagaaatctgtttgtgtttatttttagaaagtaaacatttagattccttttctggtactttttttctccatttctatcacacagatttgaagagatcagtatctatcattgtaaaatataactttattaaaatttgcaatctgtctttctataaattattattccctaaatgtgtattttatgttaatttaactacctgaatatttattttgtttaaataaggaggcagctgtctaagaatttttgttaatattactttgtaaattgcgtaatgtaatttattttacattatgtacatttcctttttaacgcacaaaatgtctatgtacaattaactacagatttgcaaataatgtcactaagctttattcagtcaatacagatggcatgtgaagatgtaatatgcttttttacattttcatatgggttatttgtaaataactatattgctgacaaacataaatacggaaatcattttcattct

SEQ ID NO: 191058 - DNA, 5939 bp, Homo sapiens
  Payload ID: 17743
  Gene Name: thrombospondin, type I, domain containing 7B
  Uniprot ID: Q9C0I4
  ENST ID: ENST00000272643
  CDS Start-End: 1-4827
atgtttccaaagagcaacctaacagtcacttgctgggtatggaggagcatgaggaagctctttctattgctttctctcttgctgtcccatgcagctcatttggaaggcaaaaaggataatcagttcatctggaaaccaggtccgtggggaaggtgtacaggagactgtggtcccggaggagtccagagtcgggcagtgtggtgttttcatgttgacgggtggacaagtcacctgtctaactgtggtgagagcaacaggcctccaaaggaaagaagttgtttccgagtttgtgactggcacagtgacctctttcagtgggaggtttctgactggcaccactgtgtgcttgttccttacgctcgcggtgaagtcaagcctcggactgcagagtgtgtgacggctcagcatggactgcagcaccggatggtgcgctgcattcagaagctgaaccgaactgtggttgcaaatgaaatatgcgaacactttgcccttcagcctcctacagaacaggcttgcctcattccttgtccccgggattgtgtagtatctgagttcttaccatggtccaactgtagcaagggatgtgggaagaaattgcagcatagaactcgcgcggtcatagctccccctctctttggtggtttgcaatgtccaaatctgactgagtcaagagcctgtgatgctcccatttcctgtcctcttggggaagaggaatatacatttagccttaaggttggaccatggagtaaatgcagactgcctcatcttaaagaaattaatccaagcggaagaactgttctggattttaactctgattcaaatgagcgagtcacctttaaacatcaaagttacaaagcacatcatcattcgaagtcttgggcaatagagataggttatcaaacccggcaggtttcgtgtacaagaagtgatggacaaaatgctatgttaagcctttgccttcaagattccttcccattgactgttcagtcctgcatcatgcccaaagactgtgaaacctcccagtggtcctcctggagcccctgctccaagacatgccgttcagggagtctcttgccaggatttaggagcaggagccggaacgtgaagcacatggctattggaggtggaaaggagtgtcctgaacttcttgagaaagaggcctgcattgttgaaggagaacttctgcagcaatgtcccaggtattcctggagaacttctgaatggaaagaatgccaagtctctctcctcctcgagcagcaggatccccactggcatgtgacgggacccgtgtgtggcggtgggatccagacccgggaggtgtactgtgcccagagcgtaccagcagctgccgcactgagggccaaggaagtctctagacctgtggaaaaggcattatgtgtgggacccgccccgttgccctctcagctctgcaatatcccttgctctacggactgcatagtatcttcctggtcagcctggggcctgtgcatccatgaaaactgtcatgatcctcaggggaaaaaaggatttagaacgaggcagcgccatgtcctcatggaatctacagggcctgcagggcattgccctcatttggtggagtctgttccttgtgaggatccaatgtgctaccgatggctggcatcagaagggatctgtttccctgatcatggaaaatgtggcctgggacatcgtattctgaaggccgtctgccagaatgaccgcggagaagatgtatcagggagtctttgcccagttccccctcctcctgagaggaagtcttgtgaaattccctgccgaatggactgtgtgctgagcgagtggacggagtggtcatcctgttcccagtcctgttcaaataaaaactcagatgggaaacagaccaggtcaagaactatcctggcactggctggggaaggtggaaagccatgtccccctagtcaggctctccaagagcatcgtttgtgtaatgaccattcctgtatgcagcttcactgggagacatcgccttggggcccttgttctgaggacacattggtaactgcccttaatgcaaccattggctggaatggagaagccacgtgtggtgtaggcattcagactcggagagtcttctgtgtcaagagtcacgtgggacaagtaatgaccaaaagatgtccagattctactcgacctgaaactgtgcgcccctgttttctcccatgcaaaaaagactgtattgtgactgctttcagtgagtggacaccctgcccaaggatgtgccaagcaggaaatgccacagtaaaacagtctcgatacagaatcatcatccaagaagcagccaatggaggccaggaatgcccagataccttatatgaggagagagagtgtgaagatgtttccttgtgtcctgtatatcggtggaagccacagaaatggagcccttgcatcttagtgccagagtctgtctggcagggaataacgggcagcagtgaagcctgtggaaaggggttacaaacaagagctgtctcatgcatctctgatgacaaccggtcagcagaaatgatggaatgcctcaagcagacaaacggcatgcctctccttgtgcaagaatgcacagtcccatgtcgagaagactgcaccttcactgcttggtccaagtttacgccctgctccacgaactgtgaagccacaaaaagtaggcggcgacagctcacagggaaaagcagaaagaaggagaaatgccaggattctgacctttaccctctagtggagacagaactatgtccttgtgatgaatttatatcccaaccttatggaaactggtcagattgcattcttccagaaggcagaagggagcctcaccgaggactgcgggtacaagcagacagcaaagaatgtggagaaggcctgcgctttcgagcagtagcctgttctgataaaaatggaagacctgttgacccctccttctgcagcagctctggttacattcaagaaaaatgtgtcattccctgcccatttgattgcaagttaagcgattggtctagttgggggtcttgcagttcatcttgtggaattggagtgagaattcgatccaaatggctaaaagaaaaaccttacaatggaggacgaccatgtcccaaactggatctcaagaatcagggacaggtacatgaggcagtcccatgttacagtgagtgcaatcagtattcctgggttgtagaacactggtcttcatgcaaaatcaacaatgagctgaggtccctgcgctgtggaggaggaacacaatctaggaaaatcagatgtgtgaatactgcggatggtgaaggtggagcagtggatagcaacctgtgcaaccaggatgaaattcccccagaaacccagtcctgttctcttatgtgtcccaatgagtgtgtcatgtctgagtggggactttggagcaaatgcccacagtcatgcgatccccacacaatgcagagaagaactcgccacctgctaagaccatcactgaactcaaggacttgtgctgaagactcacaggtgcagccttgcctcctgaatgaaaattgcttccagttccagtacaatctaacagagtggagcacatgccagctgagtgaaaacgcaccctgtggtcaaggcgtcaggacccgcctgctaagctgtgtgtgcagtgatggcaagccagtcagcatggaccaatgtgagcagcataatttggagaagccccagagaatgagcattccctgcttggtggaatgcgtggtcaactgtcagctctcagggtggacggcttggacagagtgttcacagacctgtggccatggaggtcgaatgagccggactcgatttatcattatgccaacccaaggagaaggacggccatgccccacagagcttacccaggagaaaacctgcccagtgaccccctgctacagctgggtccttggcaactggtctgcatgtaaattggagggtggagactgtggggaaggagttcagatccgcagcctttcctgcatggtccacagtggttcaatatctcatgcagctggacgtgtcgaggatgcactgtgtggagaaatgccctttcaggacagcatcctgaagcagctgtgttctgtgccttgcccaggagactgccatttaacagaatggtcagagtggagcacatgtgaattaacctgcattgatggaagaagctttgagactgtgggccgccagtctagatcaaggacttttataattcagtcttttgagaaccaagacagctgcccccaacaggttctagaaacacgcccttgtacaggaggcaaatgttatcactacacatggaaagcaagtctttggaacaataacgaacgaactgtatggtgccagcgttcagatggcgttaatgtcacaggaggctgctcccctcaggcccgtcctgctgccattcggcagtgcattccagcctgcagaaaacctttctcctactgtacacagggtggagtctgtggttgtgagaagggctatacagagataatgaaatcaaatggtttcctggattactgcatgaaagtaccaggctcagaggataaaaaagctgatgtgaaaaacctttctgggaaaaacagacctgtgaattcaaaaatacatgatatttttaaaggatggtctcttcaaccacttgatccagatggccgagtaaaaatttgggtttatggcgtttcaggtggcgcttttctcatcatgattttcctaatatttacttcctaccttgtttgcaagaagccaaaaccacatcaaagcacacctccccaacagaagcctctgaccttagcctacgatggagacttagacatgtaatctgaaaaagaaatccaaatgtagacatcaactgccttaaccgctttctcttttgtagctctcagacttctcagttttttgaggaatctcaagatgtgatatattgggcagaatacaaatattgcaaaagtaatattgcctcaacttcatttggacatggagtcaaggattattaggtctgccattttgttttcaagttgtttgtgggtgtgttttatttttttggttttcccaagggacctgaaaacccttctcttcctgtttggaactgggaggaagaaaacatgatggaattcccacagacttgagtaaacttgatcttcagcagcataatgacaatccagaggaaaatacagtcaaggcatttactctaaatgacgagtctgacactgcattgttacgcactatattagtgcaaagtctttattcttcccatacttcaacactgagttttctagagtttactttggtttaaagactttcaaattggattgcctatttttcatgaacacagagagaatggattaccatttcagaaattctctgagtttttaacctttaaatattgtattttgttttgtagccaggggatgatggcgcttcatgggttgcagctactgaaaatagcagcgtgtgtgtaattgctggactagatgaaagctaggtcatttctgaagggaatgtgtactgaatgttagagtgtacaaatgaaatatgtggttaaattggagaatgaggtagattatttgattactaaaactgtattttaacaaaaacttatccatgtagatatagcattaaccacacacagttgtaattcagtttaatgatgacaaactctgcttttgtaatttcaattttcttatctgaatatttataaattcttctttcaaatttaattatctgacctcatttaatatacatcaaacaccgatcctgtttgtacaaagtcttgcttttataaggtttcaataatatctaaaacaacacattaaaaagctgagaccattttatgaagataattgtttgtaatcataggtgttgaaagtaaaaaggtgccatcttgtggtattgacttgtatttataacaaataaactgctcaagagactgc

SEQ ID NO: 191059 - DNA, 6111 bp, Homo sapiens
  Payload ID: 17743
  Gene Name: thrombospondin, type I, domain containing 7B
  ENST ID: ENST00000409968
  CDS Start-End: 179-4999
agtgctgaggagccagagtcgccgccgggttgccagacgctggaatgggtggtcttccgacacacaccaccatctttcttgcgctcgggaagctcggggctcagcggctcccagaggttacggcggcggctctggcgagacgggaataggcaagtcaagaggctgaaaaatctgaagcatgtttccaaagagcaacctaacagtcacttgctgggtatggaggagcatgaggaagctctttctattgctttctctcttgctgtcccatgcagctcatttggaaggcaaaaaggataatcagttcatctggaaaccaggtccgtggggaaggtgtacaggagactgtggtcccggaggagtccagagtcgggcagtgtggtgttttcatgttgacgggtggacaagtcacctgtctaactgtggtgagagcaacaggcctccaaaggaaagaagttgtttccgagtttgtgactggcacagtgacctctttcagtgggaggtttctgactggcaccactgtgtgcttgttccttacgctcgcggtgaagtcaagcctcggactgcagagtgtgtgacggctcagcatggactgcagcaccggatggtgcgctgcattcagaagctgaaccgaactgtggttgcaaatgaaatatgcgaacactttgcccttcagcctcctacagaacaggcttgcctcattccttgtccccgggattgtgtagtatctgagttcttaccatggtccaactgtagcaagggatgtgggaagaaattgcagcatagaactcgcgcggtcatagctccccctctctttggtggtttgcaatgtccaaatctgactgagtcaagagcctgtgatgctcccatttcctgtcctcttggggaagaggaatatacatttagccttaaggttggaccatggagtaaatgcagactgcctcatcttaaagaaattaatccaagcggaagaactgttctggattttaactctgattcaaatgagcgagtcacctttaaacatcaaagttacaaagcacatcatcattcgaagtcttgggcaatagagataggttatcaaacccggcaggtttcgtgtacaagaagtgatggacaaaatgctatgttaagcctttgccttcaagattccttcccattgactgttcagtcctgcatcatgcccaaagactgtgaaacctcccagtggtcctcctggagcccctgctccaagacatgccgttcagggagtctcttgccaggatttaggagcaggagccggaacgtgaagcacatggctattggaggtggaaaggagtgtcctgaacttcttgagaaagaggcctgcattgttgaaggagaacttctgcagcaatgtcccaggtattcctggagaacttctgaatggaaagaatgccaagtctctctcctcctcgagcagcaggatccccactggcatgtgacgggacccgtgtgtggcggtgggatccagacccgggaggtgtactgtgcccagagcgtaccagcagctgccgcactgagggccaaggaagtctctagacctgtggaaaaggcattatgtgtgggacccgccccgttgccctctcagctctgcaatatcccttgctctacggactgcatagtatcttcctggtcagcctggggcctgtgcatccatgaaaactgtcatgatcctcaggggaaaaaaggatttagaacgaggcagcgccatgtcctcatggaatctacagggcctgcagggcattgccctcatttggtggagtctgttccttgtgaggatccaatgtgctaccgatggctggcatcagaagggatctgtttccctgatcatggaaaatgtggcctgggacatcgtattctgaaggccgtctgccagaatgaccgcggagaagatgtatcagggagtctttgcccagttccccctcctcctgagaggaagtcttgtgaaattccctgccgaatggactgtgtgctgagcgagtggacggagtggtcatcctgttcccagtcctgttcaaataaaaactcagatgggaaacagaccaggtcaagaactatcctggcactggctggggaaggtggaaagccatgtccccctagtcaggctctccaagagcatcgtttgtgtaatgaccattcctgtatgcagcttcactgggagacatcgccttggggcccttgttctgaggacacattggtaactgcccttaatgcaaccattggctggaatggagaagccacgtgtggtgtaggcattcagactcggagagtcttctgtgtcaagagtcacgtgggacaagtaatgaccaaaagatgtccagattctactcgacctgaaactgtgcgcccctgttttctcccatgcaaaaaagactgtattgtgactgctttcagtgagtggacaccctgcccaaggatgtgccaagcaggaaatgccacagtaaaacagtctcgatacagaatcatcatccaagaagcagccaatggaggccaggaatgcccagataccttatatgaggagagagagtgtgaagatgtttccttgtgtcctgtatatcggtggaagccacagaaatggagcccttgcatcttagtgccagagtctgtctggcagggaataacgggcagcagtgaagcctgtggaaaggggttacaaacaagagctgtctcatgcatctctgatgacaaccggtcagcagaaatgatggaatgcctcaagcagacaaacggcatgcctctccttgtgcaagaatgcacagtcccatgtcgagaagactgcaccttcactgcttggtccaagtttacgccctgctccacgaactgtgaagccacaaaaagtaggcggcgacagctcacagggaaaagcagaaagaaggagaaatgccaggattctgacctttaccctctagtggagacagaactatgtccttgtgatgaatttatatcccaaccttatggaaactggtcagattgcattcttccagaaggcagaagggagcctcaccgaggactgcgggtacaagcagacagcaaagaatgtggagaaggcctgcgctttcgagcagtagcctgttctgataaaaatggaagacctgttgacccctccttctgcagcagctctggttacattcaagaaaaatgtgtcattccctgcccatttgattgcaagttaagcgattggtctagttgggggtcttgcagttcatcttgtggaattggagtgagaattcgatccaaatggctaaaagaaaaaccttacaatggaggacgaccatgtcccaaactggatctcaagaatcaggtacatgaggcagtcccatgttacagtgagtgcaatcagtattcctgggttgtagaacactggtcttcatgcaaaatcaacaatgagctgaggtccctgcgctgtggaggaggaacacaatctaggaaaatcagatgtgtgaatactgcggatggtgaaggtggagcagtggatagcaacctgtgcaaccaggatgaaattcccccagaaacccagtcctgttctcttatgtgtcccaatgagtgtgtcatgtctgagtggggactttggagcaaatgcccacagtcatgcgatccccacacaatgcagagaagaactcgccacctgctaagaccatcactgaactcaaggacttgtgctgaagactcacaggtgcagccttgcctcctgaatgaaaattgcttccagttccagtacaatctaacagagtggagcacatgccagctgagtgaaaacgcaccctgtggtcaaggcgtcaggacccgcctgctaagctgtgtgtgcagtgatggcaagccagtcagcatggaccaatgtgagcagcataatttggagaagccccagagaatgagcattccctgcttggtggaatgcgtggtcaactgtcagctctcagggtggacggcttggacagagtgttcacagacctgtggccatggaggtcgaatgagccggactcgatttatcattatgccaacccaaggagaaggacggccatgccccacagagcttacccaggagaaaacctgcccagtgaccccctgctacagctgggtccttggcaactggtctgcatgtaaattggagggtggagactgtggggaaggagttcagatccgcagcctttcctgcatggtccacagtggttcaatatctcatgcagctggacgtgtcgaggatgcactgtgtggagaaatgccctttcaggacagcatcctgaagcagctgtgttctgtgccttgcccaggagactgccatttaacagaatggtcagagtggagcacatgtgaattaacctgcattgatggaagaagctttgagactgtgggccgccagtctagatcaaggacttttataattcagtcttttgagaaccaagacagctgcccccaacaggttctagaaacacgcccttgtacaggaggcaaatgttatcactacacatggaaagcaagtctttggaacaataacgaacgaactgtatggtgccagcgttcagatggcgttaatgtcacaggaggctgctcccctcaggcccgtcctgctgccattcggcagtgcattccagcctgcagaaaacctttctcctactgtacacagggtggagtctgtggttgtgagaagggctatacagagataatgaaatcaaatggtttcctggattactgcatgaaagtaccaggctcagaggataaaaaagctgatgtgaaaaacctttctgggaaaaacagacctgtgaattcaaaaatacatgatatttttaaaggatggtctcttcaaccacttgatccagatggccgagtaaaaatttgggtttatggcgtttcaggtggcgcttttctcatcatgattttcctaatatttacttcctaccttgtttgcaagaagccaaaaccacatcaaagcacacctccccaacagaagcctctgaccttagcctacgatggagacttagacatgtaatctgaaaaagaaatccaaatgtagacatcaactgccttaaccgctttctcttttgtagctctcagacttctcagttttttgaggaatctcaagatgtgatatattgggcagaatacaaatattgcaaaagtaatattgcctcaacttcatttggacatggagtcaaggattattaggtctgccattttgttttcaagttgtttgtgggtgtgttttatttttttggttttcccaagggacctgaaaacccttctcttcctgtttggaactgggaggaagaaaacatgatggaattcccacagacttgagtaaacttgatcttcagcagcataatgacaatccagaggaaaatacagtcaaggcatttactctaaatgacgagtctgacactgcattgttacgcactatattagtgcaaagtctttattcttcccatacttcaacactgagttttctagagtttactttggtttaaagactttcaaattggattgcctatttttcatgaacacagagagaatggattaccatttcagaaattctctgagtttttaacctttaaatattgtattttgttttgtagccaggggatgatggcgcttcatgggttgcagctactgaaaatagcagcgtgtgtgtaattgctggactagatgaaagctaggtcatttctgaagggaatgtgtactgaatgttagagtgtacaaatgaaatatgtggttaaattggagaatgaggtagattatttgattactaaaactgtattttaacaaaaacttatccatgtagatatagcattaaccacacacagttgtaattcagtttaatgatgacaaactctgcttttgtaatttcaattttcttatctgaatatttataaattcttctttcaaatttaattatctgacctcatttaatatacatcaaacaccgatcctgtttgtacaaagtcttgcttttataaggtttcaataatatctaaaacaacacattaaaaagctgagaccattttatgaagataattgtttgtaatcataggtgttgaaagtaaaaaggtgccatcttgtggtattgacttgtatttataacaaataaactgctcaagagactgc

SEQ ID NO: 191060 - DNA, 5846 bp, Homo sapiens
  Payload ID: 17743
  Gene Name: thrombospondin, type I, domain containing 7B
  ENST ID: ENST00000413152
  CDS Start-End: 1-4734
atgcataacacagcagatgaggtggttttgtatcacaaattagcaggtccgtggggaaggtgtacaggagactgtggtcccggaggagtccagagtcgggcagtgtggtgttttcatgttgacgggtggacaagtcacctgtctaactgtggtgagagcaacaggcctccaaaggaaagaagttgtttccgagtttgtgactggcacagtgacctctttcagtgggaggtttctgactggcaccactgtgtgcttgttccttacgctcgcggtgaagtcaagcctcggactgcagagtgtgtgacggctcagcatggactgcagcaccggatggtgcgctgcattcagaagctgaaccgaactgtggttgcaaatgaaatatgcgaacactttgcccttcagcctcctacagaacaggcttgcctcattccttgtccccgggattgtgtagtatctgagttcttaccatggtccaactgtagcaagggatgtgggaagaaattgcagcatagaactcgcgcggtcatagctccccctctctttggtggtttgcaatgtccaaatctgactgagtcaagagcctgtgatgctcccatttcctgtcctcttggggaagaggaatatacatttagccttaaggttggaccatggagtaaatgcagactgcctcatcttaaagaaattaatccaagcggaagaactgttctggattttaactctgattcaaatgagcgagtcacctttaaacatcaaagttacaaagcacatcatcattcgaagtcttgggcaatagagataggttatcaaacccggcaggtttcgtgtacaagaagtgatggacaaaatgctatgttaagcctttgccttcaagattccttcccattgactgttcagtcctgcatcatgcccaaagactgtgaaacctcccagtggtcctcctggagcccctgctccaagacatgccgttcagggagtctcttgccaggatttaggagcaggagccggaacgtgaagcacatggctattggaggtggaaaggagtgtcctgaacttcttgagaaagaggcctgcattgttgaaggagaacttctgcagcaatgtcccaggtattcctggagaacttctgaatggaaagaatgccaagtctctctcctcctcgagcagcaggatccccactggcatgtgacgggacccgtgtgtggcggtgggatccagacccgggaggtgtactgtgcccagagcgtaccagcagctgccgcactgagggccaaggaagtctctagacctgtggaaaaggcattatgtgtgggacccgccccgttgccctctcagctctgcaatatcccttgctctacggactgcatagtatcttcctggtcagcctggggcctgtgcatccatgaaaactgtcatgatcctcaggggaaaaaaggatttagaacgaggcagcgccatgtcctcatggaatctacagggcctgcagggcattgccctcatttggtggagtctgttccttgtgaggatccaatgtgctaccgatggctggcatcagaagggatctgtttccctgatcatggaaaatgtggcctgggacatcgtattctgaaggccgtctgccagaatgaccgcggagaagatgtatcagggagtctttgcccagttccccctcctcctgagaggaagtcttgtgaaattccctgccgaatggactgtgtgctgagcgagtggacggagtggtcatcctgttcccagtcctgttcaaataaaaactcagatgggaaacagaccaggtcaagaactatcctggcactggctggggaaggtggaaagccatgtccccctagtcaggctctccaagagcatcgtttgtgtaatgaccattcctgtatgcagcttcactgggagacatcgccttggggcccttgttctgaggacacattggtaactgcccttaatgcaaccattggctggaatggagaagccacgtgtggtgtaggcattcagactcggagagtcttctgtgtcaagagtcacgtgggacaagtaatgaccaaaagatgtccagattctactcgacctgaaactgtgcgcccctgttttctcccatgcaaaaaagactgtattgtgactgctttcagtgagtggacaccctgcccaaggatgtgccaagcaggaaatgccacagtaaaacagtctcgatacagaatcatcatccaagaagcagccaatggaggccaggaatgcccagataccttatatgaggagagagagtgtgaagatgtttccttgtgtcctgtatatcggtggaagccacagaaatggagcccttgcatcttagtgccagagtctgtctggcagggaataacgggcagcagtgaagcctgtggaaaggggttacaaacaagagctgtctcatgcatctctgatgacaaccggtcagcagaaatgatggaatgcctcaagcagacaaacggcatgcctctccttgtgcaagaatgcacagtcccatgtcgagaagactgcaccttcactgcttggtccaagtttacgccctgctccacgaactgtgaagccacaaaaagtaggcggcgacagctcacagggaaaagcagaaagaaggagaaatgccaggattctgacctttaccctctagtggagacagaactatgtccttgtgatgaatttatatcccaaccttatggaaactggtcagattgcattcttccagaaggcagaagggagcctcaccgaggactgcgggtacaagcagacagcaaagaatgtggagaaggcctgcgctttcgagcagtagcctgttctgataaaaatggaagacctgttgacccctccttctgcagcagctctggttacattcaagaaaaatgtgtcattccctgcccatttgattgcaagttaagcgattggtctagttgggggtcttgcagttcatcttgtggaattggagtgagaattcgatccaaatggctaaaagaaaaaccttacaatggaggacgaccatgtcccaaactggatctcaagaatcaggctcaggtacatgaggcagtcccatgttacagtgagtgcaatcagtattcctgggttgtagaacactggtcttcatgcaaaatcaacaatgagctgaggtccctgcgctgtggaggaggaacacaatctaggaaaatcagatgtgtgaatactgcggatggtgaaggtggagcagtggatagcaacctgtgcaaccaggatgaaattcccccagaaacccagtcctgttctcttatgtgtcccaatgagtgtgtcatgtctgagtggggactttggagcaaatgcccacagtcatgcgatccccacacaatgcagagaagaactcgccacctgctaagaccatcactgaactcaaggacttgtgctgaagactcacaggtgcagccttgcctcctgaatgaaaattgcttccagttccagtacaatctaacagagtggagcacatgccagctgagtgaaaacgcaccctgtggtcaaggcgtcaggacccgcctgctaagctgtgtgtgcagtgatggcaagccagtcagcatggaccaatgtgagcagcataatttggagaagccccagagaatgagcattccctgcttggtggaatgcgtggtcaactgtcagctctcagggtggacggcttggacagagtgttcacagacctgtggccatggaggtcgaatgagccggactcgatttatcattatgccaacccaaggagaaggacggccatgccccacagagcttacccaggagaaaacctgcccagtgaccccctgctacagctgggtccttggcaactggtctgcatgtaaattggagggtggagactgtggggaaggagttcagatccgcagcctttcctgcatggtccacagtggttcaatatctcatgcagctggacgtgtcgaggatgcactgtgtggagaaatgccctttcaggacagcatcctgaagcagctgtgttctgtgccttgcccaggagactgccatttaacagaatggtcagagtggagcacatgtgaattaacctgcattgatggaagaagctttgagactgtgggccgccagtctagatcaaggacttttataattcagtcttttgagaaccaagacagctgcccccaacaggttctagaaacacgcccttgtacaggaggcaaatgttatcactacacatggaaagcaagtctttggaacaataacgaacgaactgtatggtgccagcgttcagatggcgttaatgtcacaggaggctgctcccctcaggcccgtcctgctgccattcggcagtgcattccagcctgcagaaaacctttctcctactgtacacagggtggagtctgtggttgtgagaagggctatacagagataatgaaatcaaatggtttcctggattactgcatgaaagtaccaggctcagaggataaaaaagctgatgtgaaaaacctttctgggaaaaacagacctgtgaattcaaaaatacatgatatttttaaaggatggtctcttcaaccacttgatccagatggccgagtaaaaatttgggtttatggcgtttcaggtggcgcttttctcatcatgattttcctaatatttacttcctaccttgtttgcaagaagccaaaaccacatcaaagcacacctccccaacagaagcctctgaccttagcctacgatggagacttagacatgtaatctgaaaaagaaatccaaatgtagacatcaactgccttaaccgctttctcttttgtagctctcagacttctcagttttttgaggaatctcaagatgtgatatattgggcagaatacaaatattgcaaaagtaatattgcctcaacttcatttggacatggagtcaaggattattaggtctgccattttgttttcaagttgtttgtgggtgtgttttatttttttggttttcccaagggacctgaaaacccttctcttcctgtttggaactgggaggaagaaaacatgatggaattcccacagacttgagtaaacttgatcttcagcagcataatgacaatccagaggaaaatacagtcaaggcatttactctaaatgacgagtctgacactgcattgttacgcactatattagtgcaaagtctttattcttcccatacttcaacactgagttttctagagtttactttggtttaaagactttcaaattggattgcctatttttcatgaacacagagagaatggattaccatttcagaaattctctgagtttttaacctttaaatattgtattttgttttgtagccaggggatgatggcgcttcatgggttgcagctactgaaaatagcagcgtgtgtgtaattgctggactagatgaaagctaggtcatttctgaagggaatgtgtactgaatgttagagtgtacaaatgaaatatgtggttaaattggagaatgaggtagattatttgattactaaaactgtattttaacaaaaacttatccatgtagatatagcattaaccacacacagttgtaattcagtttaatgatgacaaactctgcttttgtaatttcaattttcttatctgaatatttataaattcttctttcaaatttaattatctgacctcatttaatatacatcaaacaccgatcctgtttgtacaaagtcttgcttttataaggtttcaataatatctaaaacaacacattaaaaagctgagaccattttatgaagataattgtttgtaatcataggtgttgaaagtaaaaaggtgccatcttgtggtattgacttgtatttataacaaataaactgctcaagagactgc

SEQ ID NO: 191061 - DNA, 532 bp, Homo sapiens
  Payload ID: 17743
  Gene Name: thrombospondin, type I, domain containing 7B
  ENST ID: ENST00000472720
  CDS Start-End: 179-331
agtgctgaggagccagagtcgccgccgggttgccagacgctggaatgggtggtcttccgacacacaccaccatctttcttgcgctcgggaagctcggggctcagcggctcccagaggttacggcggcggctctggcgagacgggaataggcaagtcaagaggctgaaaaatctgaagcatgtttccaaagagcaacctaacagtcacttgctgggtatggaggagcatgaggaagctctttctattgctttctctcttgctgtcccatgcagctcatttggaaggcaaaaaggataatcagttcatctggaaaccaggacttgccaagtagaagaaagcacttattggagagggggagtagagtcaagcaaataaacctgagatttttaggatcatttttataagtcttgaattcgttgatgatgttaacaaaaaagtccgtggggaaggtgtacaggagactgtggtcccggaggagtccagagtcgggcagtgtggtgttttcatgttgacgggtggacaagtcacctgt

SEQ ID NO: 191062 - DNA, 3967 bp, Homo sapiens
  Payload ID: 17744
  Gene Name: thrombospondin-type laminin G domain and EAR repeats
  Uniprot ID: Q8WU66
  ENST ID: ENST00000323084
  CDS Start-End: 67-2076
tgaggagcagccacttccctgcaggctgagcggagccctggatggagcttggcacccaagcccctcatgtctgccctgctgagtctgtgttttgtgctgcccctggcggcccccggccacggcacgcagggttgggagccctgcacagacctgcgccccctggacatcctggcggaagtggtcccttctgatggcgccacaagcgggatcaggatagttcaggttcacggtgcacggggactccagctctcagtagccgccccccgcaccatgagcttcccagcatccaggattttctcccagtgtgacctcttccctgaagaattttccatcgtcgtaactttgagagttcccaatcttccacccaagaggaacgagtacctgctgacggtggtggcagaggagagcgacctgctgctgctcggcctgcggttgtcacctgcccagctgcacttcctgttccttcgcgaggacacggccggcgcctggcagacccgagtgtccttccgcagcccggccctggtggatggccgctggcacacactggtcctggctgtgtccgcaggcgtcttctccctcaccacggactgcggcctcccggtggacataatggccgatgtgcccttcccagccaccctgtcagtgaaaggagctcgattcttcgtcggcagccggaggagagccaaaggcctgttcatgggactggtgaggcaactggtcctgctgccgggctcagacgccaccccaaggctgtgtcccagcaggaacgccccgctggcggtgctgtccatcccacgggtcctgcaggctctcacggggaagccagaagataacgaggtgctaaaatatccctatgaaaccaacattcgagtgacgctgggaccccagccaccgtgtaccgaggtggaagacgcccagttctggtttgatgccagccggaagggcctgtatctgtgtgttggcaacgagtgggtctccgtgttagcagccaaagaaagactggactacgtggaggagcatcagaacttgtccaccaactcagagaccctgggcattgaggtgttccgcatccctcaggtggggctctttgtggccacagccaatcgcaaagccacatccgccgtctacaagtggaccgaagagaagttcgtctcatatcagaacatccccacgcaccaagcacaggcctggaggcatttcaccatcgggaaaaagatcttcctggcagtggctaattttgaaccagatgagaagggtcaggagttctctgtcatttacaaatggagccacagaaagctgaagtttaccccatatcagagcattgccacacacagcgcccgagactgggaggccttcgaggtggatggggagcacttcctggcggtggccaaccaccgggaaggcgacaaccacaacatcgacagtgtcatctacaagtggaacccggcaacccggctcttcgaggccaaccagaccatcgccacctccggcgcctacgactgggagttcttcagtgtggggccctactcgttcctggtggtggccaacaccttcaacggcacctccaccaaggtgcactcgcacctctacatccgactcctgggctccttccagctcttccagtccttcccgacgttcggtgctgcagactgggaggtcttccagatcggggagaggatcttcctcgctgtggcaaacagtcacagctacgatgtggagatgcaagtccagaatgattcctatgtcatcaactccgtcatctacgagctgaacgtgaccgcgcaggcctttgtcaagttccaggacattctcacctgcagtgctctggactgggagtttttctcggtgggagaagattatttcctggtggtggccaactccttcgatgggcgtaccttctcggtgaacagtattatttacaggtggcagggctacgagggcttcgtggcggtgcacagcctccccaccgtcggctgcagggactgggaggccttcagcaccacggctggtgcctacctcatctactccagcgccaaggagcccctctccagggtcctgcggctgaggacacgctgaggccgcggctgcccggcagcaactggggtggccaggtggggcgggaccccagcacctcccccaactgaccctggacgtccaggtgggcccagcctagggcatcccgggcctgggcatcaggcagggtgcaggtggggccatctgcggccctggttcgggcagggacatccatccacctctgagtccttctgagccacagccccagtgacggtctggtcttgcaggcagaggcccagagcccctgccagtgctcgcccatctgagtgtcaagcggggatttcgctgtcaaggaaccgtttctatacatttttacctcaaacaacaggacctcggttcatgtccctgcggctggcctctcgccagccactcctgcagtgtgcgtccggccgcctgagcaggtgtggtgccgtcccgccattgccgccacctatttattgtgttttatctgaacggaagtgtatttatactgctctttacaaaagcaccggtgctcctctctaggcagcgggtgggcacagcccctcaccacggacacggacagaggaccacctccccatacagagagaggcttccctcccagcctcagtttacccgtaaatgcactagcgcgaggtcagaaatcacaagcctgggcatggcctgggtcgcaccccctccccacggccccacccacagggacctcaacttctgggcccgggattttttccctattcagcagcattttaatcacatgtcctccagctgactgggactcaggctgcgtgcctccgtctgcctgtgtgctggctgtcctagctccctggtaacagcatcctctgctggctctcctgtggtcatcttgtctctgcagctgggagagctgcttgtctgtccgtcacaggcagtgaggatgagagggggtgatgggcgcaaggccccaggggtcctccctcttaacccatgtaggtgccagagaaaccacccccactccatgagaagaggctcagacagcaggctccggggccacgcagcccagaccacacctgccacggtcttccaggaacggtgctcctgcttctgcaacacaaatcggaacaggagcgatcctcagagagtttacaatgtgctttttccgccaatcagaactgtggacaaaacttcctatttcctacaccgcagctgtctgttcaccttcagctcagagagcactcctgacctttcgtaatgaaatggaagcctccccttgtctggcaaataataaactcagtgtctacttttgccggctttgggaccttcgtgtttttccggggctcaggtctcactccagccatcgctgtggccagtggagagccactcccctctgggggcagtcgccgagagcctccttcccctccgtccagccagcaaggctttcccaagcgtcctgggcaggagggttgggccctgctttccaccaagtcactcagaaggtcccaatcacacatgattggcctcattgggtcagcacctgtgaaaggaagattaaaaactcgacaccccaattcactcaaccaagaagaaaaaagctgaaagctgagtcctgcaggaagctgcctttccctttgccctaagcagacagctgcagatgagagggtcagcatctccactagtggctgctctgtgtgccccttatctcatggaaagtgccaatttactgagcacgagataaacaggtaactgactgttcccacctgctccttttctcctgcagcatggagcaatcagtcatgtgaccacaccctcctccctctgccccctccagccggcttttccccttgactgaagccttcaacatcatcttgggagagaggcacagacctgtctcctgggtgcatccttagccttggcaaaataaacttctccattgatcgag

SEQ ID NO: 191063 - DNA, 2114 bp, Homo sapiens
  Payload ID: 17744
  Gene Name: thrombospondin-type laminin G domain and EAR repeats
  ENST ID: ENST00000397916
  CDS Start-End: 160-1752
aggaaccaggaaggcagacgcggctgctgtagctcagacctgcgccccctggacatcctggcggaagtggtcccttctgatggcgccacaagcgggatcaggatagttcaggttcacggtgcacggggactccagctctcagtagccgccccccgcaccatgagcttcccagcatccaggattttctcccagtgtgacctcttccctgaagaattttccatcgtcgtaactttgagagttcccaatcttccacccaagaggaacgagtacctgctgacggtggtggcagaggagagcgacctgctgctgctcggcctgcggttgtcacctgcccagctgcacttcctgttccttcgcgaggacacggccggcgcctggcagacccgagtgtccttccgcagcccggccctggtggatggccgctggcacacactggtcctggctgtgtccgcaggcgtcttctccctcaccacggactgcggcctcccggtggacataatggccgatgtgcccttcccagccaccctgtcagtgaaaggagctcgattcttcgtcggcagccggaggagagccaaaggcctgttcatgggactggtgaggcaactggtcctgctgccgggctcagacgccaccccaaggctgtgtcccagcaggaacgccccgctggcggtgctgtccatcccacgggtcctgcaggctctcacggggaagccagaagataacgaggtgctaaaatatccctatgaaaccaacattcgagtgacgctgggaccccagccaccgtgtaccgaggtggaagacgcccagttctggtttgatgccagccggaagggcctgtatctgtgtgttggcaacgagtgggtctccgtgttagcagccaaagaaagactggactacgtggaggagcatcagaacttgtccaccaactcagagaccctgggcattgaggtgttccgcatccctcaggtggggctctttgtggccacagccaatcgcaaagccacatccgccgtctacaagtggaccgaagagaagttcgtctcatatcagaacatccccacgcaccaagcacaggcctggaggcatttcaccatcgggaaaaagatcttcctggcagtggctaattttgaaccagatgagaagggtcaggagttctctgtcatttacaaatggagccacagaaagctgaagtttaccccatatcagagcattgccacacacagcgcccgagactgggaggccttcgaggtggatggggagcacttcctggcggtggccaaccaccgggaaggcgacaaccacaacatcgacagtgtcatctacaagtggaacccggcaacccggctcttcgaggccaaccagaccatcgccacctccggcgcctacgactgggagttcttcagtgtggggccctactcgttcctggtggtggccaacaccttcaacggcacctccaccaaggtgcactcgcacctctacatccgactcctgggctccttccagctcttccagtccttcccgacgttcggtgctgcagactgggaggtcttccagatcggggagaggatcttcctcgctgtggcaaacagtcacagctacgatgtggagatgcaagtccagaatgattcctatgtcatcaactccgtcatctacgagctgaacgtgaccgcgcaggcctttgtcaagttccaggacattctcacctgcagtggaggcaggagggggcttcatgcccgtcgtgcggagggatagccgaggccccagagggacaggtgcgaggtgcaggcttcgagtgcccgctgcctgccagtgccagctgccaccagacatgattacttccttcccccgatgttgcatcctccccgacaacaaacaccaggacacggagactggcctgttgagacagatgtgagatccagggaacatggagggtgggtctgtatgtacgagaaagtgatggttccagaccgacacgctccgtggagccacaggaggttgcgtgggcaccacattttggacagtgggcactgagaatccacaaccatcctgaccagtgtggggcgtcctctggggtggaattccggtctgtgaataaacctgcaatcgaatccgta

SEQ ID NO: 191064 - DNA, 3524 bp, Homo sapiens
  Payload ID: 17744
  Gene Name: thrombospondin-type laminin G domain and EAR repeats
  ENST ID: ENST00000613245
  CDS Start-End: 67-1635
tgaggagcagccacttccctgcaggctgagcggagccctggatggagcttggcacccaagcccctcatgtctgccctgctgagtctgtgttttgtgctgcccctggcggcccccggccacggcacgcagggttgggagccctgcacagacctgcgccccctggacatcctggcggaagtggtcccttctgatggcgccacaagcgggatcaggatagttcaggttcacggtgcacggggactccagctctcagtagccgccccccgcaccatgagcttcccagcatccaggattttctcccagtgtgacctcttccctgaagaattttccatcgtcgtaactttgagagttcccaatcttccacccaagaggaacgagtacctgctgacggtggtggcagaggagagcgacctgctgctgctcggcctgcggttgtcacctgcccagccaccgtgtaccgaggtggaagacgcccagttctggtttgatgccagccggaagggcctgtatctgtgtgttggcaacgagtgggtctccgtgttagcagccaaagaaagactggactacgtggaggagcatcagaacttgtccaccaactcagagaccctgggcattgaggtgttccgcatccctcaggtggggctctttgtggccacagccaatcgcaaagccacatccgccgtctacaagtggaccgaagagaagttcgtctcatatcagaacatccccacgcaccaagcacaggcctggaggcatttcaccatcgggaaaaagatcttcctggcagtggctaattttgaaccagatgagaagggtcaggagttctctgtcatttacaaatggagccacagaaagctgaagtttaccccatatcagagcattgccacacacagcgcccgagactgggaggccttcgaggtggatggggagcacttcctggcggtggccaaccaccgggaaggcgacaaccacaacatcgacagtgtcatctacaagtggaacccggcaacccggctcttcgaggccaaccagaccatcgccacctccggcgcctacgactgggagttcttcagtgtggggccctactcgttcctggtggtggccaacaccttcaacggcacctccaccaaggtgcactcgcacctctacatccgactcctgggctccttccagctcttccagtccttcccgacgttcggtgctgcagactgggaggtcttccagatcggggagaggatcttcctcgctgtggcaaacagtcacagctacgatgtggagatgcaagtccagaatgattcctatgtcatcaactccgtcatctacgagctgaacgtgaccgcgcaggcctttgtcaagttccaggacattctcacctgcagtgctctggactgggagtttttctcggtgggagaagattatttcctggtggtggccaactccttcgatgggcgtaccttctcggtgaacagtattatttacaggtggcagggctacgagggcttcgtggcggtgcacagcctccccaccgtcggctgcagggactgggaggccttcagcaccacggctggtgcctacctcatctactccagcgccaaggagcccctctccagggtcctgcggctgaggacacgctgaggccgcggctgcccggcagcaactggggtggccaggtggggcgggaccccagcacctcccccaactgaccctggacgtccaggtgggcccagcctagggcatcccgggcctgggcatcaggcagggtgcaggtggggccatctgcggccctggttcgggcagggacatccatccacctctgagtccttctgagccacagccccagtgacggtctggtcttgcaggcagaggcccagagcccctgccagtgctcgcccatctgagtgtcaagcggggatttcgctgtcaaggaaccgtttctatacatttttacctcaaacaacaggacctcggttcatgtccctgcggctggcctctcgccagccactcctgcagtgtgcgtccggccgcctgagcaggtgtggtgccgtcccgccattgccgccacctatttattgtgttttatctgaacggaagtgtatttatactgctctttacaaaagcaccggtgctcctctctaggcagcgggtgggcacagcccctcaccacggacacggacagaggaccacctccccatacagagagaggcttccctcccagcctcagtttacccgtaaatgcactagcgcgaggtcagaaatcacaagcctgggcatggcctgggtcgcaccccctccccacggccccacccacagggacctcaacttctgggcccgggattttttccctattcagcagcattttaatcacatgtcctccagctgactgggactcaggctgcgtgcctccgtctgcctgtgtgctggctgtcctagctccctggtaacagcatcctctgctggctctcctgtggtcatcttgtctctgcagctgggagagctgcttgtctgtccgtcacaggcagtgaggatgagagggggtgatgggcgcaaggccccaggggtcctccctcttaacccatgtaggtgccagagaaaccacccccactccatgagaagaggctcagacagcaggctccggggccacgcagcccagaccacacctgccacggtcttccaggaacggtgctcctgcttctgcaacacaaatcggaacaggagcgatcctcagagagtttacaatgtgctttttccgccaatcagaactgtggacaaaacttcctatttcctacaccgcagctgtctgttcaccttcagctcagagagcactcctgacctttcgtaatgaaatggaagcctccccttgtctggcaaataataaactcagtgtctacttttgccggctttgggaccttcgtgtttttccggggctcaggtctcactccagccatcgctgtggccagtggagagccactcccctctgggggcagtcgccgagagcctccttcccctccgtccagccagcaaggctttcccaagcgtcctgggcaggagggttgggccctgctttccaccaagtcactcagaaggtcccaatcacacatgattggcctcattgggtcagcacctgtgaaaggaagattaaaaactcgacaccccaattcactcaaccaagaagaaaaaagctgaaagctgagtcctgcaggaagctgcctttccctttgccctaagcagacagctgcagatgagagggtcagcatctccactagtggctgctctgtgtgccccttatctcatggaaagtgccaatttactgagcacgagataaacaggtaactgactgttcccacctgctccttttctcctgcagcatggagcaatcagtcatgtgaccacaccctcctccctctgccccctccagccggcttttccccttgactgaagccttcaacatcatcttgggagagaggcacagacctgtctcctgggtgcatccttagccttggcaaaataaacttctccattgatcg

SEQ ID NO: 191065 - DNA, 4027 bp, Homo sapiens
  Payload ID: 17744
  Gene Name: thrombospondin-type laminin G domain and EAR repeats
  ENST ID: ENST00000614657
  CDS Start-End: 333-2138
tgaggagcagccacttccctgcaggctgagcggagccctggatggagcttggcacccaagcccctcatgtctgccctgctgagtctgtgttttgtgctgcccctggcggcccccggccacggcacgcagggttgggagccctgcacagcatgctcatctttgaaagcgtgggctgaatgctgacctcccggacatcatgagtgttgttctacctgcgccccctggacatcctggcggaagtggtcccttctgatggcgccacaagcgggatcaggatagttcaggttcacggtgcacggggactccagctctcagtagccgccccccgcaccatgagcttcccagcatccaggattttctcccagtgtgacctcttccctgaagaattttccatcgtcgtaactttgagagttcccaatcttccacccaagaggaacgagtacctgctgacggtggtggcagaggagagcgacctgctgctgctcggcctgcggttgtcacctgcccagctgcacttcctgttccttcgcgaggacacggccggcgcctggcagacccgagtgtccttccgcagcccggccctggtggatggccgctggcacacactggtcctggctgtgtccgcaggcgtcttctccctcaccacggactgcggcctcccggtggacataatggccgatgtgcccttcccagccaccctgtcagtgaaaggagctcgattcttcgtcggcagccggaggagagccaaaggcctgttcatgggactggtgaggcaactggtcctgctgccgggctcagacgccaccccaaggctgtgtcccagcaggaacgccccgctggcggtgctgtccatcccacgggtcctgcaggctctcacggggaagccagaagataacgaggtgctaaaatatccctatgaaaccaacattcgagtgacgctgggaccccagccaccgtgtaccgaggtggaagacgcccagttctggtttgatgccagccggaagggcctgtatctgtgtgttggcaacgagtgggtctccgtgttagcagccaaagaaagactggactacgtggaggagcatcagaacttgtccaccaactcagagaccctgggcattgaggtgttccgcatccctcaggtggggctctttgtggccacagccaatcgcaaagccacatccgccgtctacaagtggaccgaagagaagttcgtctcatatcagaacatccccacgcaccaagcacaggcctggaggcatttcaccatcgggaaaaagatcttcctggcagtggctaattttgaaccagatgagaagggtcaggagttctctgtcatttacaaatggagccacagaaagctgaagtttaccccatatcagagcattgccacacacagcgcccgagactgggaggccttcgaggtggatggggagcacttcctggcggtggccaaccaccgggaaggcgacaaccacaacatcgacagtgtcatctacaagtggaacccggcaacccggctcttcgaggccaaccagaccatcgccacctccggcgcctacgactgggagttcttcagtgtggggccctactcgttcctggtggtggccaacaccttcaacggcacctccaccaaggtgcactcgcacctctacatccgactcctgggctccttccagctcttccagtccttcccgacgttcggtgctgcagactgggaggtcttccagatcggggagaggatcttcctcgctgtggcaaacagtcacagctacgatgtggagatgcaagtccagaatgattcctatgtcatcaactccgtcatctacgagctgaacgtgaccgcgcaggcctttgtcaagttccaggacattctcacctgcagtgctctggactgggagtttttctcggtgggagaagattatttcctggtggtggccaactccttcgatgggcgtaccttctcggtgaacagtattatttacaggtggcagggctacgagggcttcgtggcggtgcacagcctccccaccgtcggctgcagggactgggaggccttcagcaccacggctggtgcctacctcatctactccagcgccaaggagcccctctccagggtcctgcggctgaggacacgctgaggccgcggctgcccggcagcaactggggtggccaggtggggcgggaccccagcacctcccccaactgaccctggacgtccaggtgggcccagcctagggcatcccgggcctgggcatcaggcagggtgcaggtggggccatctgcggccctggttcgggcagggacatccatccacctctgagtccttctgagccacagccccagtgacggtctggtcttgcaggcagaggcccagagcccctgccagtgctcgcccatctgagtgtcaagcggggatttcgctgtcaaggaaccgtttctatacatttttacctcaaacaacaggacctcggttcatgtccctgcggctggcctctcgccagccactcctgcagtgtgcgtccggccgcctgagcaggtgtggtgccgtcccgccattgccgccacctatttattgtgttttatctgaacggaagtgtatttatactgctctttacaaaagcaccggtgctcctctctaggcagcgggtgggcacagcccctcaccacggacacggacagaggaccacctccccatacagagagaggcttccctcccagcctcagtttacccgtaaatgcactagcgcgaggtcagaaatcacaagcctgggcatggcctgggtcgcaccccctccccacggccccacccacagggacctcaacttctgggcccgggattttttccctattcagcagcattttaatcacatgtcctccagctgactgggactcaggctgcgtgcctccgtctgcctgtgtgctggctgtcctagctccctggtaacagcatcctctgctggctctcctgtggtcatcttgtctctgcagctgggagagctgcttgtctgtccgtcacaggcagtgaggatgagagggggtgatgggcgcaaggccccaggggtcctccctcttaacccatgtaggtgccagagaaaccacccccactccatgagaagaggctcagacagcaggctccggggccacgcagcccagaccacacctgccacggtcttccaggaacggtgctcctgcttctgcaacacaaatcggaacaggagcgatcctcagagagtttacaatgtgctttttccgccaatcagaactgtggacaaaacttcctatttcctacaccgcagctgtctgttcaccttcagctcagagagcactcctgacctttcgtaatgaaatggaagcctccccttgtctggcaaataataaactcagtgtctacttttgccggctttgggaccttcgtgtttttccggggctcaggtctcactccagccatcgctgtggccagtggagagccactcccctctgggggcagtcgccgagagcctccttcccctccgtccagccagcaaggctttcccaagcgtcctgggcaggagggttgggccctgctttccaccaagtcactcagaaggtcccaatcacacatgattggcctcattgggtcagcacctgtgaaaggaagattaaaaactcgacaccccaattcactcaaccaagaagaaaaaagctgaaagctgagtcctgcaggaagctgcctttccctttgccctaagcagacagctgcagatgagagggtcagcatctccactagtggctgctctgtgtgccccttatctcatggaaagtgccaatttactgagcacgagataaacaggtaactgactgttcccacctgctccttttctcctgcagcatggagcaatcagtcatgtgaccacaccctcctccctctgccccctccagccggcttttccccttgactgaagccttcaacatcatcttgggagagaggcacagacctgtctcctgggtgcatccttagccttggcaaaataaacttctccattgatcg

SEQ ID NO: 191066 - DNA, 2367 bp, Homo sapiens
  Payload ID: 17745
  Gene Name: thromboxane A synthase 1 (platelet)
  ENST ID: ENST00000263552
  CDS Start-End: 539-2143
gagggccggcctggacccggcgggcgcacggctccgagcccagcgcagccgagccggtctgcagaggggcccccagaactttgtgtgtgtgtgtgcacgcgcgcgcgtgtgtgcccaggtgcgagggttcgcgcgtgtgctggcggggagggaaccgacccgaaagagagccccacgctggcaaagtggctcgcccatctcacagccggttggcgctcgcggaggctcacagaacatttcctgcctgttgctcacactctgttgtccacagcatacccgcaccctagatggctgactcttgtcttctgtctctttattttccatgtgtgagcctgtgcctgtggtttatctctggaggatgtgcctgagggaggagacatatactgcctggactgcctggctgatgtgagctagtttgtctggttgagttggatgtttaaatagaaggcagaacaacaacagagcacggttcccataagggcggcgagatcagcctcctgtctcatctggaagaccaccactctggggtctcagaggaatgatggaagccttggggtttctaaaattggaagtgaatggccccatggtgacggtggccctgtcagtggctctcttggccctcctgaaatggtactccacatcagcattctcaagactggagaagttaggcctcagacatcccaagccttctcctttcattggaaacttgacatttttccgccagggtttttgggaaagccaaatggagctcagaaagctgtatggacctctgtgtgggtactatcttggtcgtcggatgtttattgttatttctgagccagacatgatcaagcaggtgttggttgagaacttcagtaactttaccaacagaatggcgtcgggtttggagttcaagtcggtagccgacagcgttctgtttttacgtgacaaaagatgggaagaggtcagaggtgccctgatgtctgctttcagtcctgaaaagctgaacgagatggttcccctcatcagccaagcctgcgaccttctcctggctcatttaaaacgctatgcggaatctggggacgcatttgacatccagaggtgctactgcaattacaccacagatgtggttgccagcgtcgcctttggcaccccggtggactcctggcaggcccctgaggatccctttgtgaaacactgcaagcgtttcttcgaattctgcatccccagacctatcctggttttactcttatcatttccatccataatggtcccactggcccggattttgcccaataagaaccgagacgaactgaatggcttttttaacaaactcattaggaatgtgattgccttgcgggaccagcaagctgccgaagagaggcggagagacttcctccaaatggtcctggatgcccgacattctgcaagtcccatgggcgtgcaagactttgacatcgtcagagacgttttctcctctactgggtgcaagccgaacccttcccggcaacaccagcccagccctatggccaggcctttgactgtggatgagattgtgggccaggccttcatcttcctcatcgctggctatgaaatcatcaccaacacactttcttttgccacctacctactggccaccaaccctgactgccaagagaagcttctgagagaggtagacgtttttaaggagaaacacatggcccctgagttctgcagcctcgaggaaggcctgccctatctggacatggtgattgcagagacgctgaggatgtacccgccagctttcagattcacacgggaggcagctcaggactgcgaggtgctggggcagcgcatccccgcaggcgctgtgctagagatggccgtgggtgccctgcaccatgaccctgagcactggccaagcccggagaccttcaaccctgaaaggttcacggctgaggcccggcagcagcaccggcccttcacgtacctgcccttcggggccggcccacggagctgcctcggggtgcgtctagggctgcttgaggtcaagttgacactgctccacgtgctgcacaagttccggttccaagcctgccctgagacccaggtaccgctgcagctagaatccaaatctgccctaggtccaaaaaatggtgtctatatcaagatcgtatcccgctgacacagaaggctgccgggtggggggagggcacccccaaattcaaagaaaaccctaagtgtggatgttcagaattttggaaaaatgtcactgaagtgattgaaagagtgcctggcatgcaaggataagaggttctttacataacatttcctaaatgcttaataaacgtttgttgcacttggttttgacattgccaatggggtttgaaccagtgctctctctaaatg

SEQ ID NO: 191067 - DNA, 2185 bp, Homo sapiens
  Payload ID: 17745
  Gene Name: thromboxane A synthase 1 (platelet)
  Uniprot ID: P24557
  ENST ID: ENST00000336425
  CDS Start-End: 390-1991
aaccgacccgaaagagagccccacgctggcaaagtggctcgcccatctcacagccggttggcgctcgcggaggctcacagaacatttcctgcctgttgctcacactctgttgtccacagcatacccgcaccctagatggctgactcttgtcttctgtctctttattttccatgtgtgagcctgtgcctgtggtttatctctggaggatgtgcctgagggaggagacatatactgcctggactgcctggctgatgtgagctagtttgtctggttgagttggatgtttaaatagaaggcagaacaacaacagagcacggttcccataagggcggcgagatcagcctcctgtctcatctggaagaccaccactctggggtctcagaggaatgatggaagccttggggtttctaaaattggaagtgaatggccccatggtgacggtggccctgtcagtggctctcttggccctcctgaaatggtactccacatcagcattctcaagactggagaagttaggcctcagacatcccaagccttctcctttcattggaaacttgacatttttccgccagggtttttgggaaagccaaatggagctcagaaagctgtatggacctctgtgtgggtactatcttggtcgtcggatgtttattgttatttctgagccagacatgatcaagcaggtgttggttgagaacttcagtaactttaccaacagaatggcgtcgggtttggagttcaagtcggtagccgacagcgttctgtttttacgtgacaaaagatgggaagaggtcagaggtgccctgatgtctgctttcagtcctgaaaagctgaacgagatggttcccctcatcagccaagcctgcgaccttctcctggctcatttaaaacgctatgcggaatctggggacgcatttgacatccagaggtgctactgcaattacaccacagatgtggttgccagcgtcgcctttggcaccccggtggactcctggcaggcccctgaggatccctttgtgaaacactgcaagcgtttcttcgaattctgcatccccagacctatcctggttttactcttatcatttccatccataatggtcccactggcccggattttgcccaataagaaccgagacgaactgaatggcttttttaacaaactcattaggaatgtgattgccttgcgggaccagcaagctgccgaagagaggcggagagacttcctccaaatggtcctggatgcccgacattctgcaagtcccatgggcgtgcaagactttgacatcgtcagagacgttttctcctctactgggtgcaagccgaacccttcccggcaacaccagcccagccctatggccaggcctttgactgtggatgagattgtgggccaggccttcatcttcctcatcgctggctatgaaatcatcaccaacacactttcttttgccacctacctactggccaccaaccctgactgccaagagaagcttctgagagaggtagacgtttttaaggagaaacacatggcccctgagttctgcagcctcgaggaaggcctgccctatctggacatggtgattgcagagacgctgaggatgtacccgccagctttcagattcacacgggaggcagctcaggactgcgaggtgctggggcagcgcatccccgcaggcgctgtgctagagatggccgtgggtgccctgcaccatgaccctgagcactggccaagcccggagaccttcaaccctgaaaggttcacggctgaggcccggcagcagcaccggcccttcacgtacctgcccttcggggccggcccacggagctgcctcggggtgcgtctagggctgcttgaggtcaagttgacactgctccacgtgctgcacaagttccggttccaagcctgccctgagacccaggtaccgctgcagctagaatccaaatctgccctaggtccaaaaaatggtgtctatatcaagatcgtatcccgctgacacagaaggctgccgggtggggggagggcacccccaaattcaaagaaaaccctaagtgtggatgttcagaattttggaaaaatgtcactgaagtgattgaaagagtgcctggcatgcaaggataagaggttctttacataacatttcctaaatgcttaataaacgtttgttgcacttggttttgacattgccaa

SEQ ID NO: 191068 - DNA, 752 bp, Homo sapiens
  Payload ID: 17745
  Gene Name: thromboxane A synthase 1 (platelet)
  ENST ID: ENST00000438104
  CDS Start-End: 303-752
gtgtgcacgcgcgcgcgtgtgtgcccaggtgcgagggttcgcgcgtgtgctggcggggagggaaccgacccgaaagagagccccacgctggcaaagtggctcgcccatctcacagccggttggcgctcgcggaggagacatatactgcctggactgcctggctgatgtgagctagtttgtctggttgagttggatgtttaaatagaaggcagaacaacaacagagcacggttcccataagggcggcgagatcagcctcctgtctcatctggaagaccaccactctggggtctcagaggaatgatggaagccttggggtttctaaaattggaagtgaatggccccatggtgacggtggccctgtcagtggctctcttggccctcctgaaatggtactccacatcagcattctcaagactggagaagttaggcctcagacatcccaagccttctcctttcattggaaacttgacatttttccgccagggtttttgggaaagccaaatggagctcagaaagctgtatggacctctgtgtgggtactatcttggtcgtcggatgtttattgttatttctgagccagacatgatcaagcaggtgttggttgagaacttcagtaactttaccaacagaatggcgtcgggtttggagttcaagtcggtagccgacagcgttctgtttttacgtgacaaaagatgggaagaggtcagaggtgccctgatgtctgctttcagtcctgaaaagctgaacgag

SEQ ID NO: 191069 - DNA, 2080 bp, Homo sapiens
  Payload ID: 17745
  Gene Name: thromboxane A synthase 1 (platelet)
  Uniprot ID: P24557
  ENST ID: ENST00000425687
  CDS Start-End: 490-1890
gagggccggcctggacccggcgggcgcacggctccgagcccagcgcagccgagccggtctgcagaggggcccccagaactttgtgtgtgtgtgtgcacgcgcgcgcgtgtgtgcccaggtgcgagggttcgcgcgtgtgctggcggggagggaaccgacccgaaagagagccccacgctggcaaagtggctcgcccatctcacagccggttggcgctcgcggagctctttattttccatgtgtgagcctgtgcctgtggtttatctctggaggatgtgcctgagggaggagacatatactgcctggactgcctggctgatgtgagctagtttgtctggttgagttggatgtttaaatagaaggcagaacaacaacaggtactccacatcagcattctcaagactggagaagttaggcctcagacatcccaagccttctcctttcattggaaacttgacatttttccgccagggtttttgggaaagccaaatggagctcagaaagctgtatggacctctgtgtgggtactatcttggtcgtcggatgtttattgttatttctgagccagacatgatcaagcaggtgttggttgagaacttcagtaactttaccaacagaatggcgtcgggtttggagttcaagtcggtagccgacagcgttctgtttttacgtgacaaaagatgggaagaggtcagaggtgccctgatgtctgctttcagtcctgaaaagctgaacgagatggttcccctcatcagccaagcctgcgaccttctcctggctcatttaaaacgctatgcggaatctggggacgcatttgacatccagaggtgctactgcaattacaccacagatgtggttgccagcgtcgcctttggcaccccggtggactcctggcaggcccctgaggatccctttgtgaaacactgcaagcgtttcttcgaattctgcatccccagacctatcctggttttactcttatcatttccatccataatggtcccactggcccggattttgcccaataagaaccgagacgaactgaatggcttttttaacaaactcattaggaatgtgattgccttgcgggaccagcaagctgccgaagagaggcggagagacttcctccaaatggtcctggatgcccgacattctgcaagtcccatgggcgtgcaagactttgacatcgtcagagacgttttctcctctactgggtgcaagccgaacccttcccggcaacaccagcccagccctatggccaggcctttgactgtggatgagattgtgggccaggccttcatcttcctcatcgctggctatgaaatcatcaccaacacactttcttttgccacctacctactggccaccaaccctgactgccaagagaagcttctgagagaggtagacgtttttaaggagaaacacatggcccctgagttctgcagcctcgaggaaggcctgccctatctggacatggtgattgcagagacgctgaggatgtacccgccagctttcagattcacacgggaggcagctcaggactgcgaggtgctggggcagcgcatccccgcaggcgctgtgctagagatggccgtgggtgccctgcaccatgaccctgagcactggccaagcccggagaccttcaaccctgaaaggttcacggctgaggcccggcagcagcaccggcccttcacgtacctgcccttcggggccggcccacggagctgcctcggggtgcgtctagggctgcttgaggtcaagttgacactgctccacgtgctgcacaagttccggttccaagcctgccctgagacccaggtaccgctgcagctagaatccaaatctgccctaggtccaaaaaatggtgtctatatcaagatcgtatcccgctgacacagaaggctgccgggtggggggagggcacccccaaattcaaagaaaaccctaagtgtggatgttcagaattttggaaaaatgtcactgaagtgattgaaagagtgcctggcatgcaaggataagaggttctttacataacatttcctaaatgcttaataaacgtttgttgcacttggttttgacattg

SEQ ID NO: 191070 - DNA, 2505 bp, Homo sapiens
  Payload ID: 17745
  Gene Name: thromboxane A synthase 1 (platelet)
  ENST ID: ENST00000416849
  CDS Start-End: 539-2281
gagggccggcctggacccggcgggcgcacggctccgagcccagcgcagccgagccggtctgcagaggggcccccagaactttgtgtgtgtgtgtgcacgcgcgcgcgtgtgtgcccaggtgcgagggttcgcgcgtgtgctggcggggagggaaccgacccgaaagagagccccacgctggcaaagtggctcgcccatctcacagccggttggcgctcgcggaggctcacagaacatttcctgcctgttgctcacactctgttgtccacagcatacccgcaccctagatggctgactcttgtcttctgtctctttattttccatgtgtgagcctgtgcctgtggtttatctctggaggatgtgcctgagggaggagacatatactgcctggactgcctggctgatgtgagctagtttgtctggttgagttggatgtttaaatagaaggcagaacaacaacagagcacggttcccataagggcggcgagatcagcctcctgtctcatctggaagaccaccactctggggtctcagaggaatgatggaagccttggggtttctaaaattggaagtgaatggccccatggtgacggtggccctgtcagtggctctcttggccctcctgaaatggtactccacatcagcattctcaagactggagaagttaggcctcagacatcccaagccttctcctttcattggaaacttgacatttttccgccagggtttttgggaaagccaaatggagctcagaaagctgtatggacctctgtgtgggtactatcttggtcgtcggatgtttattgttatttctgagccagacatgatcaagcaggtgttggttgagaacttcagtaactttaccaacagaatggcgtcgggtttggagttcaagtcggtagccgacagcgttctgtttttacgtgacaaaagatgggaagaggtcagaggtgccctgatgtctgctttcagtcctgaaaagctgaacgagcttggccttttaatcatgcaagagagaataaaaggtcacatgggtggccagcaggctccacaaagaattccacccacccgtttgtcgaagccgagtggtatctatgtgaatctccattatgccactctacctttctgtatggttcccctcatcagccaagcctgcgaccttctcctggctcatttaaaacgctatgcggaatctggggacgcatttgacatccagaggtgctactgcaattacaccacagatgtggttgccagcgtcgcctttggcaccccggtggactcctggcaggcccctgaggatccctttgtgaaacactgcaagcgtttcttcgaattctgcatccccagacctatcctggttttactcttatcatttccatccataatggtcccactggcccggattttgcccaataagaaccgagacgaactgaatggcttttttaacaaactcattaggaatgtgattgccttgcgggaccagcaagctgccgaagagaggcggagagacttcctccaaatggtcctggatgcccgacattctgcaagtcccatgggcgtgcaagactttgacatcgtcagagacgttttctcctctactgggtgcaagccgaacccttcccggcaacaccagcccagccctatggccaggcctttgactgtggatgagattgtgggccaggccttcatcttcctcatcgctggctatgaaatcatcaccaacacactttcttttgccacctacctactggccaccaaccctgactgccaagagaagcttctgagagaggtagacgtttttaaggagaaacacatggcccctgagttctgcagcctcgaggaaggcctgccctatctggacatggtgattgcagagacgctgaggatgtacccgccagctttcagattcacacgggaggcagctcaggactgcgaggtgctggggcagcgcatccccgcaggcgctgtgctagagatggccgtgggtgccctgcaccatgaccctgagcactggccaagcccggagaccttcaaccctgaaaggttcacggctgaggcccggcagcagcaccggcccttcacgtacctgcccttcggggccggcccacggagctgcctcggggtgcgtctagggctgcttgaggtcaagttgacactgctccacgtgctgcacaagttccggttccaagcctgccctgagacccaggtaccgctgcagctagaatccaaatctgccctaggtccaaaaaatggtgtctatatcaagatcgtatcccgctgacacagaaggctgccgggtggggggagggcacccccaaattcaaagaaaaccctaagtgtggatgttcagaattttggaaaaatgtcactgaagtgattgaaagagtgcctggcatgcaaggataagaggttctttacataacatttcctaaatgcttaataaacgtttgttgcacttggttttgacattgccaatggggtttgaaccagtgctctctctaaatg

SEQ ID NO: 191071 - DNA, 1435 bp, Homo sapiens
  Payload ID: 17745
  Gene Name: thromboxane A synthase 1 (platelet)
  ENST ID: ENST00000455353
  CDS Start-End: 138-593
gtgggggcccactccatgtgatgtttgcttggttgcctgttcccttttctacctgcagagcacggttcccataagggcggcgagatcagcctcctgtctcatctggaagaccaccactctggggtctcagaggaatgatggaagccttggggtttctaaaattggaagtgaatggccccatggtgacggtggccctgtcagtggctctcttggccctcctgaaatggtactccacatcagcattctcaagactggagaagttaggcctcagacatcccaagccttctcctttcattggaaacttgacatttttccgccagggtttttgggaaagccaaatggagctcagaaagctgtatggacctctgtgtgggtactatcttggtcgtcggatgtttattgttatttctgagccagacatgatcaagcaggtgttggttgagaacttcagtaactttaccaacagaatgccccagagcatcatgcccaactccagacatcacgtggcctctagagggatgtggcctggagggaggcggctggcctgctacctccatcccttcaggatggccgaaggaattgcagaagtttaactgcttctctgctgcctctagattctctttcccaaacactgcattgctatctcctcgctcaaagtcccctggaagccgtctgtcaagaaactgattctgattattaaatgcagctgtagcttgttgctccatcagcctcagcaaggagtgctgattaaagaagttggagaagccaataagtcaaagtgcacggaccaccaagccacatcctggcaagcagtaaaggtactcccaggagcctgtcatagcacttgagactgtctgagcccctaagccatgagacggcacttgccaactggtgtctccatatttcctcccatgataccaggacatgtgaccctgagagctgacctagaagaggtcaatgatttggcctgctaggggcagacatactcaatgcacatgtccaagcaaggaggacacaataatattgccctcagctttgatcaatttatcctccaagccatttgtctgccgtttctaatttctttcaccatcccctcacccacccctccacgcagactaggtccagtgccccaaactccagagtagagttccaattttcgtcctcttccactcagcacaggattaagccttcaggactaagttcaagttccctagacgatatttaagggcccttgtgtcttagatccattgtgtgtgctccaccctgtctctcactgctccccaatacaaatcgtcactccagcctctccctgctcaccctcacctgctctggagagacctgacctctgccttgctcacgctgacactgcctcagaattgaaggcagtgtaacagtggggctcatattgattatgacgtgagcttgagcacatatc

SEQ ID NO: 191072 - DNA, 1901 bp, Homo sapiens
  Payload ID: 17745
  Gene Name: thromboxane A synthase 1 (platelet)
  ENST ID: ENST00000414508
  CDS Start-End: 236-1618
aaggaataaagttgctgattcattcctttacactgaaaccctttgttgtgccctcctcttccttcctctttatagggagacactctgagaaagagcacattgtgggggcccactccatgtgatgtttgcttggttgcctgttcccttttctacctgcagagcacggttcccataagggcggcgagatcagcctcctgtctcatctggaagaccaccactctggggtctcagaggaatgatggaagccttggggtttctaaaattggaagtgaatggccccatggtgacggtggccctgtcagtggctctcttggccctcctgaaatggtactccacatcagcattctcaagactggagaagttaggcctcagacatcccaagccttctcctttcattggaaacttgacatttttccgccagggtttttgggaaagccaaatggagctcagaaagctgtatggacctctgtgtgggtactatcttggtcgtcggatgtttattgttatttctgagccagacatgatcaagcaggtgttggttgagaacttcagtaactttaccaacagaatggcgtcgggtttggagttcaagtcggtagccgacagcgttctgtttttacgtgacaaaagatgggaagaggtcagaggtgccctgatgtctgctttcagtcctgaaaagctgaacgagatggttcccctcatcagccaagcctgcgaccttctcctggctcatttaaaacgctatgcggaatctggggacgcatttgacatccagaggtgctactgcaattacaccacagatgtggttgccagcgtcgcctttggcaccccggtggactcctggcaggcccctgaggatccctttgtgaaacactgcaagcgtttcttcgaattctgcatccccagacctatcctggttttactcttatcatttccatccataatggtcccactggcccggattttgcccaataagaaccgagacgaactgaatggcttttttaacaaactcattaggaatgtgattgccttgcgggaccagcaagctgccgaagagaggcggagagacttcctccaaatggtcctggatgcccgacattctgcaagtcccatgggcgtgcaagactttgacatcgtcagagacgttttctcctctactgggtgcaagccgaacccttcccggcaacaccagcccagccctatggccaggcctttgactgtggatgagattgtgggccaggccttcatcttcctcatcgctggctatgaaatcatcaccaacacactttcttttgccacctacctactggccaccaaccctgactgccaagagaagcttctgagagaggtagacgtttttaaggagaaacacatggcccctgagttctgcagcctcgaggaaggcctgccctatctggacatggtgattgcagagacgctgaggatgtacccgccagctttcagattcacacgggaggcagctcaggactgcgaggtgctggggcagcgcatccccgcaggcgctgtgctagagatggccgtgggtgccctgcaccatgaccctgagcactggccaagcccggagaccttcaaccctgaaaggtaccgctgcagctagaatccaaatctgccctaggtccaaaaaatggtgtctatatcaagatcgtatcccgctgacacagaaggctgccgggtggggggagggcacccccaaattcaaagaaaaccctaagtgtggatgttcagaattttggaaaaatgtcactgaagtgattgaaagagtgcctggcatgcaaggataagaggttctttacataacatttcctaaatgcttaataaacgtttgttgcacttggttttgacattgccaatggggtttgaaccagtgctctctctaaatg

SEQ ID NO: 191073 - DNA, 1963 bp, Homo sapiens
  Payload ID: 17745
  Gene Name: thromboxane A synthase 1 (platelet)
  Uniprot ID: P24557
  ENST ID: ENST00000448866
  CDS Start-End: 168-1769
atagggagacactctgagaaagagcacattgtgggggcccactccatgtgatgtttgcttggttgcctgttcccttttctacctgcagagcacggttcccataagggcggcgagatcagcctcctgtctcatctggaagaccaccactctggggtctcagaggaatgatggaagccttggggtttctaaaattggaagtgaatggccccatggtgacggtggccctgtcagtggctctcttggccctcctgaaatggtactccacatcagcattctcaagactggagaagttaggcctcagacatcccaagccttctcctttcattggaaacttgacatttttccgccagggtttttgggaaagccaaatggagctcagaaagctgtatggacctctgtgtgggtactatcttggtcgtcggatgtttattgttatttctgagccagacatgatcaagcaggtgttggttgagaacttcagtaactttaccaacagaatggcgtcgggtttggagttcaagtcggtagccgacagcgttctgtttttacgtgacaaaagatgggaagaggtcagaggtgccctgatgtctgctttcagtcctgaaaagctgaacgagatggttcccctcatcagccaagcctgcgaccttctcctggctcatttaaaacgctatgcggaatctggggacgcatttgacatccagaggtgctactgcaattacaccacagatgtggttgccagcgtcgcctttggcaccccggtggactcctggcaggcccctgaggatccctttgtgaaacactgcaagcgtttcttcgaattctgcatccccagacctatcctggttttactcttatcatttccatccataatggtcccactggcccggattttgcccaataagaaccgagacgaactgaatggcttttttaacaaactcattaggaatgtgattgccttgcgggaccagcaagctgccgaagagaggcggagagacttcctccaaatggtcctggatgcccgacattctgcaagtcccatgggcgtgcaagactttgacatcgtcagagacgttttctcctctactgggtgcaagccgaacccttcccggcaacaccagcccagccctatggccaggcctttgactgtggatgagattgtgggccaggccttcatcttcctcatcgctggctatgaaatcatcaccaacacactttcttttgccacctacctactggccaccaaccctgactgccaagagaagcttctgagagaggtagacgtttttaaggagaaacacatggcccctgagttctgcagcctcgaggaaggcctgccctatctggacatggtgattgcagagacgctgaggatgtacccgccagctttcagattcacacgggaggcagctcaggactgcgaggtgctggggcagcgcatccccgcaggcgctgtgctagagatggccgtgggtgccctgcaccatgaccctgagcactggccaagcccggagaccttcaaccctgaaaggttcacggctgaggcccggcagcagcaccggcccttcacgtacctgcccttcggggccggcccacggagctgcctcggggtgcgtctagggctgcttgaggtcaagttgacactgctccacgtgctgcacaagttccggttccaagcctgccctgagacccaggtaccgctgcagctagaatccaaatctgccctaggtccaaaaaatggtgtctatatcaagatcgtatcccgctgacacagaaggctgccgggtggggggagggcacccccaaattcaaagaaaaccctaagtgtggatgttcagaattttggaaaaatgtcactgaagtgattgaaagagtgcctggcatgcaaggataagaggttctttacataacatttcctaaatgcttaataaacgtttgttgcacttggttttgacattgccaa

SEQ ID NO: 191074 - DNA, 2057 bp, Homo sapiens
  Payload ID: 17745
  Gene Name: thromboxane A synthase 1 (platelet)
  Uniprot ID: P24557
  ENST ID: ENST00000458722
  CDS Start-End: 138-1877
gtgggggcccactccatgtgatgtttgcttggttgcctgttcccttttctacctgcagagcacggttcccataagggcggcgagatcagcctcctgtctcatctggaagaccaccactctggggtctcagaggaatgatggaagccttggggtttctaaaattggaagtgaatggccccatggtgacggtggccctgtcagtggctctcttggccctcctgaaatggtactccacatcagcattctcaagactggagaagttaggcctcagacatcccaagccttctcctttcattggaaacttgacatttttccgccagggtttttgggaaagccaaatggagctcagaaagctgtatggacctctgtgtgggtactatcttggtcgtcggatgtttattgttatttctgagccagacatgatcaagcaggtgttggttgagaacttcagtaactttaccaacagaatggcgtcgggtttggagttcaagtcggtagccgacagcgttctgtttttacgtgacaaaagatgggaagaggtcagaggtgccctgatgtctgctttcagtcctgaaaagctgaacgagcttggccttttaatcatgcaagagagaataaaaggtcacatgggtggccagcaggctccacaaagaattccacccacccgtttgtcgaagccgagtggtatctatgtgaatctccattatgccactctacctttctgtatggttcccctcatcagccaagcctgcgaccttctcctggctcatttaaaacgctatgcggaatctggggacgcatttgacatccagaggtgctactgcaattacaccacagatgtggttgccagcgtcgcctttggcaccccggtggactcctggcaggcccctgaggatccctttgtgaaacactgcaagcgtttcttcgaattctgcatccccagacctatcctggttttactcttatcatttccatccataatggtcccactggcccggattttgcccaataagaaccgagacgaactgaatggcttttttaacaaactcattaggaatgtgattgccttgcgggaccagcaagctgccgaagagaggcggagagacttcctccaaatggtcctggatgcccgacattctgcaagtcccatgggcgtgcaagactttgacatcgtcagagacgttttctcctctactgggtgcaagccgaacccttcccggcaacaccagcccagccctatggccaggcctttgactgtggatgagattgtgggccaggccttcatcttcctcatcgctggctatgaaatcatcaccaacacactttcttttgccacctacctactggccaccaaccctgactgccaagagaagcttctgagagaggtagacgtttttaaggagaaacacatggcccctgagttctgcagcctcgaggaaggcctgccctatctggacatggtgattgcagagacgctgaggatgtacccgccagctttcagattcacacgggaggcagctcaggactgcgaggtgctggggcagcgcatccccgcaggcgctgtgctagagatggccgtgggtgccctgcaccatgaccctgagcactggccaagcccggagaccttcaaccctgaaaggttcacggctgaggcccggcagcagcaccggcccttcacgtacctgcccttcggggccggcccacggagctgcctcggggtgcgtctagggctgcttgaggtcaagttgacactgctccacgtgctgcacaagttccggttccaagcctgccctgagacccaggtaccgctgcagctagaatccaaatctgccctaggtccaaaaaatggtgtctatatcaagatcgtatcccgctgacacagaaggctgccgggtggggggagggcacccccaaattcaaagaaaaccctaagtgtggatgttcagaattttggaaaaatgtcactgaagtgattgaaagagtgcctggcatgcaaggataagaggttctttacataacatttcctaaatgcttaataaacgtttgttgcacttggt

SEQ ID NO: 191075 - DNA, 1792 bp, Homo sapiens
  Payload ID: 17745
  Gene Name: thromboxane A synthase 1 (platelet)
  Uniprot ID: P24557
  ENST ID: ENST00000411653
  CDS Start-End: 128-1507
actccatgtgatgtttgcttggttgcctgttcccttttctacctgcagagcacggttcccataagggcggcgagatcagcctcctgtctcatctggaagaccaccactctggggtctcagaggaatgatggaagccttggggtttctaaaattggaagtgaatggccccatggtgacggtggccctgtcagtggctctcttggccctcctgaaatggtactccacatcagcattctcaagactggagaagttaggcctcagacatcccaagccttctcctttcattggaaacttgacatttttccgccagggtttttgggaaagccaaatggagctcagaaagctgtatggacctctgtgtgggtactatcttggtcgtcggatgtttattgttatttctgagccagacatgatcaagcaggtgttggttgagaacttcagtaactttaccaacagaatggcgtcgggtttggagttcaagtcggtagccgacagcgttctgtttttacgtgacaaaagatgggaagaggtcagaggtgccctgatgtctgctttcagtcctgaaaagctgaacgagatggttcccctcatcagccaagcctgcgaccttctcctggctcatttaaaacgctatgcggaatctggggacgcatttgacatccagaggtgctactgcaattacaccacagatgtggttgccagcgtcgcctttggcaccccggtggactcctggcaggcccctgaggatccctttgtgaaacactgcaagcgtttcttcgaattctgcatccccagacctatcctggttttactcttatcatttccatccataatggtcccactggcccggattttgcccaataagaaccgagacgaactgaatggcttttttaacaaactcattaggaatgtgattgccttgcgggaccagcaagctgccgaagagaggcggagagacttcctccaaatggtcctggatgcccgacattctgcaagtcccatgggcgtgcaagactttgacatcgtcagagacgttttctcctctactgggtgcaagccgaacccttcccggcaacaccagcccagccctatggccaggcctttgactgtggatgagattgtgggccaggccttcatcttcctcatcgctggctatgaaatcatcaccaacacactttcttttgccacctacctactggccaccaaccctgactgccaagagaagcttctgagagaggtagacgtttttaaggagaaacacatggcccctgagttctgcagcctcgaggaaggcctgccctatctggacatggtgattgcagagacgctgaggatgtacccgccagctttcagattcacacgggaggcagctcaggactgcgaggtgctggggcagcgcatccccgcaggcgctgtgctagagatggccgtgggtgccctgcaccatgaccctgagcactggccaagcccggagaccttcaaccctgaaaggtaccgctgcagctagaatccaaatctgccctaggtccaaaaaatggtgtctatatcaagatcgtatcccgctgacacagaaggctgccgggtggggggagggcacccccaaattcaaagaaaaccctaagtgtggatgttcagaattttggaaaaatgtcactgaagtgattgaaagagtgcctggcatgcaaggataagaggttctttacataacatttcctaaatgcttaataaacgtttgttgcacttggttttgacattgccaatggggtttgaaccagtgctctctctaaatgaa

SEQ ID NO: 191076 - DNA, 565 bp, Homo sapiens
  Payload ID: 17745
  Gene Name: thromboxane A synthase 1 (platelet)
  ENST ID: ENST00000414041
  CDS Start-End: 90-332
ctacctgcagagcacggttcccataagggcggcgagatcagcctcctgtctcatctggaagaccaccactctggggtctcagaggaatgatggaagccttggggtttctaaaattggaagtgaatggccccatggtgacggtggccctgtcagtggctctcttggccctcctgaaatggtactccacatcagcattctcaagactggagaagttaggcctcagacatcccaagccttctcctttcattggaaacttgacatttttccgccagggtttttgggaaagccaaatggagctcagaaagctgtatggacctctgtgtggtctgtagtgcagtggcttgatcttggatcactgcaacctccaccttccaggttcaagcaattctcctgcctcagcctcctgagtagctggcactacaggtactatcttggtcgtcggatgtttattgttatttctgagccagacatgatcaagcaggtgttggttgagaacttcagtaactttaccaacagaatggcgtcgggtttggagttcaagtcggtagccgacagcgttctgttt

SEQ ID NO: 191077 - DNA, 1967 bp, Homo sapiens
  Payload ID: 17745
  Gene Name: thromboxane A synthase 1 (platelet)
  ENST ID: ENST00000422328
  CDS Start-End: 145-384
gcacattgtgggggcccactccatgtgatgtttgcttggttgcctgttcccttttctacctgcagagcacggttcccataagggcggcgagatcagcctcctgtctcatctggaagaccaccactctggggtctcagaggaatgatggaagccttggggtttctaaaattggaagtgaatggccccatggtgacggtggccctgtcagtggctctcttggccctcctgaaatggtactccacatcagcattctcaagactggagaagttaggcctcagacatcccaagccttctcctttcattggaaacttgacatttttccgccagggtttttgggaaagccaaatggagctcagaaagctgtatggacctctgtgtgggtaagaaggaaactcaacgtttctattatgtactatcttggtcgtcggatgtttattgttatttctgagccagacatgatcaagcaggtgttggttgagaacttcagtaactttaccaacagaatggcgtcgggtttggagttcaagtcggtagccgacagcgttctgtttttacgtgacaaaagatgggaagaggtcagaggtgccctgatgtctgctttcagtcctgaaaagctgaacgagatggttcccctcatcagccaagcctgcgaccttctcctggctcatttaaaacgctatgcggaatctggggacgcatttgacatccagaggtgctactgcaattacaccacagatgtggttgccagcgtcgcctttggcaccccggtggactcctggcaggcccctgaggatccctttgtgaaacactgcaagcgtttcttcgaattctgcatccccagacctatcctggttttactcttatcatttccatccataatggtcccactggcccggattttgcccaataagaaccgagacgaactgaatggcttttttaacaaactcattaggaatgtgattgccttgcgggaccagcaagctgccgaagagaggcggagagacttcctccaaatggtcctggatgcccgacattctgcaagtcccatgggcgtgcaagactttgacatcgtcagagacgttttctcctctactgggtgcaagccgaacccttcccggcaacaccagcccagccctatggccaggcctttgactgtggatgagattgtgggccaggccttcatcttcctcatcgctggctatgaaatcatcaccaacacactttcttttgccacctacctactggccaccaaccctgactgccaagagaagcttctgagagaggtagacgtttttaaggagaaacacatggcccctgagttctgcagcctcgaggaaggcctgccctatctggacatggtgattgcagagacgctgaggatgtacccgccagctttcagattcacacgggaggcagctcaggactgcgaggtgctggggcagcgcatccccgcaggcgctgtgctagagatggccgtgggtgccctgcaccatgaccctgagcactggccaagcccggagaccttcaaccctgaaaggttcacggctgaggcccggcagcagcaccggcccttcacgtacctgcccttcggggccggcccacggagctgcctcggggtgcgtctagggctgcttgaggtcaagttgacactgctccacgtgctgcacaagttccggttccaagcctgccctgagacccaggtaccgctgcagctagaatccaaatctgccctaggtccaaaaaatggtgtctatatcaagatcgtatcccgctgacacagaaggctgccgggtggggggagggcacccccaaattcaaagaaaaccctaagtgtggatgttcagaattttggaaaaatgtcactgaagtgattgaaagagtgcctggcatgcaaggataagaggttctttacataacatttcctaaatgcttaataaacgtttgttgcacttggttttgacattgcc

SEQ ID NO: 191078 - DNA, 2608 bp, Homo sapiens
  Payload ID: 17746
  Gene Name: thromboxane A2 receptor
  Uniprot ID: P21731
  ENST ID: ENST00000375190
  CDS Start-End: 395-1426
agcggcccccacccgtcccagctcggcttagcccccgcggacccctccaggccgcgaccccagggcgtcctgtgccgccacgccctccatctgtgtgggtcctctgctgggcccgcccctggtcacagccagactgactcagtttccctgggaggtcccgctcgagcccgtccttcccctccctctgcccgcccccagccctcgccccaccctcggcgcccgcacatctgcctgctcagctccagacggcgcccggacccccgggcgcgggatccagccaggtgggagccccgcagatgaggtctctgaaggtgtgcctgaaccagtgccagcctgccctgtctgcagcatcggcctgatggggtggtgactgatccctcagggctccggagccatgtggcccaacggcagttccctggggccctgtttccggcccacaaacattaccctggaggagagacggctgatcgcctcgccctggttcgccgcctccttctgcgtggtgggcctggcctccaacctgctggccctgagcgtgctggcgggcgcgcggcaggggggttcgcacacgcgctcctccttcctcaccttcctctgcggcctcgtcctcaccgacttcctggggctgctggtgaccggtaccatcgtggtgtcccagcacgccgcgctcttcgagtggcacgccgtggaccctggctgccgtctctgtcgcttcatgggcgtcgtcatgatcttcttcggcctgtccccgctgctgctgggggccgccatggcctcagagcgctacctgggtatcacccggcccttctcgcgcccggcggtcgcctcgcagcgccgcgcctgggccaccgtggggctggtgtgggcggccgcgctggcgctgggcctgctgcccctgctgggcgtgggtcgctacaccgtgcaatacccggggtcctggtgcttcctgacgctgggcgccgagtccggggacgtggccttcgggctgctcttctccatgctgggcggcctctcggtcgggctgtccttcctgctgaacacggtcagcgtggccaccctgtgccacgtctaccacgggcaggaggcggcccagcagcgtccccgggactccgaggtggagatgatggctcagctcctggggatcatggtggtggccagcgtgtgttggctgccccttctggtcttcatcgcccagacagtgctgcgaaacccgcctgccatgagccccgccgggcagctgtcccgcaccacggagaaggagctgctcatctacttgcgcgtggccacctggaaccagatcctggacccctgggtgtatatcctgttccgccgcgccgtgctccggcgtctccagcctcgcctcagcacccggcccaggtcgctgtccctccagccccagctcacgcagcgctccgggctgcagtaggaagtggacagagcgcccctcccgcgcctttccgcggagcccttggcccctcggacagcccatctgcctgttctgaggattcaggggctgggggtgctggatggacagtgggcatcagcagcagggttttgggttgaccccaatccaacccggggacccccaactcctccctgatccttttaccaagcactctcccttcctcggcccctttttcccatccagagctcccaccccttctctgcgtccctcccaaccccaggaagggcatgcagacattggaagagggtcttgcattgctatttttttttttagacggagtcttgctctgtcccccaggctggagtgcagtggcgcaatctcagctcactgcaacctccacctcccgggttcaagcgattctcctgcctcagcctcctgagtagctgggactataggcgcgcgccaccacgcccggctaatttttgtatttttagtagagacggggtttcaccgtgttggccaggctggtcttgaactcctgacctcaggtgattcaccagcctcagcctcccaaagtgctgggatcacaggcatgaaccaccacacctggccatttttttttttttttttagacggagtctcactctgtggcccagcctggagtacagtggcacgatctcggctcactgcaacctccgcctcccgggttcaagcgattctcgtgcctcagcctcccgagcagctgggattacaggcgtaagccactgcgcccggccttgcatgctctttgaccctgaatttgacctacttgctggggtacagttgcttccttttgaacctccaacagggaaggctctgtccagaaaggattgaatgtgaacgggggcacccccttttcttgccaaaatatatctctgcctttggttttattttcctttgggtccagaagttttcaatctctggagtttgtgcattgggcctcacccggagcagacgagggcagggctgggaaggatggggagggacatagaggattcggttcctcccccaccttgtttcttgagtgtttcctaatcacttgatgggtggtaccacctagaattcttccagcagcctgtaatgggagggctacaggttagccctggaacctgcaatcaaaccacctttgaatctgtgtgtcattaaaagtagatataaatgggc

SEQ ID NO: 191079 - DNA, 1494 bp, Homo sapiens
  Payload ID: 17746
  Gene Name: thromboxane A2 receptor
  Uniprot ID: P21731
  ENST ID: ENST00000411851
  CDS Start-End: 215-1438
ccctctgcccgcccccagccctcgccccaccctcggcgcccgcacatctgcctgctcagctccagacggcgcccggacccccgggcgcgggatccagccaggtgggagccccgcagatgaggtctctgaaggtgtgcctgaaccagtgccagcctgccctgtctgcagcatcggcctgatggggtggtgactgatccctcagggctccggagccatgtggcccaacggcagttccctggggccctgtttccggcccacaaacattaccctggaggagagacggctgatcgcctcgccctggttcgccgcctccttctgcgtggtgggcctggcctccaacctgctggccctgagcgtgctggcgggcgcgcggcaggggggttcgcacacgcgctcctccttcctcaccttcctctgcggcctcgtcctcaccgacttcctggggctgctggtgaccggtaccatcgtggtgtcccagcacgccgcgctcttcgagtggcacgccgtggaccctggctgccgtctctgtcgcttcatgggcgtcgtcatgatcttcttcggcctgtccccgctgctgctgggggccgccatggcctcagagcgctacctgggtatcacccggcccttctcgcgcccggcggtcgcctcgcagcgccgcgcctgggccaccgtggggctggtgtgggcggccgcgctggcgctgggcctgctgcccctgctgggcgtgggtcgctacaccgtgcaatacccggggtcctggtgcttcctgacgctgggcgccgagtccggggacgtggccttcgggctgctcttctccatgctgggcggcctctcggtcgggctgtccttcctgctgaacacggtcagcgtggccaccctgtgccacgtctaccacgggcaggaggcggcccagcagcgtccccgggactccgaggtggagatgatggctcagctcctggggatcatggtggtggccagcgtgtgttggctgccccttctggtcttcatcgcccagacagtgctgcgaaacccgcctgccatgagccccgccgggcagctgtcccgcaccacggagaaggagctgctcatctacttgcgcgtggccacctggaaccagatcctggacccctgggtgtatatcctgttccgccgcgccgtgctccggcgtctccagcctcgcctcagcacccggcccagacggagtctcactctgtggcccagcctggagtacagtggcacgatctcggctcactgcaacctccgcctcccgggttcaagcgattctcgtgcctcagcctcccgagcagctgggattacaggcgtaagccactgcgcccggccttgcatgctctttgaccctgaatttgacctacttgctggggtacagttgcttccttttgaacctccaacagggaaggctctgtccagaaaggattgaatgtgaacgggggcacccccttttcttgccaaaatatatctctgcctttggtttta

SEQ ID NO: 191080 - DNA, 1814 bp, Homo sapiens
  Payload ID: 17746
  Gene Name: thromboxane A2 receptor
  ENST ID: ENST00000589966
  CDS Start-End: 36-815
tggggtggtgactgatccctcagggctccggagccatgtggcccaacggcagttccctggggccctgtttccggcccacaaacattaccctggaggagagacggctgatcgcctcgccctggttcgccgcctccttctgcgtggtgggcctggcctccaacctgctggccctgagcgtgctggcgggcgcgcggcaggggggttcgcacacgcgctcctccttcctcaccttcctctgcggcctcgtcctcaccgacttcctggggctgctggtgaccggtaccatcgtggtgtcccagcacgccgcgctcttcgagtggcacgccgtggaccctggctgccgtctctgtcgcttcatgggcgtcgtcatgatcttcttcggcctgtccccgctgctgctgggggccgccatggcctcagagcgctacctgggtcttcatcgcccagacagtgctgcgaaacccgcctgccatgagccccgccgggcagctgtcccgcaccacggagaaggagctgctcatctacttgcgcgtggccacctggaaccagatcctggacccctgggtgtatatcctgttccgccgcgccgtgctccggcgtctccagcctcgcctcagcacccggcccaggtcgctgtccctccagccccagctcacgcagcgctccgggctgcagtaggaagtggacagagcgcccctcccgcgcctttccgcggagcccttggcccctcggacagcccatctgcctgttctgaggattcaggggctgggggtgctggatggacagtgggcatcagcagcagggttttgggttgaccccaatccaacccggggacccccaactcctccctgatccttttaccaagcactctcccttcctcggcccctttttcccatccagagctcccaccccttctctgcgtccctcccaaccccaggaagggcatgcagacattggaagagggtcttgcattgctatttttttttttagacggagtcttgctctgtcccccaggctggagtgcagtggcgcaatctcagctcactgcaacctccacctcccgggttcaagcgattctcctgcctcagcctcctgagtagctgggactataggcgcgcgccaccacgcccggctaatttttgtatttttagtagagacggggtttcaccgtgttggccaggctggtcttgaactcctgacctcaggtgattcaccagcctcagcctcccaaagtgctgggatcacaggcatgaaccaccacacctggccatttttttttttttttttagacggagtctcactctgtggcccagcctggagtacagtggcacgatctcggctcactgcaacctccgcctcccgggttcaagcgattctcgtgcctcagcctcccgagcagctgggattacaggcgtaagccactgcgcccggccttgcatgctctttgaccctgaatttgacctacttgctggggtacagttgcttccttttgaacctccaacagggaaggctctgtccagaaaggattgaatgtgaacgggggcacccccttttcttgccaaaatatatctctgcctttggttttattttcctttgggtccagaagttttcaatctctggagtttgtgcattgggcctcacccggagcagacgagggcagggctgggaaggatggggagggacatagaggattcggttcctcccccaccttgtttcttgagtgtttcctaatcacttgatgggtggtaccacctagaattcttccagcagcctgtaatgggagggctacaggttagccctggaacctgcaatca

SEQ ID NO: 191081 - DNA, 4122 bp, Homo sapiens
  Payload ID: 17747
  Gene Name: THUMP domain containing 1
  Uniprot ID: Q9NXG2
  ENST ID: ENST00000381337
  CDS Start-End: 346-1407
aggaacaggtaccaaggttgggtggaagaagctatatggctggagccagcttcaagggcttgaggagccaccgacaccacttccagaatggctgctatgctgcctctactggattcaggttgcagtcgggaggcggggcaggaggcggggcttgggcgggtatcactccacccctttcacgattgcagaccggccttaggacctggcgcagcacggaatgaggcttcgaggccggctaggggaggccgtcgctcatatccgacgtcaccagttcgcgccggcgatagacgaggacgccaacagcagcggagaaacgtttctctttcctctcagtttgcgcacaccatggcggcccctgcccagcagactactcagcctggcggcgggaagcgcaaaggcaaggctcagtatgtgctggccaagcgcgctcggcgctgcgacgctggcgggccccgtcagctagagcccgggctacagggcatcctcatcacctgcaatatgaacgagcgcaagtgcgtggaggaggcctacagcctcctcaacgaatacggcgacgacatgtatgggccagaaaagtttacagacaaggatcagcagccctctggaagtgagggagaggatgatgatgcggaggctgccttgaagaaagaagttggtgacattaaggcatctacagagatgaggttaagaagattccagtcagtggaaagtggagcaaataacgttgtcttcatcaggacacttgggatagagcctgagaaattggtgcatcatattctccaggatatgtacaaaaccaagaaaaagaagactcgagttattttgcgaatgttacccatctcaggcacatgcaaggcttttttagaagatatgaaaaaatatgcagaaacatttttggaaccctggtttaaagctccaaacaaagggacatttcagattgtgtacaaatctcgaaataacagtcatgtgaatagagaagaagttatcagagaattggcaggaatagtgtgcaccctcaattcagaaaataaagtggatctcaccaatccacagtacacagtggtagtagaaatcatcaaagctgtctgttgcctgagtgttgtgaaagattacatgttgtttagaaaatacaatctccaggaggtggtgaagagccctaaggatccgtcacagcttaactcaaagcagggaaatgggaaagaagctaaactggaatctgcggacaaatcagaccaaaacaacacagcagaaggaaaaaataaccagcaggtaccagagaatactgaggagctggggcagacaaaaccaacgtctaatccacaggtggtaaatgagggaggagccaaacctgaacttgcaagtcaagccacagaaggatccaagtcaaatgaaaatgacttctcataggaagtcatttggtgttggagctgacagtccagtgtcgcaattttggaaggcaagatgtgagagagacgagaaccattttaggcatagaactacagacatttctgaaaaggttggtgatgaagaacttcagtcttctgagtatacttcagtatactagtgcaacaagggacacaaagaaattctgtcttaataaagaaagctacttctcaagggtattatgtggactcagtccaagctctcctgtcccattgtgcattgtctgtgacatgcaacttacaaaactagcaattgtaacaataaatcacagccacttgacaagaaaggatattcattattttcaaatggcttttggactatcaaaaacagtaaggcttttgttcagaaatcacctttagtcaaaaggtttaagaagcaaattatttagtagcagaacttatctcaggaaaggaaaatatgcatggttggtgagaatctaataacattaaaatgctggggcaagatgcagtacaaagttgaagagactttattctcaataagttgatttactgatgatatgtcatatgatgcaaaaaaggttttgtgtcattaactgaaaagtagcagcttctctatccaggatgatgagtcaacaggtttcactaatatttgtcatgctgtagcatttgtaagatttgtaaatgatgaaattcaaagaaaactttttctattgctaggagcctgccagaacaaaggccaatatataatgttgtgacatcatatctgataaccagaggtctggtatctacactcctggtgccccatcagtggttgtctccataagtcattttgcgttattaaaaaaaaaaaaagaaatcctgatgttgacattatagcacactgctttctccacagagatgctgatatcaaaaacttgaagatacagtgaagttctgaataatgttacaaaactggttacctgtatcaaagacccatttatgcaaaaatgttaaaaaaaaaaaaaaacacccaaaacaaaaacctggacagacagcacataaacctcctgcaccatacagacatccagtggcttctcagaggaagcgttctctacaggatatttgaattgaaaggtgaattgccagagtacttacaataaaacagccagcttttgctgagtgctttggaaatgaaaaatgactacagaaagtagcctattttgcagacgtttttcatcacatgaacaaatggacaagtctctgaaaggttctggggaaaaaaatttttcttaaagcgacaagactcttagatctaaaaggaaactgacttgccaccttgccagaggaattcttgaaatgtttctgcagccacttggccttgaaaataaagggtgcaactctcaaatcttgttctaacccggctggaggaaccacaagacccaatgaaatagcattttctctccttttcccagcactagtatataacctatgaggaacccttgtctctgaatctgctcagcttgaaattttgtctctgaaggaagagaatgaactcagccctagtctgacagtcctagatttctgtgaaataagagtattcttcaacttagtgctcacactcacataccatgagggttctctgcaggggtttaggggtttcctgaatttgaaagttttttcaaggcctctttttgggtaaaacaattgaaaaggcagacaccaacaaagtctgcaaaattaactgtccagattaagaatattaaggagctgtaaaattagcttgtagaaatggacttatccttaagttttaaaaagttaggaaatcctaaaaatgttaggcttcctgcacaagtggctatgttcatttaatggctagtgaacatgggaatgtatttttatcctcctagctggtggttctgtttggtaaaccagactagaatgatttgagaggggcaaagagaataggcaggaccttccttctatagctttacatatttagaatgttaatacttaatgacattgaagttaccttgcaatgattgataagaggattattaatatcagttaggggaatagggaggataggattttggtgccttcttcagcagacttgctccaagacaaagattctattttgatagtgcaagacaaaaggactcggaagaaaattggccatatgcctacagagcatacaactctgtggaactaaattgtttttactttgtgaaagctgctattttacggaaagattttgattatacagtttgtttttaaattgtcttttatatttatttgtatttggtaagaatcggttgttacacaagctgttctttcccagttacaaaatcctgtgttcggttgtaacctgaactcattaaaagacttgttttcaggtttatcaactgtttattttcactgacatttgagcatgttattttataaatgacgggattccagggtaggaagtgctttttattccccttttgttttttcttttaaaaaattacgtcagttaaaaaaataaaaaaactgcagtcttatggtttagaaaacttgtttagctccatagaggaaagaatgttaaactttgtattttaaaacatgattctctgaggttaaacttggttttcaaatgttatttttacttgtattttgcttttggtacggccagaaatcgagcttgttttttcatagttcctgatattttcagaaaaatcaaaataaatttgttccctaaaaa

SEQ ID NO: 191082 - DNA, 2624 bp, Homo sapiens
  Payload ID: 17747
  Gene Name: THUMP domain containing 1
  Uniprot ID: Q9NXG2
  ENST ID: ENST00000396083
  CDS Start-End: 58-1119
cgaggacgccaacagcagcggagaaacgtttctctttcctctcagtttgcgcacaccatggcggcccctgcccagcagactactcagcctggcggcgggaagcgcaaaggcaaggctcagtatgtgctggccaagcgcgctcggcgctgcgacgctggcgggccccgtcagctagagcccgggctacagggcatcctcatcacctgcaatatgaacgagcgcaagtgcgtggaggaggcctacagcctcctcaacgaatacggcgacgacatgtatgggccagaaaagtttacagacaaggatcagcagccctctggaagtgagggagaggatgatgatgcggaggctgccttgaagaaagaagttggtgacattaaggcatctacagagatgaggttaagaagattccagtcagtggaaagtggagcaaataacgttgtcttcatcaggacacttgggatagagcctgagaaattggtgcatcatattctccaggatatgtacaaaaccaagaaaaagaagactcgagttattttgcgaatgttacccatctcaggcacatgcaaggcttttttagaagatatgaaaaaatatgcagaaacatttttggaaccctggtttaaagctccaaacaaagggacatttcagattgtgtacaaatctcgaaataacagtcatgtgaatagagaagaagttatcagagaattggcaggaatagtgtgcaccctcaattcagaaaataaagtggatctcaccaatccacagtacacagtggtagtagaaatcatcaaagctgtctgttgcctgagtgttgtgaaagattacatgttgtttagaaaatacaatctccaggaggtggtgaagagccctaaggatccgtcacagcttaactcaaagcagggaaatgggaaagaagctaaactggaatctgcggacaaatcagaccaaaacaacacagcagaaggaaaaaataaccagcaggtaccagagaatactgaggagctggggcagacaaaaccaacgtctaatccacaggtggtaaatgagggaggagccaaacctgaacttgcaagtcaagccacagaaggatccaagtcaaatgaaaatgacttctcataggaagtcatttggtgttggaggtgggtttctcacctggggctctacgagatgttgctggggctccaccttaaattgtgactaaaaacagttttttatttgtgtgctgcattatgctgttctcacagtagtgagcaatgattgcgcagccctgttaacagtttttttagggatctttcagcctttatggtattacgtagaggcagacccatgtgctgctgttgcaaagaggggaggataggagggggatgttggcctctcccaggctcctcttctgcagtgccagctgacttaagggagtgaactacctgtgaagtagaaaatcagagggaagttttcattctaaggaaggagtttttacatgccacagctcagctgtctgcctgccactttgttgtaaacattgcaaaaatgtggatcatgtaggttagaagtgaattgtttagtgaagtttttgtacttttgtgattttcttgtttatgtctgttttttttttttttttttaacatttgtgtgtaatatagctgacagtccagtgtcgcaattttggaaggcaagatgtgagagagacgagaaccattttaggcatagaactacagacatttctgaaaaggttggtgatgaagaacttcagtcttctgagtatacttcagtatactagtgcaacaagggacacaaagaaattctgtcttaataaagaaagctacttctcaagggtattatgtggactcagtccaagctctcctgtcccattgtgcattgtctgtgacatgcaacttacaaaactagcaattgtaacaataaatcacagccacttgacaagaaaggatattcattattttcaaatggcttttggactatcaaaaacagtaaggcttttgttcagaaatcacctttagtcaaaaggtttaagaagcaaattatttagtagcagaacttatctcaggaaaggaaaatatgcatggttggtgagaatctaataacattaaaatgctggggcaagatgcagtacaaagttgaagagactttattctcaataagttgatttactgatgatatgtcatatgatgcaaaaaaggttttgtgtcattaactgaaaagtagcagcttctctatccaggatgatgagtcaacaggtttcactaatatttgtcatgctgtagcatttgtaagatttgtaaatgatgaaattcaaagaaaactttttctattgctaggagcctgccagaacaaaggccaatatataatgttgtgacatcatatctgataaccagaggtctggtatctacactcctggtgccccatcagtggttgtctccataagtcattttgcgttattaaaaaaaaaaaaagaaatcctgatgttgacattatagcacactgctttctccacagagatgctgatatcaaaaacttgaagatacagtgaagttctgaataatgttacaaaactggttacctgtatcaaagacccatttatgcaaaaatgttaaaaaaaaaaaaaaaca

SEQ ID NO: 191083 - DNA, 1099 bp, Homo sapiens
  Payload ID: 17747
  Gene Name: THUMP domain containing 1
  ENST ID: ENST00000565248
  CDS Start-End: 65-502
cgatagacgaggacgccaacagcagcggagaaacgtttctctttcctctcagtttgcgcacaccatggcggcccctgcccagcagactactcagcctggcggcgggaagcgcaaaggcaaggctcagtatgtgctggccaagcgcgctcggcgctgcgacgctggcgggccccgtcagctagagcccgggctacagggcatcctcatcacctgcaatatgaacgagcgcaagtgcgtggaggaggcctacagcctcctcaacgaatacggcgacgacatgtatgggccagaaaagtttacagacaaggatcagcagccctctggaagtgagggagaggatgatgatgcggaggctgccttgaagaaagaagttggtgacattaaggcatctacagagatgaggttaagaagattccagtcagtggaaagtggagcaaataacgttgtcttcatcaggacacttgggataggaaaacaacagcatggtgttacggttggataactcaggacatcacaaaaatgttaacaacggtgtctacctaaacagtcatttctagtgcaagcagtaataatgatgaaaagttaaaatatattagatacattatagtacgtattaggcactgaagaaatactgtttggaaagaatgactagagcctgagaaattggtgcatcatattctccaggatatgtacaaaaccaagaaaaagaagactcgagttattttgcgaatgttacccatctcaggcacatgcaaggcttttttagaagatatgaaaaaatatgcagaaacatttttggaaccctggtttaaagctccaaacaaagggacatttcagattgtgtacaaatctcgaaataacagtcatgtgaatagagaagaagttatcagagaattggcaggaatagtgtgcaccctcaattcagaaaataaagtggatctcaccaatccacagtacacagtggtagtagaaatcatcaaagctgtctgttgcctgagtgttgtgaaagattacatgttgtttagaaaatacaatctccaggaggtggtgaagagccctaaggatccgtcacagcttaactcaaagcagggaaatggga

SEQ ID NO: 191084 - DNA, 2089 bp, Homo sapiens
  Payload ID: 17748
  Gene Name: THUMP domain containing 2
  Uniprot ID: Q9BTF0
  ENST ID: ENST00000378727
  CDS Start-End: 29-940
gaaggcgcgagggcgcgcctgagccgccatgtcggaggcgcgtggagagccagggtccgggcctgaggctggcgcccgattcttctgcactgcgggtcgcggcctggagccgttcgtaatgcgagaggtgcgggcgcggctggcggccacgcaggttgaatatatttcaggaaaggtttttttcaccacctgttctgatttgaatatgttgaagaaattaaaatctgcagaaagattatttttgctgattaaaaagcagtttccacttattatttcttctgtaagtaaaggaaaaatatttaatgaaatgcaaagacttataaatgaagatccaggaagttggttgaatgccatttcaatttggaaaaatcttcttgaacttgatgcaaaaaaggaaaaactttctcagagagatgataaccaactaaaaagaaaagtgggagaaaatgaaatcattgcaaagaaattaaaaatagaacaaatgcaaaagatagaagagaatagggactgccagctggaaaaacaaataaaagaagaaactctggagcaaagagattttaccactaaaagcgaaaagtttcaagaagaagaatttcagaatgacatagagaaagcaattgatactcataatcagaatgacttgactttcagagtatcttgtcgctgcagtggaactattggaaaggccttcactgcacaggaggtaggaaaagtaattggaattgctattatgaaacactttggatggaaagcagacttgaggaatccacaattagagatctttatacatctaaatgacatttactctgtggtggggattcctgtgttcagggtttccctagccagcagagcttacatcaagacagctggactgcgatctacaatagcgtgggcaatggcatctctggctgacattaaggtaccatatggctctgactgaaacctggctgtgcactgaggactctgcttcctctgtagacatatcaagtggtggatgtcttttctcccctatctcgagcacgactgggcctgacagtggggctggtgcatttgttttagatccaatgtgtggacttggaacaatacttttggaagctgctaaagaatggccagatgtgtattatgtaggtgctgatgtcagcgactcacagttactaggtacttgggacaatctgaaagctgcaggccttgaggataaaattgaattacttaaaatctctgttatagaattgccattgccttcagaaagtgttgatattattatttctgacattccatttgggaaaaagtttaagttaggaaaagacatcaaaagcattctacaagaaatggaaagagtgcttcatgttggcggaaccattgtattgttgcttagtgaagatcaccacaggcgccttacagattgtaaagagagcaacatccctttcaattccaaggacagtcacacagatgaacctggaattaaaaagtgcttgaatcctgaagaaaaaactggtgcattcaagacagcgtcaacttcattcgaagccagtaaccacaaattcttagacagaatgtcaccatttggctccttggtaccagtggaatgctacaaagttagccttggaaagacagatgcgttcatatgtaaatataagaagtcgcactcttctggactgtagcaggcttgctgccatcagccgggttcaggcccttgtaagttagctgtacagcagaagtttgctgtctctaggattcatatagcacccacagagctccaagtaaccaaattcccccaaagacaggaggtgtggctgatgggtacacatgcttggtaagagtttctgctttatattctaaagtacttaatgtttttgagaaaaaagttatcgaatattttttagacttaagttttatcttctgtcagaatgtgaaaagttctgcccagtttctgagcaaaaacttcaatttcaaaataaaggttttcaggggttcacttaagtgtatcacaatcaacaccagacgggatattttaactatcagattttcggaaatgtaaaaacctttatgtgtaacttcttttgatattaaacttgatttttgagcctgt

SEQ ID NO: 191085 - DNA, 1970 bp, Homo sapiens
  Payload ID: 17748
  Gene Name: THUMP domain containing 2
  Uniprot ID: Q9BTF0
  ENST ID: ENST00000505747
  CDS Start-End: 29-1540
gaaggcgcgagggcgcgcctgagccgccatgtcggaggcgcgtggagagccagggtccgggcctgaggctggcgcccgattcttctgcactgcgggtcgcggcctggagccgttcgtaatgcgagaggtgcgggcgcggctggcggccacgcaggttgaatatatttcaggaaaggtttttttcaccacctgttctgatttgaatatgttgaagaaattaaaatctgcagaaagattatttttgctgattaaaaagcagtttccacttattatttcttctgtaagtaaaggaaaaatatttaatgaaatgcaaagacttataaatgaagatccaggaagttggttgaatgccatttcaatttggaaaaatcttcttgaacttgatgcaaaaaaggaaaaactttctcagagagatgataaccaactaaaaagaaaagtgggagaaaatgaaatcattgcaaagaaattaaaaatagaacaaatgcaaaagatagaagagaatagggactgccagctggaaaaacaaataaaagaagaaactctggagcaaagagattttaccactaaaagcgaaaagtttcaagaagaagaatttcagaatgacatagagaaagcaattgatactcataatcagaatgacttgactttcagagtatcttgtcgctgcagtggaactattggaaaggccttcactgcacaggaggtaggaaaagtaattggaattgctattatgaaacactttggatggaaagcagacttgaggaatccacaattagagatctttatacatctaaatgacatttactctgtggtggggattcctgtgttcagggtttccctagccagcagagcttacatcaagacagctggactgcgatctacaatagcgtgggcaatggcatctctggctgacattaaggctggtgcatttgttttagatccaatgtgtggacttggaacaatacttttggaagctgctaaagaatggccagatgtgtattatgtaggtgctgatgtcagcgactcacagttactaggtacttgggacaatctgaaagctgcaggccttgaggataaaattgaattacttaaaatctctgttatagaattgccattgccttcagaaagtgttgatattattatttctgacattccatttgggaaaaagtttaagttaggaaaagacatcaaaagcattctacaagaaatggaaagagtgcttcatgttggcggaaccattgtattgttgcttagtgaagatcaccacaggcgccttacagattgtaaagagagcaacatccctttcaattccaaggacagtcacacagatgaacctggaattaaaaagtgcttgaatcctgaagaaaaaactggtgcattcaagacagcgtcaacttcattcgaagccagtaaccacaaattcttagacagaatgtcaccatttggctccttggtaccagtggaatgctacaaagttagccttggaaagacagatgcgttcatatgtaaatataagaagtcgcactcttctggactgtagcaggcttgctgccatcagccgggttcaggcccttgtaagttagctgtacagcagaagtttgctgtctctaggattcatatagcacccacagagctccaagtaaccaaattcccccaaagacaggaggtgtggctgatgggtacacatgcttggtaagagtttctgctttatattctaaagtacttaatgtttttgagaaaaaagttatcgaatattttttagacttaagttttatcttctgtcagaatgtgaaaagttctgcccagtttctgagcaaaaacttcaatttcaaaataaaggttttcaggggttcacttaagtgtatcacaatcaacaccagacgggatattttaactatcagattttcggaaatgtaaaaacctttatgtgtaacttcttttgatattaaacttgatttttgagcctgtaa

SEQ ID NO: 191086 - DNA, 996 bp, Homo sapiens
  Payload ID: 17748
  Gene Name: THUMP domain containing 2
  ENST ID: ENST00000510781
  CDS Start-End: 1-876
gtaatgcgagaggtgcgggcgcggctggcggccacgcaggttgaatatatttcaggaaaggtttttttcaccacctgttctgatttgaatatgttgaagaaattaaaatctgcagaaagattatttttgctgattaaaaagcagtttccacttattatttcttctgtaagtaaaggaaaaatatttaatgaaatgcaaagacttataaatgaagatccaggaagttggttgaatgccatttcaatttggaaaaatcttcttgaacttgatgcaaaaaaggaaaaactttctcagagagatgataaccaactaaaaagaaaagtgggagaaaatgaaatcattgcaaagaaattaaaaatagaacaaatgcaaaagatagaagagaatagggactgccagctggaaaaacaaataaaagaagaaactctggagcaaagagattttaccactaaaagcgaaaagtttcaagaagaagaatttcagaatgacatagagaaagcaattgatactcataatcagaatgacttgactttcagagtatcttgtcgctgcagtggaactattggaaaggccttcactgcacaggtcctgtacatgggattgtcaccaggacctagactgcaaatgcacatgaggtctcagcaatgtagagaagagcgaacaccacaaactgttgccatcaccagacctcatcagttggcccttacaaagttcagtgatgttaaaggccattggtctgaatactttatcaaccttaaaatcagtcaaaccctaaagggaggtaggaaaagtaattggaattgctattatgaaacactttggatggaaagcagacttgaggaatccacaattagagatctttatacatctaaatgacatttactctgtggtggggattcctgtgttcagggtttccctagccagcagagcttacatcaagacagctggactgcgatctacaatagcgtgggcaatggcatctctggctgacattaa

SEQ ID NO: 191087 - DNA, 1561 bp, Homo sapiens
  Payload ID: 17748
  Gene Name: THUMP domain containing 2
  ENST ID: ENST00000530522
  CDS Start-End: 1-267
gagccagggtccgggcctgaggctggcgcccgattcttctgcactgcgggtcgcggcctggagccgttcgtaatgcgagaggtgcgggcgcggctggcggccacgcaggttgaatatatttcaggaaaggtttttttcaccacctgttctgatttgaatatgttgaagaaattaaaatctgcagaaagattatttttgctgattaaaaagcagtttccacttattatttcttctgaaaaatatttaatgaaatgcaaagacttataaatgaagatccaggaagttggttgaatgccatttcaatttggaaaaatcttcttgaacttgatgcaaaaaaggaaaaactttctcagagagatgataaccaactaaaaagaaaagtgggagaaaatgaaatcattgcaaagaaattaaaaatagaacaaatgcaaaagatagaagagaatagggactgccagctggaaaaacaaataaaagaagaaactctggagcaaagagattttaccactaaaagcgaaaagtttcaagaagaagaatttcagaatgacatagagaaagcaattgatactcataatcagaatgacttgactttcagagaggtaggaaaagtaattggaattgctattatgaaacactttggatggaaagcagacttgaggaatccacaattagagatctttatacatctaaatgacatttactctgtggtggggattcctgtgttcagggtttccctagccagcagagcttacatcaagacagctggactgcgatctacaatagcgtgggcaatggcatctctggctgacattaaggctggtgcatttgttttagatccaatgtgtggacttggaacaatacttttggaagctgctaaagaatggccagatgtgtattatgtaggtgctgatgtcagcgactcacagttactaggtacttgggacaatctgaaagctgcaggccttgaggataaaattgaattacttaaaatctctgttatagaattgccattgccttcagaaagtgttgatattattatttctgacattccatttgggaaaaagtttaagttaggaaaagacatcaaaagcattctacaagaaatggaaagagtgcttcatgttggcggaaccattgtattgttgcttagtgaagatcaccacaggcgccttacagattgtaaagagagcaacatccctttcaattccaaggacagtcacacagatgaacctggaattaaaaagtgcttgaatcctgaagaaaaaactggtgcattcaagacagcgtcaacttcattcgaagccagtaaccacaaattcttagacagaatgtcaccatttggctccttggtaccagtggaatgctacaaagttagccttggaaagacagatgcgttcatatgtaaatataagaagtcgcactcttctggactgtagcaggcttgctgccatcagccgggttcaggcccttgtaagttagctgtacagcagaagtttgctgtctctaggattcatatagcacccacagagctccaagtaaccaaattcccccaaagacagga

SEQ ID NO: 191088 - DNA, 3961 bp, Homo sapiens
  Payload ID: 17749
  Gene Name: THUMP domain containing 3
  Uniprot ID: Q9BV44
  ENST ID: ENST00000345094
  CDS Start-End: 335-1858
gcggcttccggcggcgtgacctgaccgcaagaggccaatggagtgtgggagctgaaagggtcttcgctggcggccggtaactggcggcggttgggaacggccgagtgtggctcttctggtgtttcagcttggggagagaggggtggccttcctcttgcagttgaggccggcgccgagccggacttcaggcggatctcgtggcggagcccatcttgctccctctcccaggcctttacccgctccctaggattcccgggccctgtaggtgggagttgggagacgacagtactgcttttaaagagacagtgttagggatcttggaagcacagccaacatgtgtgacattgaagaagccactaaccaactcctagatgtgaaccttcatgagaaccagaagtctgtacaagtgacagaaagtgacctcggaagtgaatctgagcttctagtcactattggagccactgtacctactggctttgagcaaacagctgcagatgaagtcagagagaaacttgggtcatcatgcaaaatcagcagagaccgtggcaagatatattttgtcatttcagtggaaagtctggcacaggttcattgtctgagatcagttgataacttatttgtggtggttcaggagtttcaagattaccagttcaaacaaacaaaggaagaagttctaaaggattttgaagacttggctggaaaactcccatggtcaaaccccttaaaagtgtggaaaattaatgccagttttaaaaagaaaaaagcaaagcgcaaaaagataaatcagaattcaagtaaagagaagattaataatggacaagaagtcaaaatcgatcagagaaatgttaaaaaagagttcactagccatgctttagattctcatatcttagattattatgaaaatccagccatcaaagaggatgtatcaacattaataggtgatgatttggcatcttgcaaagatgagactgatgaaagctcaaaagaagaaactgagcctcaagtgctgaagtttagagtcacatgcaacagggcaggagagaaacattgctttacctcaaatgaggctgcaagagattttgggggtgctgttcaagattattttaagtggaaggccgacatgaccaactttgatgtggaggttcttttgaacatccatgataatgaagtcattgtgggcattgcattgactgaagagagtctccaccgaagaaatataacacattttggacctacaactcttagatcaactcttgcctatgggatgctcaggctctgtgatcctctaccttatgatataatagtcgatccaatgtgtggaactggggcaataccaatagagggggccactgaatggtctgactgtttccatattgctggtgataataatccactggctgtgaatagagcagcaaataacattgcatctttattgaccaagagccaaattaaagaaggcaaaccctcctggggcttgcccatagatgctgttcagtgggatatctgcaatctgccattgagaactggctctgtggatattattgtaacagatttgccatttggaaaaaggatgggatccaagaagagaaactggaacctttatccagcttgcctacgggagatgagccgtgtctgcacacctaccacaggccgagctgtactacttactcaagacacaaaatgctttaccaaggcgttatctggaatgcgacacgtatggcgaaaggtggatacagtctgggtgaacgttggtggtcttcgtgctgcagtttacgttctgatacgtacacctcaagcttttgttcatccttcagaacaagacggagaaagaggaactctttggcaatgcaaagaatgaagatgactaatagtacttgtacttcccaccactggaaatgttagcataaaagaacttggagaggaaaaaagtattaacaaaactgcagtctgcactctttaaacctgtttaaggctcttcatcctggttagcaaaaggtgtgaatgtaatgtgatggaatttaaaagttttatgagaccaggcacagtggctcacgactgtaattccagcagtttaggaagccgaagtgtgcagatcacctgaggtccggagaccagcctggccaacatggtgaaaccctgtctctactagaaatacaaaaattagccaggtgtggtggcgggcgcctgtaatcccaactactcaggaggctgaggctagagaatcacttgaacccagcaggcggaggttgcggtgagtcgagatcacgccattgcactccagcctgtgcgacaagagcgaaactctgtctcaaaaagattttataagaaagcagagcttttccttgaagctcttttgaagtggtagcttaattagtattttgttgaaaatactttaaagatgcctagtgaaaagcctactaaagtgctgtgagattggggtttagaacattttattttcaggctttatggcctattttccattgtgtcaagtgcaaaactaccctggcccaaaggaagggcagagaacataattacatcttaggccacatttcattctttgcagctttgctaatccagttgctcaagttctttacctcaacctgaaggaatgaagcattattacattttgtgaatggtgttcagcctataagacgaagtctcacaagacctataggaaagtttaccatctgccttaaatattaaaatatccatctgttattcacattaatacacagaatgaaaatagaggtctaggaattatcaaaggtactgcaaaaatactgtatagaacttatttgtaaatagcacatacattgatagatggggtgtgggaccaacaaaccaaattaaaagaaattgtttttctttcagtacactaaggtgtgtgttttcaaaaccaaacacaaacctgtcaagagtatttgttggctagtttcttaaaaggccaagagaaaaaaaatgatatatctttggaaaacttttaatttgggagttatgtgagttgttactttctcctggatcacgattcacatttaattgcttttccagttgcaacaagtccttcttgagagttttgtggaaaatggtgcttccctggaacaaagagtagttgaggtttttttgtggaactcatcatagtattgtttattttggagcctctggctgcaatcagtatagattttcagtatcctattagtattataatagtactcctcttaatactttctgatgtctccattgagaataaaaggacacaatacttttgaaagaagagttcacattagcagcacagccagcaatcctcatctggtttctctgatctcctaccccacacttcataatgaatgggaaataagatgtttatgaaggttttatatcctagactggcctttttaccactatcagaattcacagctgctttgtttatgggccgaacacaaaacttttcacctgatgggagaaaccatttaaacctcaaattaagcaacccacagaaccaggaagttcaaggaccatgtctgttttcaccacgatgtctttccccacccccccaccccccactccaccccccactaagggcagggtattgtatctgccagactgggtatttgttgaacaagcgagtattttcgcctattagcttagtttttaaggaaatcattttttacttgattcatcatagctttaattctattacatactacaataaaaatttgacaagactgatacaaatatgtagtgggcaatagtttgccgtcttcttccctagtatggtgtttttcaatctggtgactagaataggcagtgggctataagcaggattcataaggcctggagctgagttatatgtgacactgccacctattcattgtgtgaccttggttttaaccttcaaagtgggtctcctggactaaaagaatgtgaaaagatggggaaataaatctgtaatctgaacatggaa

SEQ ID NO: 191089 - DNA, 2877 bp, Homo sapiens
  Payload ID: 17749
  Gene Name: THUMP domain containing 3
  Uniprot ID: Q9BV44
  ENST ID: ENST00000452837
  CDS Start-End: 340-1863
agtgctcggcaaggggaagcactctctaaacgttagcaaataccatggtaggacacaaggcccctgactctccgctttcagcttactgaagatcctcaaaaccaacagcacacagcttccagcgcatgctcctttccccaagaccttgtgggggaacccgccgccagcgcggagccaccgtgactcgtagcctgacttccgtttccgggggcggcttccggcggcgtgacctgaccgcaagaggccaatggagtgtgggagctgaaagggtcttcgctggcggccggacagtactgcttttaaagagacagtgttagggatcttggaagcacagccaacatgtgtgacattgaagaagccactaaccaactcctagatgtgaaccttcatgagaaccagaagtctgtacaagtgacagaaagtgacctcggaagtgaatctgagcttctagtcactattggagccactgtacctactggctttgagcaaacagctgcagatgaagtcagagagaaacttgggtcatcatgcaaaatcagcagagaccgtggcaagatatattttgtcatttcagtggaaagtctggcacaggttcattgtctgagatcagttgataacttatttgtggtggttcaggagtttcaagattaccagttcaaacaaacaaaggaagaagttctaaaggattttgaagacttggctggaaaactcccatggtcaaaccccttaaaagtgtggaaaattaatgccagttttaaaaagaaaaaagcaaagcgcaaaaagataaatcagaattcaagtaaagagaagattaataatggacaagaagtcaaaatcgatcagagaaatgttaaaaaagagttcactagccatgctttagattctcatatcttagattattatgaaaatccagccatcaaagaggatgtatcaacattaataggtgatgatttggcatcttgcaaagatgagactgatgaaagctcaaaagaagaaactgagcctcaagtgctgaagtttagagtcacatgcaacagggcaggagagaaacattgctttacctcaaatgaggctgcaagagattttgggggtgctgttcaagattattttaagtggaaggccgacatgaccaactttgatgtggaggttcttttgaacatccatgataatgaagtcattgtgggcattgcattgactgaagagagtctccaccgaagaaatataacacattttggacctacaactcttagatcaactcttgcctatgggatgctcaggctctgtgatcctctaccttatgatataatagtcgatccaatgtgtggaactggggcaataccaatagagggggccactgaatggtctgactgtttccatattgctggtgataataatccactggctgtgaatagagcagcaaataacattgcatctttattgaccaagagccaaattaaagaaggcaaaccctcctggggcttgcccatagatgctgttcagtgggatatctgcaatctgccattgagaactggctctgtggatattattgtaacagatttgccatttggaaaaaggatgggatccaagaagagaaactggaacctttatccagcttgcctacgggagatgagccgtgtctgcacacctaccacaggccgagctgtactacttactcaagacacaaaatgctttaccaaggcgttatctggaatgcgacacgtatggcgaaaggtggatacagtctgggtgaacgttggtggtcttcgtgctgcagtttacgttctgatacgtacacctcaagcttttgttcatccttcagaacaagacggagaaagaggaactctttggcaatgcaaagaatgaagatgactaatagtacttgtacttcccaccactggaaatgttagcataaaagaacttggagaggaaaaaagtattaacaaaactgcagtctgcactctttaaacctgtttaaggctcttcatcctggttagcaaaaggtgtgaatgtaatgtgatggaatttaaaagttttatgagaccaggcacagtggctcacgactgtaattccagcagtttaggaagccgaagtgtgcagatcacctgaggtccggagaccagcctggccaacatggtgaaaccctgtctctactagaaatacaaaaattagccaggtgtggtggcgggcgcctgtaatcccaactactcaggaggctgaggctagagaatcacttgaacccagcaggcggaggttgcggtgagtcgagatcacgccattgcactccagcctgtgcgacaagagcgaaactctgtctcaaaaagattttataagaaagcagagcttttccttgaagctcttttgaagtggtagcttaattagtattttgttgaaaatactttaaagatgcctagtgaaaagcctactaaagtgctgtgagattggggtttagaacattttattttcaggctttatggcctattttccattgtgtcaagtgcaaaactaccctggcccaaaggaagggcagagaacataattacatcttaggccacatttcattctttgcagctttgctaatccagttgctcaagttctttacctcaacctgaaggaatgaagcattattacattttgtgaatggtgttcagcctataagacgaagtctcacaagacctataggaaagtttaccatctgccttaaatattaaaatatccatctgttattcacattaatacacagaatgaaaatagaggtctaggaattatcaaaggtactgcaaaaatactgtatagaacttatttgtaaatagcacatacattgatagatggggtgtgggaccaacaaaccaaattaaaagaaattgtttttctttcagt

SEQ ID NO: 191090 - DNA, 708 bp, Homo sapiens
  Payload ID: 17749
  Gene Name: THUMP domain containing 3
  ENST ID: ENST00000441127
  CDS Start-End: 1-698
caaagcgcaaaaagataaatcagaattcaagtaaagagaagattaataatggacaagaagtcaaaatcgatcagagaaatgttaaaaaagagttcactagccatgctttagattctcatatcttagattattatgaaaatccagccatcaaagaggatgtatcaacattaataggtgatgatttggcatcttgcaaagatgagactgatgaaagctcaaaagaagaaactgagcctcaagtgctgaagtttagagtcacatgcaacagggcaggagagaaacattgctttacctcaaatgaggctgcaagagattttgggggtgctgttcaagattattttaagtggaaggccgacatgaccaactttgatgtggaggttcttttgaacatccatgataatgaagtcattgtgggcattgcattgactgaagagagtctccaccgaagaaatataacacattttggacctacaactcttagatcaactcttgcctatgggatgctcaggctctgtgatcctctaccttatgatataatagtcgatccaatgtgtggaactggggcaataccaatagagggggccactgaatggtctgactgtttccatattgctggtgataataatccactggctgtgaatagagcagcaaataacattgcatctttattgaccaagagccaaattaaagaagggtaaaaatttaaaa

SEQ ID NO: 191091 - DNA, 730 bp, Homo sapiens
  Payload ID: 17749
  Gene Name: THUMP domain containing 3
  ENST ID: ENST00000417036
  CDS Start-End: 609-730
tcctttccccaagaccttgtgggggaacccgccgccagcgcggagccaccgtgactcgtagcctgacttccgtttccgggggcggcttccggcggcgtgacctgaccgcaagaggccaatggagtgtgggagctgaaagggtcttcgctggcggccggtaactggcggcggttgggaacggccgagtgtggctcttctggtgtttcagcttggggagagaggggtggccttcctcttgcagttgaggccggcgccgagccggacttcaggcggatctcgtggcggagcccatcttgctccctctcccaggcctttacccgctccctaggattcccgggccctgtaggtgggagttgggagacgtgagttctctttcattctgcgcctctcattggctctctgaccttgtgcggaacgcgtcctttagctgacctcagctgcattttttagaagatggagattgtattcacagtgactgtcagctttttaacggcgggaactgacgtagtgttaaacactgtcgtgtatcgctggcacagcacaaggacattataggacagtactgcttttaaagagacagtgttagggatcttggaagcacagccaacatgtgtgacattgaagaagccactaaccaactcctagatgtgaaccttcatgagaaccagaagtctgtacaagtgacagaaagtgacctcggaagtgaatctgagcttctagtcactattgg

SEQ ID NO: 191092 - DNA, 704 bp, Homo sapiens
  Payload ID: 17749
  Gene Name: THUMP domain containing 3
  ENST ID: ENST00000419437
  CDS Start-End: 335-704
ggcggcttccggcggcgtgacctgaccgcaagaggccaatggagtgtgggagctgaaagggtcttcgctggcggccgggcctcactgtgtcacccaggctggagtgcagtcctcccacctcagcctcccaagtagctggactccaggcgcccaccaccacgcccagctattttttgtgtttttggtagagatgagattttgccatcttacgcagattggtctcgaactcttggcctcaagcaatctactcacctcagctccctaaagtgctgggattacaggacagtactgcttttaaagagacagtgttagggatcttggaagcacagccaacatgtgtgacattgaagaagccactaaccaactcctagatgtgaaccttcatgagaaccagaagtctgtacaagtgacagaaagtgacctcggaagtgaatctgagcttctagtcactattggagccactgtacctactggctttgagcaaacagctgcagatgaagtcagagagaaacttgggtcatcatgcaaaatcagcagagaccgtggcaagatatattttgtcatttcagtggaaagtctggcacaggttcattgtctgagatcagttgataacttatttgtggtggttcaggagtttcaagattaccagttcaaacaaacaaaggaagaagttctaaaggattttgaagacttggctggaaaac

SEQ ID NO: 191093 - DNA, 807 bp, Homo sapiens
  Payload ID: 17749
  Gene Name: THUMP domain containing 3
  ENST ID: ENST00000416603
  CDS Start-End: 1-807
gagaaatgttaaaaaagagttcactagccatgctttagattctcatatcttagattattatgaaaatccagccatcaaagaggatgtatcaacattaataggtgatgatttggcatcttgcaaagatgagactgatgaaagctcaaaagaagaaactgagcctcaagtgctgaagtttagagtcacatgcaacagggcaggagagaaacattgctttacctcaaatgaggctgcaagagattttgggggtgctgttcaagattattttaagtggaaggccgacatgaccaactttgatgtggaggttcttttgaacatccatgataatgaagtcattgtgggcattgcattgactgaagagagtctccaccgaagaaatataacacattttggacctacaactcttagatcaactcttgcctatgggatgctcagcaaaccctcctggggcttgcccatagatgctgttcagtgggatatctgcaatctgccattgagaactggctctgtggatattattgtaacagatttgccatttggaaaaaggatgggatccaagaagagaaactggaacctttatccagcttgcctacgggagatgagccgtgtctgcacacctaccacaggccgagctgtactacttactcaagacacaaaatgctttaccaaggcgttatctggaatgcgacacgtatggcgaaaggtggatacagtctgggtgaacgttggtggtcttcgtgctgcagtttacgttctgatacgtacacctcaagcttttgttcatccttcagaacaagacggagaaag

SEQ ID NO: 191094 - DNA, 2390 bp, Homo sapiens
  Payload ID: 17749
  Gene Name: THUMP domain containing 3
  Uniprot ID: Q9BV44
  ENST ID: ENST00000515662
  CDS Start-End: 685-2208
gggagctgaaagggtcttcgctggcggccggtaactggcggcggttgggaacggccgagtgtggctcttctggtgtttcagcttggggagagaggggtggccttcctcttgcagttgaggccggcgccgagccggacttcaggcggatctcgtggcggagcccatcttgctccctctcccaggcctttacccgctccctaggattcccgggccctgtaggtgggagttgggagacgtgagttctctttcattctgcgcctctcattggctctctgaccttgtgcggaacgcgtcctttagctgacctcagctgcattttttagaagatggagattgtattcacagtgactgtcagctttttaacggcgggaactgacgtagtgttaaacactgtcgtgtatcgctggcacagcacaaggacattataggtattctgtactcaattaagttattttgagtcacagaccttttgaaaatctcgtgtaagctatggcccctccacctctctaatacttcccccggcccccaccccaagcacacacaaaagcttatgcataggaaatttgttttactatttcggattacttccaagatctctctcctgatgcccatctatggatcccagagtctggacagtactgcttttaaagagacagtgttagggatcttggaagcacagccaacatgtgtgacattgaagaagccactaaccaactcctagatgtgaaccttcatgagaaccagaagtctgtacaagtgacagaaagtgacctcggaagtgaatctgagcttctagtcactattggagccactgtacctactggctttgagcaaacagctgcagatgaagtcagagagaaacttgggtcatcatgcaaaatcagcagagaccgtggcaagatatattttgtcatttcagtggaaagtctggcacaggttcattgtctgagatcagttgataacttatttgtggtggttcaggagtttcaagattaccagttcaaacaaacaaaggaagaagttctaaaggattttgaagacttggctggaaaactcccatggtcaaaccccttaaaagtgtggaaaattaatgccagttttaaaaagaaaaaagcaaagcgcaaaaagataaatcagaattcaagtaaagagaagattaataatggacaagaagtcaaaatcgatcagagaaatgttaaaaaagagttcactagccatgctttagattctcatatcttagattattatgaaaatccagccatcaaagaggatgtatcaacattaataggtgatgatttggcatcttgcaaagatgagactgatgaaagctcaaaagaagaaactgagcctcaagtgctgaagtttagagtcacatgcaacagggcaggagagaaacattgctttacctcaaatgaggctgcaagagattttgggggtgctgttcaagattattttaagtggaaggccgacatgaccaactttgatgtggaggttcttttgaacatccatgataatgaagtcattgtgggcattgcattgactgaagagagtctccaccgaagaaatataacacattttggacctacaactcttagatcaactcttgcctatgggatgctcaggctctgtgatcctctaccttatgatataatagtcgatccaatgtgtggaactggggcaataccaatagagggggccactgaatggtctgactgtttccatattgctggtgataataatccactggctgtgaatagagcagcaaataacattgcatctttattgaccaagagccaaattaaagaaggcaaaccctcctggggcttgcccatagatgctgttcagtgggatatctgcaatctgccattgagaactggctctgtggatattattgtaacagatttgccatttggaaaaaggatgggatccaagaagagaaactggaacctttatccagcttgcctacgggagatgagccgtgtctgcacacctaccacaggccgagctgtactacttactcaagacacaaaatgctttaccaaggcgttatctggaatgcgacacgtatggcgaaaggtggatacagtctgggtgaacgttggtggtcttcgtgctgcagtttacgttctgatacgtacacctcaagcttttgttcatccttcagaacaagacggagaaagaggaactctttggcaatgcaaagaatgaagatgactaatagtacttgtacttcccaccactggaaatgttagcataaaagaacttggagaggaaaaaagtattaacaaaactgcagtctgcactctttaaacctgtttaaggctcttcatcctggttagcaaaaggtgtgaatgtaatgtgatggaatttaaaagttttatgagaccagg

SEQ ID NO: 191095 - DNA, 3556 bp, Homo sapiens
  Payload ID: 17750
  Gene Name: Thy-1 cell surface antigen
  Uniprot ID: P04216
  ENST ID: ENST00000284240
  CDS Start-End: 1041-1526
actaggcagggatgagcaagaggaatggctcacccttgagagctggggtccatagcccaggtcagttctccagctctcccacttaccagccaagacaggaggtgaggattgagatgggatgaacccagcaggcggccatgggttaaaggtcgccatgaatgtaatgtgcccagcacagtgcctgctaaaaggcaacactcccttcctggtctgaagaccaaacaagcagactgtactcaggaaagccagaagaaccttccagctgtctggaccagaaggtgccagcccaggggctgaagaagacgtaatgcccagagcaaaaagcgcctgcagccccctgaagggctgggtgctctggaatagatgagggggcgaaatggggctggggaccagggacggacagggtgggtccagcacctgcctcgcttccgaagggctgctccaacactgaaaaacacccaaccagcttcctttcagaaagactggaatattccaaaacttctcactggaggctccggaggaggtgggctccagctgaaaaggaaatgtggaggcgtgggcgctcccggcctgcatcctgcacctcttacactttggttttcccacagactcctgaagaataggtcagaagaaagggttaaagccttaaaaggggaacaaccattgcggggctcagggaggaggataatgttctttgggctgccgcaccctgatccccggggtcccgaaccctcccgtccctggccaggcctgccagccacagggtgagggcccccttccgccgcaacctgccactctcacaccaatgcgggaccgccttctcttccttccccaccccccaccccaccctgccgtcctttctcccccaatctccgcctctgattggctgagcccccggctccccgctccccctctcctccatccccggtgaaaactgcgggctccgagctgggtgcagcaaccggaggcggcggcgcgtctggaggaggctgcagcagcggaagaccccagtccagatccaggactgagatcccagaaccatgaacctggccatcagcatcgctctcctgctaacagtcttgcaggtctcccgagggcagaaggtgaccagcctaacggcctgcctagtggaccagagccttcgtctggactgccgccatgagaataccagcagttcacccatccagtacgagttcagcctgacccgtgagacaaagaagcacgtgctctttggcactgtgggggtgcctgagcacacataccgctcccgaaccaacttcaccagcaaatacaacatgaaggtcctctacttatccgccttcactagcaaggacgagggcacctacacgtgtgcactccaccactctggccattccccacccatctcctcccagaacgtcacagtgctcagagacaaactggtcaagtgtgagggcatcagcctgctggctcagaacacctcgtggctgctgctgctcctgctctccctctccctcctccaggccacggatttcatgtccctgtgactggtggggcccatggaggagacaggaagcctcaagttccagtgcagagatcctacttctctgagtcagctgaccccctccccccaatccctcaaaccttgaggagaagtggggaccccacccctcatcaggagttccagtgctgcatgcgattatctacccacgtccacgcggccacctcaccctctccgcacacctctggctgtctttttgtactttttgttccagagctgcttctgtctggtttatttaggttttatccttccttttctttgagagttcgtgaagagggaagccaggattggggacctgatggagagtgagagcatgtgaggggtagtgggatggtggggtaccagccactggaggggtcatccttgcccatcgggaccagaaacctgggagagacttggatgaggagtggttgggctgtgcctgggcctagcacggacatggtctgtcctgacagcactcctcggcaggcatggctggtgcctgaagaccccagatgtgagggcaccaccaagaatttgtggcctaccttgtgagggagagaactgagcatctccagcattctcagccacaaccaaaaaaaaataaaaagggcagccctccttaccactgtggaagtccctcagaggccttggggcatgacccagtgaagatgcaggtttgaccaggaaagcagcgctagtggagggttggagaaggaggtaaaggatgagggttcatcatccctccctgcctaaggaagctaaaagcatggccctgctgcccctccctgcctccacccacagtggagagggctacaaaggaggacaagaccctctcaggctgtcccaagctcccaagagcttccagagctctgacccacagcctccaagtcaggtggggtggagtcccagagctgcacagggtttggcccaagtttctaagggaggcacttcctcccctcgcccatcagtgccagcccctgctggctggtgcctgagcccctcagacagccccctgccccgcaggcctgccttctcagggacttctgcggggcctgaggcaagccatggagtgagacccaggagccggacacttctcaggaaatggcttttcccaacccccagcccccacccggtggttcttcctgttctgtgactgtgtatagtgccaccacagcttatggcatctcattgaggacaaagaaaactgcacaataaaaccaagcctctggaatctgtcctcgtgtccacctggccttcgctcctccagcagtgcctgcctgcccccgcttcgctggggtctccacgggtgaggctggggaacgccacctcttcctcttccctgacttctccccaaccacttagtagcaacgctaccccaggggctaatgactgcacactgggcttcttttcagaatgaccctaacgagacacatttgcccaaataaacgaacatcccatgtctgctgactcacctggctggaacaacatgcttactgccaacatgtgggccgaaccacatggccctggctctggaatgcacaagtggctttgcgtgaatctgcgctaagctatgcagtctgctttttcttctcagctctggtagttcttcagaaatgtaccctccaggcacatccactattgcgagggtgagcacgaagggtgggagatgcccatgtcctcaaggcatcacttcctaaatccaaaagcatcggcaggagaaaggactggggacaaatactgtcccttcgggagtagggagggaacactgaggcccatccctggctccttccctaaaagtagagtaaaatggaagcgagcatcctgggattgggggcaagagggggaccgcagggtagctgtgggttccaactgctgtcagagtcagagaggcagccccaagccagcctccctgctttgccagggaatttgggggaggaaggtgacagctgcccagaggctgactcatctgatatttagcactgggtaggatgattgtttctgagcatttttcttaaaggcctcagatctaaatta

SEQ ID NO: 191096 - DNA, 2050 bp, Homo sapiens
  Payload ID: 17750
  Gene Name: Thy-1 cell surface antigen
  Uniprot ID: P04216
  ENST ID: ENST00000528522
  CDS Start-End: 977-1462
tttgggaaaggagaggattggaatacggaaatggattaaggatgaggcccgccgggggcttgagagggaggaagagcagaccttctctgggtctggagccgcctgaggacacagaccagaggaaatgaatacagactgcacctccccagccgctctccacccctcccctggctcttctaccctctccagccccagacccatttcttccctttcttgctctggccattgctcccccttcccctcctagatcccaagcccgcacaacatctcaaacaagagtcctcgattcaaaagccagatgccgaccccccttcctcctggatctggctcagggcagcagctccaccccgggacagagagagcattgattgtagctgcagccgccgcgggatcctagcctcacccgtcaaggggctgagcgccagggaccctgaactcgtctagtggtgcgccctgcgcacccgggcgcactcaaccgaggcaatgccctgcgcgctctcgcgggtgcacgccccttctgtggcctctcctgggcgagcactgctctgcagataggctagactaccggctccgcgtcgcctcgccaagggttggttcagccaaggctgcaaaaaacaaaaaaagaccaggcagacagcctatccagggtggctattgaaactgggctggaaaactgcagtcccaggaactccagagagctggacattgggaagcatccttggctcacatacaatcggagatcactatgtctttctctcctccaggaacacgattagcttgtgtcctatccagataggaatagatgctccctatctgggagcatccttagctatggtgaatggtatctagccatccactggggatggcgagtgacttagggatttgtgtctcacgtatatgaagcagtcatcgccagatgttggttgtttttcttaacccccatcataacccgatccaggactgagatcccagaaccatgaacctggccatcagcatcgctctcctgctaacagtcttgcaggtctcccgagggcagaaggtgaccagcctaacggcctgcctagtggaccagagccttcgtctggactgccgccatgagaataccagcagttcacccatccagtacgagttcagcctgacccgtgagacaaagaagcacgtgctctttggcactgtgggggtgcctgagcacacataccgctcccgaaccaacttcaccagcaaatacaacatgaaggtcctctacttatccgccttcactagcaaggacgagggcacctacacgtgtgcactccaccactctggccattccccacccatctcctcccagaacgtcacagtgctcagagacaaactggtcaagtgtgagggcatcagcctgctggctcagaacacctcgtggctgctgctgctcctgctctccctctccctcctccaggccacggatttcatgtccctgtgactggtggggcccatggaggagacaggaagcctcaagttccagtgcagagatcctacttctctgagtcagctgaccccctccccccaatccctcaaaccttgaggagaagtggggaccccacccctcatcaggagttccagtgctgcatgcgattatctacccacgtccacgcggccacctcaccctctccgcacacctctggctgtctttttgtactttttgttccagagctgcttctgtctggtttatttaggttttatccttccttttctttgagagttcgtgaagagggaagccaggattggggacctgatggagagtgagagcatgtgaggggtagtgggatggtggggtaccagccactggaggggtcatccttgcccatcgggaccagaaacctgggagagacttggatgaggagtggttgggctgtgcctgggcctagcacggacatggtctgtcctgacagcactcctcggcaggcatggctggtgcctgaagaccccagatgtgagggcaccaccaagaatttgtggcctaccttgtgagggagagaactgagcatctccagcattctcagccacaacc

SEQ ID NO: 191097 - DNA, 897 bp, Homo sapiens
  Payload ID: 17750
  Gene Name: Thy-1 cell surface antigen
  ENST ID: ENST00000528295
  CDS Start-End: 85-198
agcaaccggaggcggcggcgcgtctggaggaggctgcagcagcggaagaccccagtccagatccaggactgagatcccagaaccatgaacctggccatcagcatcgctctcctgctaacaggtctcccgagggcagaaggtgaccagcctaacggcctgcctagtggaccagagccttcgtctggactgccgccatgagaataccagcagttcacccatccagtacgagttcagcctgacccgtgagacaaagaagcacgtgctctttggcactgtgggggtgcctgagcacacataccgctcccgaaccaacttcaccagcaaatacaacatgaaggtcctctacttatccgccttcactagcaaggacgagggcacctacacgtgtgcactccaccactctggccattccccacccatctcctcccagaacgtcacagtgctcagagacaaactggtcaagtgtgagggcatcagcctgctggctcagaacacctcgtggctgctgctgctcctgctctccctctccctcctccaggccacggatttcatgtccctgtgactggtggggcccatggaggagacaggaagcctcaagttccagtgcagagatcctacttctctgagtcagctgaccccctccccccaatccctcaaaccttgaggagaagtggggaccccacccctcatcaggagttccagtgctgcatgcgattatctacccacgtccacgcggccacctcaccctctccgcacacctctggctgtctttttgtactttttgttccagagctgcttctgtctggtttatttaggttttatccttccttttctttgagagttcgtgaagagggaagccaggattggggacctgatggagagtgagagcatgtgagg

SEQ ID NO: 191098 - DNA, 581 bp, Homo sapiens
  Payload ID: 17750
  Gene Name: Thy-1 cell surface antigen
  ENST ID: ENST00000524970
  CDS Start-End: 85-581
agcaaccggaggcggcggcgcgtctggaggaggctgcagcagcggaagaccccagtccagatccaggactgagatcccagaaccatgaacctggccatcagcatcgctctcctgctaacagtcttgcaggtctcccgagggcagaaggtgaccagcctaacggcctgcctagtggaccagagccttcgtctggactgccgccatgagaataccagcagttcacccatccagtacgagttcagcctgacccgtgagacaaagaagcacgtgctctttggcactgtgggggtgcctgagcacacataccgctcccgaaccaacttcaccagcaaatacaacatgaaggtcctctacttatccgccttcactagcaaggacgagggcacctacacgtgtgcactccaccactctggccattccccacccatctcctcccagaacgtcacagtgctcagaggccacggatttcatgtccctgtgactggtggggcccatggaggagacaggaagcctcaagttccagtgcagagatcctacttctctgagtcagctgaccccctccccccaatccctcaaacctt

SEQ ID NO: 191099 - DNA, 570 bp, Homo sapiens
  Payload ID: 17750
  Gene Name: Thy-1 cell surface antigen
  ENST ID: ENST00000524659
  CDS Start-End: 113-570
cagaatcagaaagctgttaagcaggaaggagtgcgctgccatgaagaggcagacagaagccagagccagtgtgtctggaatgcatcagatccaggactgagatcccagaaccatgaacctggccatcagcatcgctctcctgctaacagtcttgcaggtctcccgagggcagaaggtgaccagcctaacggcctgcctagtggaccagagccttcgtctggactgccgccatgagaataccagcagttcacccatccagtacgagttcagcctgacccgtgagacaaagaagcacgtgctctttggcactgtgggggtgcctgagcacacataccgctcccgaaccaacttcaccagcaaatacaacatgaaggtcctctacttatccgccttcactagcaaggacgagggcacctacacgtgtgcactccaccactctggccattccccacccatctcctcccagaacgtcacagtgctcagagacaaactggtcaagtgtgagggcatcagcctgctggctcagaacacctcgtggctgctgctgctcctgctctccctctccctcct

SEQ ID NO: 191100 - DNA, 578 bp, Homo sapiens
  Payload ID: 17750
  Gene Name: Thy-1 cell surface antigen
  ENST ID: ENST00000580275
  CDS Start-End: 111-545
aaaactgcgggctccgagctgggtgcagcaaccggaggcggcggcgcgtctggaggaggctgcagcagcggaagaccccagtccagatccaggactgagatcccagaaccatgaacctggccatcagcatcgctctcctgctaacagtggaccagagccttcgtctggactgccgccatgagaataccagcagttcacccatccagtacgagttcagcctgacccgtgagacaaagaagcacgtgctctttggcactgtgggggtgcctgagcacacataccgctcccgaaccaacttcaccagcaaatacaacatgaaggtcctctacttatccgccttcactagcaaggacgagggcacctacacgtgtgcactccaccactctggccattccccacccatctcctcccagaacgtcacagtgctcagagacaaactggtcaagtgtgagggcatcagcctgctggctcagaacacctcgtggctgctgctgctcctgctctccctctccctcctccaggccacggatttcatgtccctgtgactggtggggcccatggaggagacaggaagcctc

SEQ ID NO: 191101 - DNA, 736 bp, Homo sapiens
  Payload ID: 17751
  Gene Name: thymic stromal lymphopoietin
  Uniprot ID: Q969D9
  ENST ID: ENST00000344895
  CDS Start-End: 200-679
gcagccagaaagctctggagcatcagggagactccaacttaaggcaacagcatgggtgaataagggcttcctgtggactggcaatgagaggcaaaacctggtgcttgagcactggcccctaaggcaggccttacagatctcttacactcgtggtgggaagagtttagtgtgaaactggggtggaattgggtgtccacgtatgttcccttttgccttactatatgttctgtcagtttctttcaggaaaatcttcatcttacaacttgtagggctggtgttaacttacgacttcactaactgtgactttgagaagattaaagcagcctatctcagtactatttctaaagacctgattacatatatgagtgggaccaaaagtaccgagttcaacaacaccgtctcttgtagcaatcggccacattgccttactgaaatccagagcctaaccttcaatcccaccgccggctgcgcgtcgctcgccaaagaaatgttcgccatgaaaactaaggctgccttagctatctggtgcccaggctattcggaaactcagataaatgctactcaggcaatgaagaagaggagaaaaaggaaagtcacaaccaataaatgtctggaacaagtgtcacaattacaaggattgtggcgtcgcttcaatcgacctttactgaaacaacagtaaaccatctttattatggtcatatttcacagcaccaaaataaatcatctttattaagta

SEQ ID NO: 191102 - DNA, 2621 bp, Homo sapiens
  Payload ID: 17751
  Gene Name: thymic stromal lymphopoietin
  ENST ID: ENST00000420978
  CDS Start-End: 1423-1902
gaagttggtgatgggggaagagtggacttttttttcaaagaatgctgtggtgactcgagtacaacacatgaagaattccagaaaagagccatttttgaagtcagcggtgaatcagaggttttctgaccctctcgagtgccttctatgaagaagagttcaactctggctccagtttgtcccctactcttttcccgaatccctcgacattccttgctcttttccccaggcaccgcatggcctgtgacatttgctgggactcacacacggcgtccaacctcctttctccgagcgatgactcctaggaacttcccaaggaccagagcgatgcaggctccgacacgcgagggcggggggcgggggtgaggggtgcgatggacgggggagcggaagggaaagagagagagaggggacctgggtgtagagagggcccagggccgcatgagccaagccagggaggagcagggggttcatctcagcaacctgatcggtgtcggcctttccctcccttcaaccctccattggtgttgctggaactgggaagactgctagacagacatcctctagggcactctccctgactcactttgctgtgcttttaagcgctcttttctggatcaacaagagtttgctagtaaaaatctgagcccgccatctcgatgcttctcctgtctctaaaactggtgcccgggctgaggccccaggtgacagacgttttccagtctacgctgcgcggggctaagcctctgcgaggcagagcgcactaaagcgtgcgccgcctccgggagagctgagctcaggacagcatcgtctccgtgcggtcgccgctgggcacccagcagcgcggtctggctccgcttcttgtgtcgctggccttaagagtgggactgtgaaggtggctgggcgctggaatttgtggttttaaaagttcttgacacctgctagaaagtgctagaggactcttcagcccctaaggtgcccctagccaccaagagtaggcgtttttcctgaaattgatatgggaaatttgaaaagtagggtttttgagaacaagccacatcagatctttccccacttatttcaacctcttatcgttcctgcccctaaggttctggtcacggttgcacatttaatgctttcacatggaagtgctgtcgaagactgagactgcaccccaccctccaaagcatcccataagcaagcacagtttcttactagccaaggagaagggaaagcactagttgaaagtggccacaggaaatgctcaaagatgttcagaatgcatgggacatatgcaaggactccaaatccttacagtggctgctggtttcagaaggtgtttctcccaaatagaaaggattggtcacggaaatgccctgtaggagaaagacactggtatccgtttcttaaaggacattcacacttatgaagtgtttagggcaaagcaaaaaggaggaagtttctttcaggaaaatcttcatcttacaacttgtagggctggtgttaacttacgacttcactaactgtgactttgagaagattaaagcagcctatctcagtactatttctaaagacctgattacatatatgagtgggaccaaaagtaccgagttcaacaacaccgtctcttgtagcaatcggccacattgccttactgaaatccagagcctaaccttcaatcccaccgccggctgcgcgtcgctcgccaaagaaatgttcgccatgaaaactaaggctgccttagctatctggtgcccaggctattcggaaactcagataaatgctactcaggcaatgaagaagaggagaaaaaggaaagtcacaaccaataaatgtctggaacaagtgtcacaattacaaggattgtggcgtcgcttcaatcgacctttactgaaacaacagtaaaccatctttattatggtcatatttcacagcaccaaaataaatcatctttattaagtagatgaaacattaactctaactgtgacaaagaagaccacaaatagttatcttttaattacagaagagtttcttaacttacttttgtaagtttttattgtgtaagtttataatgcaggggaagtactactcctcaaatgttgagggaagcttccataacattgatgactggcttcatggcagtaattctcggctgtagttgcataagcattgctcaagaggaaaatccaaaagtgcagcaggagaactcttttccctgaaaaaggaaaaatattgaactcaatgatagcacctaaacttacatttaaaagacagacattccttctacatgtaatgacacttcttgtgttaaactaaaaatttacaagagaagaaagtgaaagcaaatggggtttcacaaatagttgtaaatatagtgaagcaatttgaaataattttcaagcaaagtattgtgaaagtattctaagccaagttttaaatattatctaacagacaagagtggtatatacaagtagatcctgagaagtacctttgttacagctactataaatatacatataaattatagaatctactttaatttattttgtgaacacttttgaaaatgtacatgttcctttgtaattgacactatatatttcttaataaaataattctcaaatttg

SEQ ID NO: 191103 - DNA, 2411 bp, Homo sapiens
  Payload ID: 17751
  Gene Name: thymic stromal lymphopoietin
  Uniprot ID: Q969D9
  ENST ID: ENST00000379706
  CDS Start-End: 270-461
accctcgccacgcccctgctcccccgcggttggttcttccttgctctactcaaccctgacctcttctctctgactctcgacttgtgttccccgctcctccctgaccttcctcccctcccctttcactcaattctcaccaactctttctctctctggtgttttctccttttctcgtaaactttgccgcctatgagcagccacattgccttactgaaatccagagcctaaccttcaatcccaccgccggctgcgcgtcgctcgccaaagaaatgttcgccatgaaaactaaggctgccttagctatctggtgcccaggctattcggaaactcagataaatgctactcaggcaatgaagaagaggagaaaaaggaaagtcacaaccaataaatgtctggaacaagtgtcacaattacaaggattgtggcgtcgcttcaatcgacctttactgaaacaacagtaaaccatctttattatggtcatatttcacagcaccaaaataaatcatctttattaagtagatgaaacattaactctaactgtgacaaagaagaccacaaatagttatcttttaattacagaagagtttcttaacttacttttgtaagtttttattgtgtaagtttataatgcaggggaagtactactcctcaaatgttgagggaagcttccataacattgatgactggcttcatggcagtaattctcggctgtagttgcataagcattgctcaagaggaaaatccaaaagtgcagcaggagaactcttttccctgaaaaaggaaaaatattgaactcaatgatagcacctaaacttacatttaaaagacagacattccttctacatgtaatgacacttcttgtgttaaactaaaaatttacaagagaagaaagtgaaagcaaatggggtttcacaaatagttgtaaatatagtgaagcaatttgaaataattttcaagcaaagtattgtgaaagtattctaagccaagttttaaatattatctaacagacaagagtggtatatacaagtagatcctgagaagtacctttgttacagctactataaatatacatataaattatagaatctactttaatttattttgtgaacacttttgaaaatgtacatgttcctttgtaattgacactatatatttcttaataaaataattctcaaatttgtttcttatgaatcatctctcaaatctagttagacaatttgcacacatacttttctaagggacattatcttccttcaggtttttacctccactcatccttagagcccactgactgctcccctttatacctgttggccctgcctataggagagaatatttggagataggcagcttcaggatgcattgcaatcatccttttcttaaattatgtcactagtcttttattttttcccctcttgaactttcctcacacctggaagaaacaaagtaggaaaaagtgaacaggggatgtcaaatcgattcttgaattcccgctgcaagctagagccgcaggcaccctctcactcaatttccactcagaaccctataaacaccagtgggaagggcaacccactgcacgtgggaatgcactgatttttcctaggagtagacatgttcctctaattactccctgagggttagttggggctaaaccatgacagaagtggggaagttcaatgtccttaaatccatcttacttgccaacaggtaagaggaagcttacattacatgtccagtccacatttaaagagcacttactgtggaacaagccttcagccaaacaatggggatagaaaagtaggtaagactcagcctttgtccagagaagctcagggtatagctgaataggcagtttcttttgtcctgaggaaaatcaggacatgcctgctttctaaaaatcttcctctgaagacctgacccaagctcttaaatgctattgtaagagaaatttctttgtctattaactccattttagtagggattcactgactagattttactgaactatgaaaataaatacacataatttttcacaaaattttgggcccaattcccctaaaagaattgaggattagggagaaaggagacaactcaaagtcatcccattaagtgcagtttctttgaatcttctgctttatctttaaaaatttgtataatttatatattttattctatgtgttccatagatatcttaatgtaaaattagtcatttaaattacactgtcaattaaaagtaatgggcaagagattgcatcatactaatttagtaagaacgttcccaaatgttgtaacaatgtggatcatacatctctggttttttaaatgtattgaggctttcttggtggactagtatagtatacggtcagttatgtcaatgtttcatggtcaataaaaaggaagttgcaaattgt

SEQ ID NO: 191104 - DNA, 1628 bp, Homo sapiens
  Payload ID: 17752
  Gene Name: thymidine kinase 1, soluble
  Uniprot ID: P04183
  ENST ID: ENST00000301634
  CDS Start-End: 240-944
cctgatttccaggccctcccagtccctgggcgcacgtcccggattcctcccacgagggggcgggctgcggccaaatctcccgccaggtcagcggccgggcgctgattggccccatggcggcggggccggctcgtgattggccagcacgccgtggtttaaagcggtcggcgcgggaaccaggggcttactgcgggacggccttggagagtactcgggttcgtgaacttcccggaggcgcaatgagctgcattaacctgcccactgtgctgcctggctcccccagcaagacccgggggcagatccaggtgattctcgggccgatgttctcaggaaaaagcacagagttgatgagacgcgtccgtcgcttccagattgctcagtacaagtgcctggtgatcaagtatgccaaagacactcgctacagcagcagcttctgcacacatgaccggaacaccatggaggcactgcccgcctgcctgctccgagacgtggcccaggaggccctgggcgtggctgtcataggcatcgacgaggggcagtttttccctgacatcgtggagttctgcgaggccatggccaacgccgggaagaccgtaattgtggctgcactggatgggaccttccagaggaagccatttggggccatcctgaacctggtgccgctggccgagagcgtggtgaagctgacggcggtgtgcatggagtgcttccgggaagccgcctataccaagaggctcggcacagagaaggaggtcgaggtgattgggggagcagacaagtaccactccgtgtgtcggctctgctacttcaagaaggcctcaggccagcctgccgggccggacaacaaagagaactgcccagtgccaggaaagccaggggaagccgtggctgccaggaagctctttgccccacagcagattctgcaatgcagccctgccaactgagggacctgcgagggccgcccgctcccttcctgccactgccgcctactggacgctgccctgcatgctgcccagccactccaggaggaagtcgggaggcgtggagggtgaccacaccttggccttctgggaactctcctttgtgtggctgccccacctgccgcatgctccctcctctcctacccactggtctgcttaaagcttccctctcagctgctgggacgatcgcccaggctggagctggccccgcttggtggcctgggatctggcacactccctctccttggggtgagggacagagccccacgctgttgacatcagcctgcttcttcccctctgcggctttcactgctgagtttctgttctccctgggaagcctgtgccagcacctttgagccttggcccacactgaggcttaggcctctctgcctgggatgggctcccaccctcccctgaggatggcctggattcacgccctcttgtttccttttgggctcaaagcccttcctacctctggtgatggtttccacaggaacaacagcatctttcaccaagatgggtggcaccaaccttgctgggacttggatcccaggggcttatctcttcaagtgtggagagggcagggtccacgcctctgctgtagcttatgaaattaactaattgaaaattcactggttggtggacgca

SEQ ID NO: 191105 - DNA, 683 bp, Homo sapiens
  Payload ID: 17752
  Gene Name: thymidine kinase 1, soluble
  ENST ID: ENST00000590430
  CDS Start-End: 45-308
cggccttggagagtactcgggttcgtgaacttcccggaggcgcaatgagctgcattaacctgcccactgtgctgcctggctcccccagcaagacccgggggcagatccaggtgattctcgggccgatgttctcaggaaaaagcacagagttgatgagacgcgtccgtcgcttccagattgctcagtacaagtgcctggtgatcaagtatgccaaagacactcgctacagcagcagcttctgcacacatgaccgttccctgacatcgtggagttctgcgaggccatggccaacgccgggaagaccgtaattgtggctgcactggatgggaccttccagaggaagccatttggggccatcctgaacctggtgccgctggccgagagcgtggtgaagctgacggcggtgtgcatggagtgcttccgggaagccgcctataccaagaggctcggcacagagaaggaggtagctccacctgccttccctgcaggccggcggggtgggggtatggctctgcctccttcctgtcctggcccttcacccatcccctgtccctgcggccaggtcgaggtgattgggggagcagacaagtaccactccgtgtgtcggctctgctacttcaagaaggcctcaggccagcctgccgggccggacaacaaagagaactgcccagtgccaggaaagc

SEQ ID NO: 191106 - DNA, 631 bp, Homo sapiens
  Payload ID: 17752
  Gene Name: thymidine kinase 1, soluble
  ENST ID: ENST00000586613
  CDS Start-End: 70-631
cgggaaccaggggcttactgcgggacggccttggagagtactcgggttcgtgaacttcccggaggcgcaatgagctgcattaacctgcccactgtgctgcctggctcccccagcaagacccgggggcagatccaggtgattctcgggccgatgttctcaggaaaaagcacagagttgatgagacgcgtccgtcgcttccagattgctcagtacaagtgcctggtgatcaagtatgccaaagacactcgctacagcagcagcttctgcacacatgaccgaactcgaagtaggattatagcaaggaacaccatggaggcactgcccgcctgcctgctccgagacgtggcccaggaggccctgggcgtggctgtcataggcatcgacgaggggcagtttttccctgacatcgtggagttctgcgaggccatggccaacgccgggaagaccgtaattgtggctgcactggatgggaccttccagaggaagccatttggggccatcctgaacctggtgccgctggccgagagcgtggtgaagctgacggcggtgtgcatggagtgcttccgggaagccgcctataccaagaggctcggcacagagaaggaggtcgaggtgattgggggagcagaca

SEQ ID NO: 191107 - DNA, 1681 bp, Homo sapiens
  Payload ID: 17752
  Gene Name: thymidine kinase 1, soluble
  ENST ID: ENST00000588734
  CDS Start-End: 240-1043
cctgatttccaggccctcccagtccctgggcgcacgtcccggattcctcccacgagggggcgggctgcggccaaatctcccgccaggtcagcggccgggcgctgattggccccatggcggcggggccggctcgtgattggccagcacgccgtggtttaaagcggtcggcgcgggaaccaggggcttactgcgggacggccttggagagtactcgggttcgtgaacttcccggaggcgcaatgagctgcattaacctgcccactgtgctgcctggctcccccagcaagacccgggggcagatccaggtgattctcgggccgatgttctcaggaaaaagcacagagttgatgagacgcgtccgtcgcttccagattgctcagtacaagtgcctggtgatcaagtatgccaaagacactcgctacagcagcagcttctgcacacatgaccggaacaccatggaggcactgcccgcctgcctgctccgagacgtggcccaggaggccctgggcgtggctgtcataggcatcgacgaggggcagtttttccctgacatcgtggagttctgcgaggccatggccaacgccgggaagaccgtaattgtggctgcactggatgggaccttccagaggaagccatttggggccatcctgaacctggtgccgctggccgagagcgtggtgaagctgacggcggtgtgcatggagtgcttccgggaagccgcctataccaagaggctcggcacagagaaggaggtagctccacctgccttccctgcaggccggcggggtgggggtatggctctgcctccttcctgtcctggcccttcacccatcccctgtccctgcggccaggtcgaggtgattgggggagcagacaagtaccactccgtgtgtcggctctgctacttcaagaaggcctcaggccagcctgccgggccggacaacaaagagaactgcccagtgccaggaaagccaggggaagccgtggctgccaggaagctctttgccccacagcagattctgcaatgcagccctgccaactgagggacctgcgagggccgcccgctcccttcctgccactgccgcctactggacgctgccctgcatgctgcccagccactccaggaggaagtcgggaggcgtggagggtgaccacaccttggccttctgggaactctcctttgtgtggctgccccacctgccgcatgctccctcctctcctacccactggtctgcttaaagcttccctctcagctgctgggacgatcgcccaggctggagctggccccgcttggtggcctgggatctggcacactccctctccttggggtgagggacagagccccacgctgttgacatcagcctgcttcttcccctctgcggctttcactgctgagtttctgttctccctgggaagcctgtgccagcacctttgagccttggcccacactgaggcttaggcctctctgcctgggatgggctcccaccctcccctgaggatggcctggattcacgccctcttgtttccttttgggctcaaagcccttcctacctctggtgatggtttccacaggaacaacagcatctttcaccaagatgggtggcaccaaccttgctgggacttggatcccaggggcttatctcttcaagtgtggagagggcagggtccacgcctctgctgt

SEQ ID NO: 191108 - DNA, 642 bp, Homo sapiens
  Payload ID: 17752
  Gene Name: thymidine kinase 1, soluble
  ENST ID: ENST00000590862
  CDS Start-End: 43-585
gccttggagagtactcgggttcgtgaacttcccggaggcgcaatgagctgcattaacctgcccactgtgctgcctggctcccccagcaagacccgggggcagatccaggtgattctcgggccgatgttctcaggaaaaagcacagagttgatgagacgcgtccgtcgcttccagattgctcagtacaagtgcctggtgatcaagtatgccaaagacactcgctacagcagcagcttctgcacacatgaccggaacaccatggaggcactgcccgcctgcctgctccgagacgtggcccaggaggccctgggcgtggctgtcataggcatcgacgaggggcagtttttccctgacatcgtggagttctgcgaggccatggccaacgccgggaagaccgtaattgtggctgcactggatgggaccttccagaggaagccatttggggccatcctgaacctggtgccgctggccgagagcgtggtgaagctgacggcggtgtgcatggagtgcttccgggaagccgcctataccaagaggctcggcacagagaaggagcagattctgcaatgcagccctgccaactgagggacctgcgagggccgcccgctcccttcctgccactgccgcctactggacgctgcc

SEQ ID NO: 191109 - DNA, 5114 bp, Homo sapiens
  Payload ID: 17753
  Gene Name: thymidine kinase 2, mitochondrial
  Uniprot ID: O00142
  ENST ID: ENST00000299697
  CDS Start-End: 352-1149
ggaataagtgacatcatgagtgtgtgccaggtgtctgattacagaaggtgttcaattaatctgcaatcattaattaacccttcagtcgctggtattatttgccatccatcctccgagtgttgccaagttatgggtgcgttctgccagcgtcctagcagtggtaaggcttctggctgccagcggcgaacctctcccttcgagtatttctcctcttgctgagatgaaatgcgaccgggtctctttaagggccaggcgccgggatccaggcggcgcccaacggctggactagcagtcgtccgcgccgactcgcacaagaaggaaccccgggcctctggatccgctcgcccggctatgctgctgtggccgctgcggggctgggccgcccgggcgctgcgctgctttgggccgggaagtcgcgggagcccggcctcaggccccgggccgcggagggtgcagcgccgggcctggcctcccgataaagaacaggaaaaagagaaaaaatcagtgatctgtgtcgagggcaatattgcaagtgggaagacgacatgcctggaattcttctccaacgcgacagacgtcgaggtgttaacggagcctgtgtccaagtggagaaatgtccgtggccacaatcctctgggcctgatgtaccacgatgcctctcgctggggtcttacgctacagacttatgtgcagctcaccatgctggacaggcatactcgtcctcaggtgtcatctgtacggttgatggagaggtcgattcacagcgcaagatacatttttgtagaaaacctgtatagaagtgggaagatgccagaagtggactatgtagttctgtcggaatggtttgactggatcttgaggaacatggacgtgtctgttgatttgatagtttaccttcggaccaatcctgagacttgttaccagaggttaaagaagagatgcagggaagaggagaaggtcattccgctggaatacctggaagcaattcaccatctccatgaggagtggctcatcaaaggcagccttttccccatggcagcccctgttctggtgattgaggctgaccaccacatggagaggatgttagaactctttgaacaaaatcgggatcgaatattaactccagagaatcggaagcattgcccataggaggcaaaaggtctatggctcatgtctgaaaaatgcctgctgctgccaagttagctattgggagcaatctggaaaaacttgctcccaggagggctttgtgtctggccagcttgattttcctaatggtctcatctcctttgctagtgtctttgtcatgcgtctctggccctcgtgggtaaatgacaaacgggaccaatgggtttgccaagccctttgctgttcgcagcctcacattcccccggtgcctctcccatggctttgtgctgctgagtcgctctcatgaagcccttagggagagcacctgttgtgtgcctgacaccacgctggagctgtgtaccaatcgtctcagccttcattaggaggccgaggtaggagtcttatatcccaggtgaggaatttgaagctcagaaaggttgaggggctccccagaggtcacacagcctgtgtgcagtggagctggcaccattcagactttcagccgactcagcaactttcccttgccctgggctgcctcctcctgagagctgttccccaccgccctgcctcttccggttggaggctctcatgtctctttggggagagctggcagtgtgcggagctgataacattttcccaatattgagcagttcccaaggacagtcagcatttctagacttccacaaaattatgctgcatttggctggagcccggtgttcagtggtttccctgcccgaggtcgctgcagccccatctaccacatcttcatgtggacattgagattcacatgctggctcctgaagggtgctcagtctccttggtgattaaggtcctgcttgaactgctgccaactccatgtcagggaagtcgcttttggtgcctggctggtttgcccagagccaagctggggcaaggggcagccagccctggcttccaaggctcccgtactgtctgtgtccttgtataaggagctttgctcttggaattactgaaagtctgtggcccaagagagagacacaagtggccttaagtctttttgaagtgttatttcatccagggaaatgcctcgagccatagagcctgaaatcatctttgttggctcagaaaataccttagcttcactcagctggactgcattgaaggcgaggctgccccttggatcaagcagaaaacaagagaaagaaagaacgttccctttggggatagtctggaaagttgggatttgcaaataaaggctctggaagcattgctggtcctgaagctttggaggtgggcagagagagcttcaagaagactagatgcaaaccctggaaaggattaaggctcaactctggagaaacaggccacagcctctcagagcagctgttggctgtaaatagaggtagcaaggccgctcccaggcccctgtgagtgtgggcacctgtgcatgcaatgctccgactctgcagaggtgccaagtgcccctgctgggccagtcccagagagttaggaagtcaaggcctgcaactcctggttcttcctgtttggaccagttcttgtgccattggcaggatgagaggcagcagccaggcgggagctgtgtctagcagcacctgtagcccacgtgctgctaattagctggaaaactggcgaaggcagaacctttgctaccaggaatcttgacatgtggggtctgtctttgagaatttgtaaatgaacagtccaatatttcctctcggctcattttgcacatccatttttggggaaatgtgatttctctctctttttttttttttttttttgcctaaggcacaatctcaagaggtcctgagaccacgtacccatgatttttttcttgctctgtgatacccaataactccttcacctaagccctgttgttgattttgaagtgcttcctaggccagtgattttagcttctgccagctgcttttgccagtagattaacgtgtttttatttttcaaactccgtgtttcctaacgtggagtgtatgggtctaagagagcctgctgtcctccctgccttccaccttggagaggaggctggacgcatcagcagtggccagggcaggtcgcaaaatctcccagcctagagaccacacctgaaacggctgaagccagcttgcacaagggctgctgtccctctgcggcaggcagagctggtgggggcaggggtcacagagcagtcatagacaccatggaccagggcaggagaagggcagatggcacatgggcacaacagggccttgtccttagagcactggggggtcatggctgggaggggcatggcaggggctggcatccctgtagagccagaggggccacccagggcagtgacattccagatatgttgggctcacctcatccttgctgtgagactggagttccatggggacatgaagtcagtacaccgcagagctgctcagctgctctacctctcgctgacttttttgttgcacatatacattttctttcaattagcatttatttcagcttttatttaagctttttgacagtacatgtaaaatatatgattataaccatttaaaaataccttatgtacctggttttttttggaaactagatagaaatatatttatcttttacataaaagaagtgtgtagtggggtggtccagggctttgtggtggcttagtggccatcggggtcccaggctcttcccacctttctcttttgggtccacctcttggctcctggcttccttcctctggggcctgactgtccaggatggcagctggagctcctgctctgggcacggttggcatcagagcccactgctccccatccactctttaatccagatgctggtaatgtccctttccaaggcataactaagataagctggaaggttcttacgaggctttgctagaggccctgggaggtggggggaaaggcaagagggcagtgcccacccatagaccgggtcacatgacctggcatcagcgccgtggggtcctttgggcttcacctccctctcccctctgcccccacgtcatcccaccctcatcctcaccctcaccattcccatcccgtaccgtaatgtcccttgcaaggcctaactctgtgaggaatgaaaccacctcatccttgttccaataacatgagtgaccgaatttacaaacgagtgaatgtggacctctggaaacattacccagcttgtttttacttttcactttctctttctgcccctttcatttccgtaggagccctttacctagatgagaagtgtccccccgcctggggaatatatcagtcagaacaatcttcctgcagacatgcaccattagacccgagtgacggtggtgccatttaaacctcagagcaggtaaaaggtggtcctgaaacctgtctacccacagggtgctatggaatctgaatcacttcttttttcctagagccctggggtggggagctccctcaagtgttcacatgtgtgtggaatgaggaacacccatctccttggccctctccaccctgaagagttagttattaaaataattggcaagctcttgcaaatgtcagtcatccattgttcagaatggaatagcaataatacatccctggctgccctgggcttggccaggattactcactgaaggcctcagggttactggcacacactttcttttcctaataatcccatcccctcagctttcctaaggctagagtgaatttcgtgttcctttagtttacataagatggtgaacttggcaaaagctatcattaaacagaagctaagagaaagcctatgtcgtggaatccagaatgggtattgccattcactgctgtccacagaagctgtcttgaatttctttctgtgtcttttctttttttttctttaagactgttgtttaccagactgggctctgtggaacacaggtgtcctgggagatggttaatcattacaaaatattggtaacaatctaaagatgcatacataagagagtggtcaaataaaccattttccattca

SEQ ID NO: 191110 - DNA, 1046 bp, Homo sapiens
  Payload ID: 17753
  Gene Name: thymidine kinase 2, mitochondrial
  ENST ID: ENST00000417693
  CDS Start-End: 4-873
gaaatgcgaccgggtctctttaagggccaggcgccgggatccaggcggcgcccaacggctggactagcagtcgtccgcgccgactcgcacaagaaggaaccccgggcctctggatccgctcgcccggctatgctgctgtggccgctgcggggctgggccgcccgggcgctgcgctgctttgggccgggaagtcgcgggagcccggcctcaggccccgggccgcggagggtgcagcgccgggcctggcctcccgataaagaacaggaaaaagagaaaaaatcagtgatctgtgtcgagggcaatattgcaagtgggaagacgacatgcctggaattcttctccaacgcgacagacgtcgagggcctgatgtaccacgatgcctctcgctggggtcttacgctacagacttatgtgcagctcaccatgctggacaggcatactcgtcctcaggtgtcatctgtacggttgatggagaggtcgattcacagcgcaagatacatttttgtagaaaacctgtatagaagtgggaagatgccagaagtggactatgtagttctgtcggaatggtttgactggatcttgaggaacatggacgtgtctgttgatttgatagtttaccttcggaccaatcctgagacttgttaccagaggttaaagaagagatgcagggaagaggagaaggtcattccgctggaatacctggaagcaattcaccatctccatgaggagtggctcatcaaaggcagccttttccccatggcagcccctgttctggtgattgaggctgaccaccacatggagaggatgttagaactctttgaacaaaatcgggatcgaatattaactccagagaatcggaagcattgcccataggaggcaaaaggtctatggctcatgtctgaaaaatgcctgctgctgccaagttagctattgggagcaatctggaaaaacttgctcccaggagggctttgtgtctggccagcttgattttcctaatggtctcatctcctttgctagtgtctttgtcatgcgtctctggccctcgt

SEQ ID NO: 191111 - DNA, 3738 bp, Homo sapiens
  Payload ID: 17753
  Gene Name: thymidine kinase 2, mitochondrial
  ENST ID: ENST00000451102
  CDS Start-End: 226-1149
ggaataagtgacatcatgagtgtgtgccaggtgtctgattacagaaggtgttcaattaatctgcaatcattaattaacccttcagtcgctggtattatttgccatccatcctccgagtgttgccaagttatgggtgcgttctgccagcgtcctagcagtggtaaggcttctggctgccagcggcgaacctctcccttcgagtatttctcctcttgctgagatgaaatgcgaccgggtctctttaagggccaggcgccgggatccaggcggcgcccaacggctggactagcagtcgtccgcgccgactcgcacaagaaggaaccccgggcctctggatccgctcgcccggctatgctgctgtggccgctgcggggctgggccgcccgggcgctgcgctgctttgggccgggaagtcgcgggagcccggcctcaggccccgggccgcggagggtgcagcgccgggcctggcctcccgataaagaacaggaaaaagagaaaaaatcagtgatctgtgtcgagggcaatattgcaagtgggaagacgacatgcctggaattcttctccaacgcgacagacgtcgaggtgttaacggagcctgtgtccaagtggagaaatgtccgtggccacaatcctctgggcctgatgtaccacgatgcctctcgctggggtcttacgctacagacttatgtgcagctcaccatgctggacaggcatactcgtcctcaggtgtcatctgtacggttgatggagaggtcgattcacagcgcaagatacatttttgtagaaaacctgtatagaagtgggaagatgccagaagtggactatgtagttctgtcggaatggtttgactggatcttgaggaacatggacgtgtctgttgatttgatagtttaccttcggaccaatcctgagacttgttaccagaggttaaagaagagatgcagggaagaggagaaggtcattccgctggaatacctggaagcaattcaccatctccatgaggagtggctcatcaaaggcagccttttccccatggcagcccctgttctggtgattgaggctgaccaccacatggagaggatgttagaactctttgaacaaaatcgggatcgaatattaactccagagaatcggaagcattgcccataggaggcaaaaggtctatggctcatgtctgaaaaatgcctgctgctgccaagttagctattgggagcaatctggaaaaacttgctcccaggagggctttgtgtctggccagcttgattttcctaatggtctcatctcctttgctagtgtctttgtcatgcgtctctggccctcgtgggtaaatgacaaacgggaccaatgggtttgccaagccctttgctgttcgcagcctcacattcccccggtgcctctcccatggctttgtgctgctgagtcgctctcatgaagcccttagggagagcacctgttgtgtgcctgacaccacgctggagctgtgtaccaatcgtctcagccttcattaggaggccgaggtaggagtcttatatcccaggtgaggaatttgaagctcagaaaggttgaggggctccccagaggtcacacagcctgtgtgcagtggagctggcaccattcagactttcagccgactcagcaactttcccttgccctgggctgcctcctcctgagagctgttccccaccgccctgcctcttccggttggaggctctcatgtctctttggggagagctggcagtgtgcggagctgataacattttcccaatattgagcagttcccaaggacagtcagcatttctagacttccacaaaattatgctgcatttggctggagcccggtgttcagtggtttccctgcccgaggtcgctgcagccccatctaccacatcttcatgtggacattgagattcacatgctggctcctgaagggtgctcagtctccttggtgattaaggtcctgcttgaactgctgccaactccatgtcagggaagtcgcttttggtgcctggctggtttgcccagagccaagctggggcaaggggcagccagccctggcttccaaggctcccgtactgtctgtgtccttgtataaggagctttgctcttggaattactgaaagtctgtggcccaagagagagacacaagtggccttaagtctttttgaagtgttatttcatccagggaaatgcctcgagccatagagcctgaaatcatctttgttggctcagaaaataccttagcttcactcagctggactgcattgaaggcgaggctgccccttggatcaagcagaaaacaagagaaagaaagaacgttccctttggggatagtctggaaagttgggatttgcaaataaaggctctggaagcattgctggtcctgaagctttggaggtgggcagagagagcttcaagaagactagatgcaaaccctggaaaggattaaggctcaactctggagaaacaggccacagcctctcagagcagctgttggctgtaaatagaggtagcaaggccgctcccaggcccctgtgagtgtgggcacctgtgcatgcaatgctccgactctgcagaggtgccaagtgcccctgctgggccagtcccagagagttaggaagtcaaggcctgcaactcctggttcttcctgtttggaccagttcttgtgccattggcaggatgagaggcagcagccaggcgggagctgtgtctagcagcacctgtagcccacgtgctgctaattagctggaaaactggcgaaggcagaacctttgctaccaggaatcttgacatgtggggtctgtctttgagaatttgtaaatgaacagtccaatatttcctctcggctcattttgcacatccatttttggggaaatgtgatttctctctctttttttttttttttttttgcctaaggcacaatctcaagaggtcctgagaccacgtacccatgatttttttcttgctctgtgatacccaataactccttcacctaagccctgttgttgattttgaagtgcttcctaggccagtgattttagcttctgccagctgcttttgccagtagattaacgtgtttttatttttcaaactccgtgtttcctaacgtggagtgtatgggtctaagagagcctgctgtcctccctgccttccaccttggagaggaggctggacgcatcagcagtggccagggcaggtcgcaaaatctcccagcctagagaccacacctgaaacggctgaagccagcttgcacaagggctgctgtccctctgcggcaggcagagctggtgggggcaggggtcacagagcagtcatagacaccatggaccagggcaggagaagggcagatggcacatgggcacaacagggccttgtccttagagcactggggggtcatggctgggaggggcatggcaggggctggcatccctgtagagccagaggggccacccagggcagtgacattccagatatgttgggctcacctcatccttgctgtgagactggagttccatggggacatgaagtcagtacaccgcagagctgctcagctgctctacctctcgctgacttttttgttgcacatatacattttctttcaattagcatttatttcagcttttatttaagctttttgacagtacatgtaaaatatatgattataaccatttaaaaataccttatgtacctggttttttttggaaactagatagaaatatatttatcttttacataaaagaa

SEQ ID NO: 191112 - DNA, 2687 bp, Homo sapiens
  Payload ID: 17753
  Gene Name: thymidine kinase 2, mitochondrial
  Uniprot ID: O00142
  ENST ID: ENST00000527800
  CDS Start-End: 957-1463
gggcggccatcggccgttacccgggcgcgagaccgcagcgagcgctgggggcgctcggctttggttctgggatggagagagggcctttaaagagcaggacggacacgctctgaacattccggcccaaactcggtcccccgacccatttcctgtcccgattctttcgaccttgggggcgatggggactgggagctgccttaagccgattctgctcacactctggtgccagcgtgggggaggggggttacgcccccggcgctctcctgccctccctgggagtggggacccacacagaaacgggtcactgttacacccgggttctggtgtccgccatatggctgttgagagacgcctcagaaccacctgtgggacggatgggcagcgatgcccgccctgggcctagaggaacacctgggtcccaggcccaaaaccacgtccgccgcccactcttccccgtgcaccgcgagtggaggctgttctgcctttccacttgcttaacatccagtctgtgaagatctaaataaataacgtggaaaatgcaaagtataatgtactaagtgaaagaactcgagcacactgggggtccacgaagctgcagctgcagcccagggtggcacatcggcgagacggtggtgcgcgcctccaatctcggagggcgcccaaaatggaaaatgtttttaggccagggagtgagcataaacattagtgtttttgtggtcatgtagcaaattagggcagaggagagttatttaaaagtgagtttaaaaactgatttcctttcttttgtagataaagaacaggaaaaagagaaaaaatcagtgatctgtgtcgagggcaatattgcaagtgggaagacgacatgcctggaattcttctccaacgcgacagacgtcgaggtgttaacggagcctgtgtccaagtggagaaatgtccgtggccacaatcctctgggcctgatgtaccacgatgcctctcgctggggtcttacgctacagacttatgtgcagctcaccatgctggacaggcatactcgtcctcaggtgtcatctgtacggttgatggagaggtcgattcacagcgcaagatacatttttgtagaaaacctgtatagaagtgggaagatgccagaagtggactatgtagttctgtcggaatggtttgactggatcttgaggaacatggacgtgtctgttgatttgatagtttaccttcggaccaatcctgagacttgttaccagaggttaaagaagagatgcagggaagaggagaaggtcattccgctggaatacctggaagcaattcaccatctccatgaggagtggctcatcaaaggcagccttttccccatggcagcccctgttctggtgattgaggctgaccaccacatggagaggatgttagaactctttgaacaaaatcgggatcgaatattaactccagagaatcggaagcattgcccataggaggcaaaaggtctatggctcatgtctgaaaaatgcctgctgctgccaagttagctattgggagcaatctggaaaaacttgctcccaggagggctttgtgtctggccagcttgattttcctaatggtctcatctcctttgctagtgtctttgtcatgcgtctctggccctcgtgggtaaatgacaaacgggaccaatgggtttgccaagccctttgctgttcgcagcctcacattcccccggtgcctctcccatggctttgtgctgctgagtcgctctcatgaagcccttagggagagcacctgttgtgtgcctgacaccacgctggagctgtgtaccaatcgtctcagccttcattaggaggccgaggtaggagtcttatatcccaggtgaggaatttgaagctcagaaaggttgaggggctccccagaggtcacacagcctgtgtgcagtggagctggcaccattcagactttcagccgactcagcaactttcccttgccctgggctgcctcctcctgagagctgttccccaccgccctgcctcttccggttggaggctctcatgtctctttggggagagctggcagtgtgcggagctgataacattttcccaatattgagcagttcccaaggacagtcagcatttctagacttccacaaaattatgctgcatttggctggagcccggtgttcagtggtttccctgcccgaggtcgctgcagccccatctaccacatcttcatgtggacattgagattcacatgctggctcctgaagggtgctcagtctccttggtgattaaggtcctgcttgaactgctgccaactccatgtcagggaagtcgcttttggtgcctggctggtttgcccagagccaagctggggcaaggggcagccagccctggcttccaaggctcccgtactgtctgtgtccttgtataaggagctttgctcttggaattactgaaagtctgtggcccaagagagagacacaagtggccttaagtctttttgaagtgttatttcatccagggaaatgcctcgagccatagagcctgaaatcatctttgttggctcagaaaataccttagcttcactcagctggactgcattgaaggcgaggctgccccttggatcaagcagaaaacaagagaaagaaagaacgttccctttggggatagtctggaaagttgggatttgcaaataaaggctctggaagcatt

SEQ ID NO: 191113 - DNA, 1178 bp, Homo sapiens
  Payload ID: 17753
  Gene Name: thymidine kinase 2, mitochondrial
  Uniprot ID: O00142
  ENST ID: ENST00000525974
  CDS Start-End: 417-923
tttcctccccggctgcggctgggacgggggcggccatcggccgttacccgggcgcgagaccgcagcgagcgctgggggcgctcggctttggttctgggatggagagagggcctttaaagagcaggacggacacgctctgaacattccggcccaaactcggtcccccgacccatttcctgtcccgattctttcgaccttgggggcgatggggactgggagctgccttaagccgattctgctcacactctgataaagaacaggaaaaagagaaaaaatcagtgatctgtgtcgagggcaatattgcaagtgggaagacgacatgcctggaattcttctccaacgcgacagacgtcgaggtgttaacggagcctgtgtccaagtggagaaatgtccgtggccacaatcctctgggcctgatgtaccacgatgcctctcgctggggtcttacgctacagacttatgtgcagctcaccatgctggacaggcatactcgtcctcaggtgtcatctgtacggttgatggagaggtcgattcacagcgcaagatacatttttgtagaaaacctgtatagaagtgggaagatgccagaagtggactatgtagttctgtcggaatggtttgactggatcttgaggaacatggacgtgtctgttgatttgatagtttaccttcggaccaatcctgagacttgttaccagaggttaaagaagagatgcagggaagaggagaaggtcattccgctggaatacctggaagcaattcaccatctccatgaggagtggctcatcaaaggcagccttttccccatggcagcccctgttctggtgattgaggctgaccaccacatggagaggatgttagaactctttgaacaaaatcgggatcgaatattaactccagagaatcggaagcattgcccataggaggcaaaaggtctatggctcatgtctgaaaaatgcctgctgctgccaagttagctattgggagcaatctggaaaaacttgctcccaggagggctttgtgtctggccagcttgattttcctaatggtctcatctcctttgctagtgtctttgtcatgcgtctctggccctcgtgggtaaatgacaaacgggaccaatgggtttgccaagccctttgctgttcgcagcctcacattcccccggtgcctctcccatg

SEQ ID NO: 191114 - DNA, 1937 bp, Homo sapiens
  Payload ID: 17753
  Gene Name: thymidine kinase 2, mitochondrial
  Uniprot ID: O00142
  ENST ID: ENST00000527284
  CDS Start-End: 9-713
gccaagttatgggtgcgttctgccagcgtcctagcagtgataaagaacaggaaaaagagaaaaaatcagtgatctgtgtcgagggcaatattgcaagtgggaagacgacatgcctggaattcttctccaacgcgacagacgtcgaggtgttaacggagcctgtgtccaagtggagaaatgtccgtggccacaatcctctgggcctgatgtaccacgatgcctctcgctggggtcttacgctacagacttatgtgcagctcaccatgctggacaggcatactcgtcctcaggtgtcatctgtacggttgatggagaggtcgattcacagcgcaagatacatttttgtagaaaacctgtatagaagtgggaagatgccagaagtggactatgtagttctgtcggaatggtttgactggatcttgaggaacatggacgtgtctgttgatttgatagtttaccttcggaccaatcctgagacttgttaccagaggttaaagaagagatgcagggaagaggagaaggtcattccgctggaatacctggaagcaattcaccatctccatgaggagtggctcatcaaaggcagccttttccccatggcagcccctgttctggtgattgaggctgaccaccacatggagaggatgttagaactctttgaacaaaatcgggatcgaatattaactccagagaatcggaagcattgcccataggaggcaaaaggtctatggctcatgtctgaaaaatgcctgctgctgccaagttagctattgggagcaatctggaaaaacttgctcccaggagggctttgtgtctggccagcttgattttcctaatggtctcatctcctttgctagtgtctttgtcatgcgtctctggccctcgtgggtaaatgacaaacgggaccaatgggtttgccaagccctttgctgttcgcagcctcacattcccccggtgcctctcccatggctttgtgctgctgagtcgctctcatgaagcccttagggagagcacctgttgtgtgcctgacaccacgctggagctgtgtaccaatcgtctcagccttcattaggaggccgaggtaggagtcttatatcccaggtgaggaatttgaagctcagaaaggttgaggggctccccagaggtcacacagcctgtgtgcagtggagctggcaccattcagactttcagccgactcagcaactttcccttgccctgggctgcctcctcctgagagctgttccccaccgccctgcctcttccggttggaggctctcatgtctctttggggagagctggcagtgtgcggagctgataacattttcccaatattgagcagttcccaaggacagtcagcatttctagacttccacaaaattatgctgcatttggctggagcccggtgttcagtggtttccctgcccgaggtcgctgcagccccatctaccacatcttcatgtggacattgagattcacatgctggctcctgaagggtgctcagtctccttggtgattaaggtcctgcttgaactgctgccaactccatgtcagggaagtcgcttttggtgcctggctggtttgcccagagccaagctggggcaaggggcagccagccctggcttccaaggctcccgtactgtctgtgtccttgtataaggagctttgctcttggaattactgaaagtctgtggcccaagagagagacacaagtggccttaagtctttttgaagtgttatttcatccagggaaatgcctcgagccatagagcctgaaatcatctttgttggctcagaaaataccttagcttcactcagctggactgcattgaaggcgaggctgccccttggatcaagcagaaaacaagagaaagaaagaacgttccctttggggatagtctggaaagttgggatttgcaaataaaggctctggaagcatt

SEQ ID NO: 191115 - DNA, 1120 bp, Homo sapiens
  Payload ID: 17753
  Gene Name: thymidine kinase 2, mitochondrial
  Uniprot ID: O00142
  ENST ID: ENST00000545043
  CDS Start-End: 62-784
agtcgtccgcgccgactcgcacaagaaggaaccccgggcctctggatccgctcgcccggctatgctgctgtggccgctgcggggctgggccgcccgggcgctgcgctgctttgggccgggaagtcgcgggagcccggcctcaggccccgggccgcggagggtgcagcgccgggcctggcctcccgataaagaacaggaaaaagagaaaaaatcagtggtgttaacggagcctgtgtccaagtggagaaatgtccgtggccacaatcctctgggcctgatgtaccacgatgcctctcgctggggtcttacgctacagacttatgtgcagctcaccatgctggacaggcatactcgtcctcaggtgtcatctgtacggttgatggagaggtcgattcacagcgcaagatacatttttgtagaaaacctgtatagaagtgggaagatgccagaagtggactatgtagttctgtcggaatggtttgactggatcttgaggaacatggacgtgtctgttgatttgatagtttaccttcggaccaatcctgagacttgttaccagaggttaaagaagagatgcagggaagaggagaaggtcattccgctggaatacctggaagcaattcaccatctccatgaggagtggctcatcaaaggcagccttttccccatggcagcccctgttctggtgattgaggctgaccaccacatggagaggatgttagaactctttgaacaaaatcgggatcgaatattaactccagagaatcggaagcattgcccataggaggcaaaaggtctatggctcatgtctgaaaaatgcctgctgctgccaagttagctattgggagcaatctggaaaaacttgctcccaggagggctttgtgtctggccagcttgattttcctaatggtctcatctcctttgctagtgtctttgtcatgcgtctctggccctcgtgggtaaatgacaaacgggaccaatgggtttgccaagccctttgctgttcgcagcctcacattcccccggtgcctctcccatggctttgtgctgctgagtcgctctcatgaagcccttagggagagcacctgttgtgtgcctgacaccacgctggagctgtgta

SEQ ID NO: 191116 - DNA, 3441 bp, Homo sapiens
  Payload ID: 17753
  Gene Name: thymidine kinase 2, mitochondrial
  Uniprot ID: O00142
  ENST ID: ENST00000544898
  CDS Start-End: 55-852
cgcgccgactcgcacaagaaggaaccccgggcctctggatccgctcgcccggctatgctgctgtggccgctgcggggctgggccgcccgggcgctgcgctgctttgggccgggaagtcgcgggagcccggcctcaggccccgggccgcggagggtgcagcgccgggcctggcctcccgataaagaacaggaaaaagagaaaaaatcagtgatctgtgtcgagggcaatattgcaagtgggaagacgacatgcctggaattcttctccaacgcgacagacgtcgaggtgttaacggagcctgtgtccaagtggagaaatgtccgtggccacaatcctctgggcctgatgtaccacgatgcctctcgctggggtcttacgctacagacttatgtgcagctcaccatgctggacaggcatactcgtcctcaggtgtcatctgtacggttgatggagaggtcgattcacagcgcaagatacatttttgtagaaaacctgtatagaagtgggaagatgccagaagtggactatgtagttctgtcggaatggtttgactggatcttgaggaacatggacgtgtctgttgatttgatagtttaccttcggaccaatcctgagacttgttaccagaggttaaagaagagatgcagggaagaggagaaggtcattccgctggaatacctggaagcaattcaccatctccatgaggagtggctcatcaaaggcagccttttccccatggcagcccctgttctggtgattgaggctgaccaccacatggagaggatgttagaactctttgaacaaaatcgggatcgaatattaactccagagaatcggaagcattgcccataggaggcaaaaggtctatggctcatgtctgaaaaatgcctgctgctgccaagttagctattgggagcaatctggaaaaacttgctcccaggagggctttgtgtctggccagcttgattttcctaatggtctcatctcctttgctagtgtctttgtcatgcgtctctggccctcgtgggtaaatgacaaacgggaccaatgggtttgccaagccctttgctgttcgcagcctcacattcccccggtgcctctcccatggctttgtgctgctgagtcgctctcatgaagcccttagggagagcacctgttgtgtgcctgacaccacgctggagctgtgtaccaatcgtctcagccttcattaggaggccgaggtaggagtcttatatcccaggtgaggaatttgaagctcagaaaggttgaggggctccccagaggtcacacagcctgtgtgcagtggagctggcaccattcagactttcagccgactcagcaactttcccttgccctgggctgcctcctcctgagagctgttccccaccgccctgcctcttccggttggaggctctcatgtctctttggggagagctggcagtgtgcggagctgataacattttcccaatattgagcagttcccaaggacagtcagcatttctagacttccacaaaattatgctgcatttggctggagcccggtgttcagtggtttccctgcccgaggtcgctgcagccccatctaccacatcttcatgtggacattgagattcacatgctggctcctgaagggtgctcagtctccttggtgattaaggtcctgcttgaactgctgccaactccatgtcagggaagtcgcttttggtgcctggctggtttgcccagagccaagctggggcaaggggcagccagccctggcttccaaggctcccgtactgtctgtgtccttgtataaggagctttgctcttggaattactgaaagtctgtggcccaagagagagacacaagtggccttaagtctttttgaagtgttatttcatccagggaaatgcctcgagccatagagcctgaaatcatctttgttggctcagaaaataccttagcttcactcagctggactgcattgaaggcgaggctgccccttggatcaagcagaaaacaagagaaagaaagaacgttccctttggggatagtctggaaagttgggatttgcaaataaaggctctggaagcattgctggtcctgaagctttggaggtgggcagagagagcttcaagaagactagatgcaaaccctggaaaggattaaggctcaactctggagaaacaggccacagcctctcagagcagctgttggctgtaaatagaggtagcaaggccgctcccaggcccctgtgagtgtgggcacctgtgcatgcaatgctccgactctgcagaggtgccaagtgcccctgctgggccagtcccagagagttaggaagtcaaggcctgcaactcctggttcttcctgtttggaccagttcttgtgccattggcaggatgagaggcagcagccaggcgggagctgtgtctagcagcacctgtagcccacgtgctgctaattagctggaaaactggcgaaggcagaacctttgctaccaggaatcttgacatgtggggtctgtctttgagaatttgtaaatgaacagtccaatatttcctctcggctcattttgcacatccatttttggggaaatgtgatttctctctctttttttttttttttttttgcctaaggcacaatctcaagaggtcctgagaccacgtacccatgatttttttcttgctctgtgatacccaataactccttcacctaagccctgttgttgattttgaagtgcttcctaggccagtgattttagcttctgccagctgcttttgccagtagattaacgtgtttttatttttcaaactccgtgtttcctaacgtggagtgtatgggtctaagagagcctgctgtcctccctgccttccaccttggagaggaggctggacgcatcagcagtggccagggcaggtcgcaaaatctcccagcctagagaccacacctgaaacggctgaagccagcttgcacaagggctgctgtccctctgcggcaggcagagctggtgggggcaggggtcacagagcagtcatagacaccatggaccagggcaggagaagggcagatggcacatgggcacaacagggccttgtccttagagcactggggggtcatggctgggaggggcatggcaggggctggcatccctgtagagccagaggggccacccagggcagtgacattccagatatgttgggctcacctcatccttgctgtgagactggagttccatggggacatgaagtcagtacaccgcagagctgctcagctgctctacctctcgctgacttttttgttgcacatatacattttctttcaattagcatttatttcagcttttatttaagctttttgacagtacatgtaaaatatatgattataaccatttaaaaataccttatgtacctggttttttttggaaactagatagaaatatatttatcttttacataaaagaa

SEQ ID NO: 191117 - DNA, 1156 bp, Homo sapiens
  Payload ID: 17753
  Gene Name: thymidine kinase 2, mitochondrial
  ENST ID: ENST00000564917
  CDS Start-End: 46-894
tcgcacaagaaggaaccccgggcctctggatccgctcgcccggctatgctgctgtggccgctgcggggctgggccgcccgggcgctgcgctgctttgggccgggaagtcgcgggagcccggcctcaggccccgggccgcggagggtgcagcgccgggcctggcctcccgataaagaacaggaaaaagagaaaaaatcagtgatctgtgtcgagggcaatattgcaagtgggaagacgacatgcctggaattcttctccaacgcgacagacgtcgaggtgttaacggagcctgtgtccaagtggagaaatgtccgtggccacaatcctctgggcctgatgtaccacgatgcctctcgctggggtcttacgctacagacttatgtgcagctcaccatgctggacaggcatactcgtcctcaggtgtcatctgtacggttgatggagaggtcgattcacagcgcaagatacatttttgtagaaaacctgtatagaagtgggaagatgccagaagtggactatgtagttctgtcggaatggtttgactggatcttgaggaacatggacgtgtctgttgatttgatagtttaccttcggaccaatcctgagacttgttaccagaggttaaagaagagatgcagggaagaggagaaggtcattccgctggtggggtctgctctgtccactcccgacagactgcttgtgtttccctggcaggaatacctggaagcaattcaccatctccatgaggagtggctcatcaaaggcagccttttccccatggcagcccctgttctggtgattgaggctgaccaccacatggagaggatgttagaactctttgaacaaaatcgggatcgaatattaactccagagaatcggaagcattgcccataggaggcaaaaggtctatggctcatgtctgaaaaatgcctgctgctgccaagttagctattgggagcaatctggaaaaacttgctcccaggagggctttgtgtctggccagcttgattttcctaatggtctcatctcctttgctagtgtctttgtcatgcgtctctggccctcgtgggtaaatgacaaacgggaccaatgggtttgccaagccctttgctgttcgcagcctcacattcccccggtgcctctcccatggctttgt

SEQ ID NO: 191118 - DNA, 2266 bp, Homo sapiens
  Payload ID: 17753
  Gene Name: thymidine kinase 2, mitochondrial
  ENST ID: ENST00000567357
  CDS Start-End: 27-389
agtatttctcctcttgctgagatgaaatgcgaccgggtctctttaagggccaggcgccgggatccaggcggcgcccaacggctggactagcagtcgtccgcgccgactcgcacaagaaggaaccccgggcctctggatccgctcgcccggctatgctgctgtggccgctgcggggctgggccgcccgggcgctgcgctgctttgggccgggaagtcgcgggagcccggcctcaggccccgggccgcggagggtgcagcgccgggcctggcctcccgataaagaacaggaaaaagagaaaaaatcagtgagacggcgtcttgctgtgttgcccaggctggcctccaactcctgggctcaagtgatcctctggcatcagcctcctgagtagctgtgatgacaagtatctgtgtcgagggcaatattgcaagtgggaagacgacatgcctggaattcttctccaacgcgacagacgtcgaggtgttaacggagcctgtgtccaagtggagaaatgtccgtggccacaatcctctgggcctgatgtaccacgatgcctctcgctggggtcttacgctacagacttatgtgcagctcaccatgctggacaggcatactcgtcctcaggtgtcatctgtacggttgatggagaggtcgattcacagcgcaagatacatttttgtagaaaacctgtatagaagtgggaagatgccagaagtggactatgtagttctgtcggaatggtttgactggatcttgaggaacatggacgtgtctgttgatttgatagtttaccttcggaccaatcctgagacttgttaccagaggttaaagaagagatgcagggaagaggagaaggtcattccgctggaatacctggaagcaattcaccatctccatgaggagtggctcatcaaaggcagccttttccccatggcagcccctgttctggtgattgaggctgaccaccacatggagaggatgttagaactctttgaacaaaatcgggatcgaatattaactccagagaatcggaagcattgcccataggaggcaaaaggtctatggctcatgtctgaaaaatgcctgctgctgccaagttagctattgggagcaatctggaaaaacttgctcccaggagggctttgtgtctggccagcttgattttcctaatggtctcatctcctttgctagtgtctttgtcatgcgtctctggccctcgtgggtaaatgacaaacgggaccaatgggtttgccaagccctttgctgttcgcagcctcacattcccccggtgcctctcccatggctttgtgctgctgagtcgctctcatgaagcccttagggagagcacctgttgtgtgcctgacaccacgctggagctgtgtaccaatcgtctcagccttcattaggaggccgaggtaggagtcttatatcccaggtgaggaatttgaagctcagaaaggttgaggggctccccagaggtcacacagcctgtgtgcagtggagctggcaccattcagactttcagccgactcagcaactttcccttgccctgggctgcctcctcctgagagctgttccccaccgccctgcctcttccggttggaggctctcatgtctctttggggagagctggcagtgtgcggagctgataacattttcccaatattgagcagttcccaaggacagtcagcatttctagacttccacaaaattatgctgcatttggctggagcccggtgttcagtggtttccctgcccgaggtcgctgcagccccatctaccacatcttcatgtggacattgagattcacatgctggctcctgaagggtgctcagtctccttggtgattaaggtcctgcttgaactgctgccaactccatgtcagggaagtcgcttttggtgcctggctggtttgcccagagccaagctggggcaaggggcagccagccctggcttccaaggctcccgtactgtctgtgtccttgtataaggagctttgctcttggaattactgaaagtctgtggcccaagagagagacacaagtggccttaagtctttttgaagtgttatttcatccagggaaatgcctcgagccatagagcctgaaatcatctttgttggctcagaaaataccttagcttcactcagctggactgcattgaaggcgaggctgccccttggatcaagcagaaaacaagagaaagaaagaacgttccctttggggatagtctggaaagttgggatttgcaaataaaggctctggaagc

SEQ ID NO: 191119 - DNA, 753 bp, Homo sapiens
  Payload ID: 17753
  Gene Name: thymidine kinase 2, mitochondrial
  ENST ID: ENST00000563478
  CDS Start-End: 363-753
cagttacctccaacagcttcatcacaaatcactcacaaaaatggccttaatcctgaagtttatttacggagagcacacttgctaggtgtgtggcagatatacaggaagcacaagatgaggcagcagatctagaggcaaatgacttccttctccctgcctagtggtgactgccagcatcacgccctcccgggagagataaagaacaggaaaaagagaaaaaatcagtgatctgtgtcgagggcaatattgcaagtgggaagacgacatgcctggaattcttctccaacgcgacagacgtcgaggtgttaacggagcctgtgtccaagtggagaaatgtccgtggccacaatcctctgggcctgatgtaccacgatgcctctcgctggggtcttacgctacagacttatgtgcagctcaccatgctggacaggcatactcgtcctcaggtgtcatctgtacggttgatggagaggtcgattcacagcgcaagatacatttttgtagaaaacctgtatagaagtgggaagatgccagaagtggactatgtagttctgtcggaatggtttgactggatcttgaggaacatggacgtgtctgttgatttgatagtttaccttcggaccaatcctgagacttgttaccagaggttaaagaagagatgcagggaagaggagaaggtcattccgctggaatacctggaagcaattcaccatctccatgaggagtggctcatcaaaggcagccttttcccca

SEQ ID NO: 191120 - DNA, 822 bp, Homo sapiens
  Payload ID: 17753
  Gene Name: thymidine kinase 2, mitochondrial
  ENST ID: ENST00000561905
  CDS Start-End: 1-68
atgaggagtggctcatcaaaggcagccttttccccatggcagcccctgttctggagccctttacctagatgagaagtgtccccccgcctggggaatatatcagtcagaacaatcttcctgcagacatgcaccattagacccgagtgacggtggtgccatttaaacctcagagcaggtaaaaggtggtcctgaaacctgtctacccacagggtgctatggaatctgaatcacttcttttttcctagagccctggggtggggagctccctcaagtgttcacatgtgtgtggaatgaggaacacccatctccttggccctctccaccctgaagagttagttattaaaataattggcaagctcttgcaaatgtcagtcatccattgttcagaatggaatagcaataatacatccctggctgccctgggcttggccaggattactcactgaaggcctcagggttactggcacacactttcttttcctaataatcccatcccctcagctttcctaaggctagagtgaatttcgtgttcctttagtttacataagatggtgaacttggcaaaagctatcattaaacagaagctaagagaaagcctatgtcgtggaatccagaatgggtattgccattcactgctgtccacagaagctgtcttgaatttctttctgtgtcttttctttttttttctttaagactgttgtttaccagactgggctctgtggaacacaggtgtcctgggagatggttaatcattacaaaatattggtaacaatctaaagatgcatacataagagagtggtcaaataaaccattttccattca

SEQ ID NO: 191121 - DNA, 553 bp, Homo sapiens
  Payload ID: 17753
  Gene Name: thymidine kinase 2, mitochondrial
  ENST ID: ENST00000562484
  CDS Start-End: 288-553
gctctcgcgcatgcgccccaacgggatcccgcggccgtccgctctggcttgtgctgtctttcagttatcgcgtagcacattagcggacctagagctgggcacatattagcggacctagagataaagaacaggaaaaagagaaaaaatcagtgatctgtgtcgagggcaatattgcaagtgggaagacgacatgcctggaattcttctccaacgcgacagacgtcgaggtgttaacggagcctgtgtccaagtggagaaatgtccgtggccacaatcctctgggcctgatgtaccacgatgcctctcgctggggtcttacgctacagacttatgtgcagctcaccatgctggacaggcatactcgtcctcaggtgtcatctgtacggttgatggagaggtcgattcacagcgcaagatacatttttgtagaaaacctgtatagaagtgggaagatgccagaagtggactatgtagttctgtcggaatggtttgactggatcttgaggaacatggacgtgtctgttgatttgatagtttaccttcggaccaatcc

SEQ ID NO: 191122 - DNA, 882 bp, Homo sapiens
  Payload ID: 17753
  Gene Name: thymidine kinase 2, mitochondrial
  Uniprot ID: O00142
  ENST ID: ENST00000563369
  CDS Start-End: 362-868
gcccgagcccgaagcgcctcttccgaggcgcgggatttcctccccggctgcggctgggacgggggcggccatcggccgttacccgggcgcgagaccgcagcgagcgctgggggcgctcggctttggttctgggatggagagagggcctttaaagagcaggacggacacgctctgaacattccggcccaaactcgataaagaacaggaaaaagagaaaaaatcagtgatctgtgtcgagggcaatattgcaagtgggaagacgacatgcctggaattcttctccaacgcgacagacgtcgaggtgttaacggagcctgtgtccaagtggagaaatgtccgtggccacaatcctctgggcctgatgtaccacgatgcctctcgctggggtcttacgctacagacttatgtgcagctcaccatgctggacaggcatactcgtcctcaggtgtcatctgtacggttgatggagaggtcgattcacagcgcaagatacatttttgtagaaaacctgtatagaagtgggaagatgccagaagtggactatgtagttctgtcggaatggtttgactggatcttgaggaacatggacgtgtctgttgatttgatagtttaccttcggaccaatcctgagacttgttaccagaggttaaagaagagatgcagggaagaggagaaggtcattccgctggaatacctggaagcaattcaccatctccatgaggagtggctcatcaaaggcagccttttccccatggcagcccctgttctggtgattgaggctgaccaccacatggagaggatgttagaactctttgaacaaaatcgggatcgaatattaactccagagaatcggaagcattgcccataggaggcaaaaggtct

SEQ ID NO: 191123 - DNA, 749 bp, Homo sapiens
  Payload ID: 17753
  Gene Name: thymidine kinase 2, mitochondrial
  ENST ID: ENST00000569718
  CDS Start-End: 1-428
gccagcgtcctagcagtgataaagaacaggaaaaagagaaaaaatcagtgatctgtgtcgagggcaatattgcaagtgggaagacgacatgcctggaattcttctccaacgcgacagacgtcgaggtgttaacggagcctgtgtccaagtggagaaatgtccgtggccacaatcctctgggcctgatgtaccacgatgcctctcgctggggtcttacgctacagacttatgtgcagctcaccatgctggacaggcatactcgtcctcaggtgtcatctgtacggttgatggagaggtcgattcacagcgcaagatacatttttgtagaaaacctgtatagaaggaatacctggaagcaattcaccatctccatgaggagtggctcatcaaaggcagccttttccccatggcagcccctgttctggtgattgaggctgaccaccacatggagaggatgttagaactctttgaacaaaatcgggatcgaatattaactccagagaatcggaagcattgcccataggaggcaaaaggtctatggctcatgtctgaaaaatgcctgctgctgccaagttagctattgggagcaatctggaaaaacttgctcccaggagggctttgtgtctggccagcttgattttcctaatggtctcatctcctttgctagtgtctttgtcatgcgtctctggccctcgtgggtaaatgacaaacgggaccaatgggtttgccaagccctttgctgttcgcag

SEQ ID NO: 191124 - DNA, 5060 bp, Homo sapiens
  Payload ID: 17753
  Gene Name: thymidine kinase 2, mitochondrial
  Uniprot ID: O00142
  ENST ID: ENST00000620035
  CDS Start-End: 352-1095
ggaataagtgacatcatgagtgtgtgccaggtgtctgattacagaaggtgttcaattaatctgcaatcattaattaacccttcagtcgctggtattatttgccatccatcctccgagtgttgccaagttatgggtgcgttctgccagcgtcctagcagtggtaaggcttctggctgccagcggcgaacctctcccttcgagtatttctcctcttgctgagatgaaatgcgaccgggtctctttaagggccaggcgccgggatccaggcggcgcccaacggctggactagcagtcgtccgcgccgactcgcacaagaaggaaccccgggcctctggatccgctcgcccggctatgctgctgtggccgctgcggggctgggccgcccgggcgctgcgctgctttgggccgggaagtcgcgggagcccggcctcaggccccgggccgcggagggtgcagcgccgggcctggcctcccgataaagaacaggaaaaagagaaaaaatcagtgatctgtgtcgagggcaatattgcaagtgggaagacgacatgcctggaattcttctccaacgcgacagacgtcgagggcctgatgtaccacgatgcctctcgctggggtcttacgctacagacttatgtgcagctcaccatgctggacaggcatactcgtcctcaggtgtcatctgtacggttgatggagaggtcgattcacagcgcaagatacatttttgtagaaaacctgtatagaagtgggaagatgccagaagtggactatgtagttctgtcggaatggtttgactggatcttgaggaacatggacgtgtctgttgatttgatagtttaccttcggaccaatcctgagacttgttaccagaggttaaagaagagatgcagggaagaggagaaggtcattccgctggaatacctggaagcaattcaccatctccatgaggagtggctcatcaaaggcagccttttccccatggcagcccctgttctggtgattgaggctgaccaccacatggagaggatgttagaactctttgaacaaaatcgggatcgaatattaactccagagaatcggaagcattgcccataggaggcaaaaggtctatggctcatgtctgaaaaatgcctgctgctgccaagttagctattgggagcaatctggaaaaacttgctcccaggagggctttgtgtctggccagcttgattttcctaatggtctcatctcctttgctagtgtctttgtcatgcgtctctggccctcgtgggtaaatgacaaacgggaccaatgggtttgccaagccctttgctgttcgcagcctcacattcccccggtgcctctcccatggctttgtgctgctgagtcgctctcatgaagcccttagggagagcacctgttgtgtgcctgacaccacgctggagctgtgtaccaatcgtctcagccttcattaggaggccgaggtaggagtcttatatcccaggtgaggaatttgaagctcagaaaggttgaggggctccccagaggtcacacagcctgtgtgcagtggagctggcaccattcagactttcagccgactcagcaactttcccttgccctgggctgcctcctcctgagagctgttccccaccgccctgcctcttccggttggaggctctcatgtctctttggggagagctggcagtgtgcggagctgataacattttcccaatattgagcagttcccaaggacagtcagcatttctagacttccacaaaattatgctgcatttggctggagcccggtgttcagtggtttccctgcccgaggtcgctgcagccccatctaccacatcttcatgtggacattgagattcacatgctggctcctgaagggtgctcagtctccttggtgattaaggtcctgcttgaactgctgccaactccatgtcagggaagtcgcttttggtgcctggctggtttgcccagagccaagctggggcaaggggcagccagccctggcttccaaggctcccgtactgtctgtgtccttgtataaggagctttgctcttggaattactgaaagtctgtggcccaagagagagacacaagtggccttaagtctttttgaagtgttatttcatccagggaaatgcctcgagccatagagcctgaaatcatctttgttggctcagaaaataccttagcttcactcagctggactgcattgaaggcgaggctgccccttggatcaagcagaaaacaagagaaagaaagaacgttccctttggggatagtctggaaagttgggatttgcaaataaaggctctggaagcattgctggtcctgaagctttggaggtgggcagagagagcttcaagaagactagatgcaaaccctggaaaggattaaggctcaactctggagaaacaggccacagcctctcagagcagctgttggctgtaaatagaggtagcaaggccgctcccaggcccctgtgagtgtgggcacctgtgcatgcaatgctccgactctgcagaggtgccaagtgcccctgctgggccagtcccagagagttaggaagtcaaggcctgcaactcctggttcttcctgtttggaccagttcttgtgccattggcaggatgagaggcagcagccaggcgggagctgtgtctagcagcacctgtagcccacgtgctgctaattagctggaaaactggcgaaggcagaacctttgctaccaggaatcttgacatgtggggtctgtctttgagaatttgtaaatgaacagtccaatatttcctctcggctcattttgcacatccatttttggggaaatgtgatttctctctctttttttttttttttttttgcctaaggcacaatctcaagaggtcctgagaccacgtacccatgatttttttcttgctctgtgatacccaataactccttcacctaagccctgttgttgattttgaagtgcttcctaggccagtgattttagcttctgccagctgcttttgccagtagattaacgtgtttttatttttcaaactccgtgtttcctaacgtggagtgtatgggtctaagagagcctgctgtcctccctgccttccaccttggagaggaggctggacgcatcagcagtggccagggcaggtcgcaaaatctcccagcctagagaccacacctgaaacggctgaagccagcttgcacaagggctgctgtccctctgcggcaggcagagctggtgggggcaggggtcacagagcagtcatagacaccatggaccagggcaggagaagggcagatggcacatgggcacaacagggccttgtccttagagcactggggggtcatggctgggaggggcatggcaggggctggcatccctgtagagccagaggggccacccagggcagtgacattccagatatgttgggctcacctcatccttgctgtgagactggagttccatggggacatgaagtcagtacaccgcagagctgctcagctgctctacctctcgctgacttttttgttgcacatatacattttctttcaattagcatttatttcagcttttatttaagctttttgacagtacatgtaaaatatatgattataaccatttaaaaataccttatgtacctggttttttttggaaactagatagaaatatatttatcttttacataaaagaagtgtgtagtggggtggtccagggctttgtggtggcttagtggccatcggggtcccaggctcttcccacctttctcttttgggtccacctcttggctcctggcttccttcctctggggcctgactgtccaggatggcagctggagctcctgctctgggcacggttggcatcagagcccactgctccccatccactctttaatccagatgctggtaatgtccctttccaaggcataactaagataagctggaaggttcttacgaggctttgctagaggccctgggaggtggggggaaaggcaagagggcagtgcccacccatagaccgggtcacatgacctggcatcagcgccgtggggtcctttgggcttcacctccctctcccctctgcccccacgtcatcccaccctcatcctcaccctcaccattcccatcccgtaccgtaatgtcccttgcaaggcctaactctgtgaggaatgaaaccacctcatccttgttccaataacatgagtgaccgaatttacaaacgagtgaatgtggacctctggaaacattacccagcttgtttttacttttcactttctctttctgcccctttcatttccgtaggagccctttacctagatgagaagtgtccccccgcctggggaatatatcagtcagaacaatcttcctgcagacatgcaccattagacccgagtgacggtggtgccatttaaacctcagagcaggtaaaaggtggtcctgaaacctgtctacccacagggtgctatggaatctgaatcacttcttttttcctagagccctggggtggggagctccctcaagtgttcacatgtgtgtggaatgaggaacacccatctccttggccctctccaccctgaagagttagttattaaaataattggcaagctcttgcaaatgtcagtcatccattgttcagaatggaatagcaataatacatccctggctgccctgggcttggccaggattactcactgaaggcctcagggttactggcacacactttcttttcctaataatcccatcccctcagctttcctaaggctagagtgaatttcgtgttcctttagtttacataagatggtgaacttggcaaaagctatcattaaacagaagctaagagaaagcctatgtcgtggaatccagaatgggtattgccattcactgctgtccacagaagctgtcttgaatttctttctgtgtcttttctttttttttctttaagactgttgtttaccagactgggctctgtggaacacaggtgtcctgggagatggttaatcattacaaaatattggtaacaatctaaagatgcatacataagagagtggtcaaataaaccattttccattca

SEQ ID NO: 191125 - DNA, 1630 bp, Homo sapiens
  Payload ID: 17754
  Gene Name: thymidine phosphorylase
  Uniprot ID: P19971
  ENST ID: ENST00000252029
  CDS Start-End: 164-1612
cccacccgcctgccgtcctggggcgccgccgccccgccgccggcagtggaccgctgtgcgcgaaccctgaaccctacggtcccgacccgcgggcgaggccgggtacctgggctgggatccggagcaagcgggcgagggcagcgccctaagcaggcccggagcgatggcagccttgatgaccccgggaaccggggccccacccgcgcctggtgacttctccggggaagggagccagggacttcccgacccttcgccagagcccaagcagctcccggagctgatccgcatgaagcgagacggaggccgcctgagcgaagcggacatcaggggcttcgtggccgctgtggtgaatgggagcgcgcagggcgcacagatcggggccatgctgatggccatccgacttcggggcatggatctggaggagacctcggtgctgacccaggccctggctcagtcgggacagcagctggagtggccagaggcctggcgccagcagcttgtggacaagcattccacagggggtgtgggtgacaaggtcagcctggtcctcgcacctgccctggcggcatgtggctgcaaggtgccaatgatcagcggacgtggtctggggcacacaggaggcaccttggataagctggagtctattcctggattcaatgtcatccagagcccagagcagatgcaagtgctgctggaccaggcgggctgctgtatcgtgggtcagagtgagcagctggttcctgcggacggaatcctatatgcagccagagatgtgacagccaccgtggacagcctgccactcatcacagcctccattctcagtaagaaactcgtggaggggctgtccgctctggtggtggacgttaagttcggaggggccgccgtcttccccaaccaggagcaggcccgggagctggcaaagacgctggttggcgtgggagccagcctagggcttcgggtcgcggcagcgctgaccgccatggacaagcccctgggtcgctgcgtgggccacgccctggaggtggaggaggcgctgctctgcatggacggcgcaggcccgccagacttaagggacctggtcaccacgctcgggggcgccctgctctggctcagcggacacgcggggactcaggcccagggcgctgcccgggtggccgcggcgctggacgacggctcggcccttggccgcttcgagcggatgctggcggcgcagggcgtggatcccggtctggcccgagccctgtgctcgggaagtcccgcagaacgccggcagctgctgcctcgcgcccgggagcaggaggagctgctggcgcccgcagatggcaccgtggagctggtccgggcgctgccgctggcgctggtgctgcacgagctcggggccgggcgcagccgcgctggggagccgctccgcctgggggtgggcgcagagctgctggtcgacgtgggtcagaggctgcgccgtgggaccccctggctccgcgtgcaccgggacggccccgcgctcagcggcccgcagagccgcgccctgcaggaggcgctcgtactctccgaccgcgcgccattcgccgccccctcgcccttcgcagagctcgttctgccgccgcagcaataaagctcctttgccgcgaaa

SEQ ID NO: 191126 - DNA, 1614 bp, Homo sapiens
  Payload ID: 17754
  Gene Name: thymidine phosphorylase
  Uniprot ID: P19971
  ENST ID: ENST00000395678
  CDS Start-End: 152-1600
gccgccgccccgccgccggcagtggaccgctgtgcgcgaaccctgaaccctacggtcccgacccgcgggcgaggccgggtacctgggctgggatccggagcaagcgggcgagggcagcgccctaagcaggcatccccgcaggcccggagcgatggcagccttgatgaccccgggaaccggggccccacccgcgcctggtgacttctccggggaagggagccagggacttcccgacccttcgccagagcccaagcagctcccggagctgatccgcatgaagcgagacggaggccgcctgagcgaagcggacatcaggggcttcgtggccgctgtggtgaatgggagcgcgcagggcgcacagatcggggccatgctgatggccatccgacttcggggcatggatctggaggagacctcggtgctgacccaggccctggctcagtcgggacagcagctggagtggccagaggcctggcgccagcagcttgtggacaagcattccacagggggtgtgggtgacaaggtcagcctggtcctcgcacctgccctggcggcatgtggctgcaaggtgccaatgatcagcggacgtggtctggggcacacaggaggcaccttggataagctggagtctattcctggattcaatgtcatccagagcccagagcagatgcaagtgctgctggaccaggcgggctgctgtatcgtgggtcagagtgagcagctggttcctgcggacggaatcctatatgcagccagagatgtgacagccaccgtggacagcctgccactcatcacagcctccattctcagtaagaaactcgtggaggggctgtccgctctggtggtggacgttaagttcggaggggccgccgtcttccccaaccaggagcaggcccgggagctggcaaagacgctggttggcgtgggagccagcctagggcttcgggtcgcggcagcgctgaccgccatggacaagcccctgggtcgctgcgtgggccacgccctggaggtggaggaggcgctgctctgcatggacggcgcaggcccgccagacttaagggacctggtcaccacgctcgggggcgccctgctctggctcagcggacacgcggggactcaggcccagggcgctgcccgggtggccgcggcgctggacgacggctcggcccttggccgcttcgagcggatgctggcggcgcagggcgtggatcccggtctggcccgagccctgtgctcgggaagtcccgcagaacgccggcagctgctgcctcgcgcccgggagcaggaggagctgctggcgcccgcagatggcaccgtggagctggtccgggcgctgccgctggcgctggtgctgcacgagctcggggccgggcgcagccgcgctggggagccgctccgcctgggggtgggcgcagagctgctggtcgacgtgggtcagaggctgcgccgtgggaccccctggctccgcgtgcaccgggacggccccgcgctcagcggcccgcagagccgcgccctgcaggaggcgctcgtactctccgaccgcgcgccattcgccgccccctcgcccttcgcagagctcgttctgccgccgcagcaataaagctcctttgccgc

SEQ ID NO: 191127 - DNA, 1608 bp, Homo sapiens
  Payload ID: 17754
  Gene Name: thymidine phosphorylase
  Uniprot ID: P19971
  ENST ID: ENST00000395680
  CDS Start-End: 142-1590
gcgcgaaccctgaaccctacggtcccgacccgcgggcgaggccgggtacctgggctgggatccggagcaagcgggcgagggcagcgccctaagcaggccgcagaccccggacgtgtcaggcatccccgcaggcccggagcgatggcagccttgatgaccccgggaaccggggccccacccgcgcctggtgacttctccggggaagggagccagggacttcccgacccttcgccagagcccaagcagctcccggagctgatccgcatgaagcgagacggaggccgcctgagcgaagcggacatcaggggcttcgtggccgctgtggtgaatgggagcgcgcagggcgcacagatcggggccatgctgatggccatccgacttcggggcatggatctggaggagacctcggtgctgacccaggccctggctcagtcgggacagcagctggagtggccagaggcctggcgccagcagcttgtggacaagcattccacagggggtgtgggtgacaaggtcagcctggtcctcgcacctgccctggcggcatgtggctgcaaggtgccaatgatcagcggacgtggtctggggcacacaggaggcaccttggataagctggagtctattcctggattcaatgtcatccagagcccagagcagatgcaagtgctgctggaccaggcgggctgctgtatcgtgggtcagagtgagcagctggttcctgcggacggaatcctatatgcagccagagatgtgacagccaccgtggacagcctgccactcatcacagcctccattctcagtaagaaactcgtggaggggctgtccgctctggtggtggacgttaagttcggaggggccgccgtcttccccaaccaggagcaggcccgggagctggcaaagacgctggttggcgtgggagccagcctagggcttcgggtcgcggcagcgctgaccgccatggacaagcccctgggtcgctgcgtgggccacgccctggaggtggaggaggcgctgctctgcatggacggcgcaggcccgccagacttaagggacctggtcaccacgctcgggggcgccctgctctggctcagcggacacgcggggactcaggcccagggcgctgcccgggtggccgcggcgctggacgacggctcggcccttggccgcttcgagcggatgctggcggcgcagggcgtggatcccggtctggcccgagccctgtgctcgggaagtcccgcagaacgccggcagctgctgcctcgcgcccgggagcaggaggagctgctggcgcccgcagatggcaccgtggagctggtccgggcgctgccgctggcgctggtgctgcacgagctcggggccgggcgcagccgcgctggggagccgctccgcctgggggtgggcgcagagctgctggtcgacgtgggtcagaggctgcgccgtgggaccccctggctccgcgtgcaccgggacggccccgcgctcagcggcccgcagagccgcgccctgcaggaggcgctcgtactctccgaccgcgcgccattcgccgccccctcgcccttcgcagagctcgttctgccgccgcagcaataaagctcctttgccgcgaaa

SEQ ID NO: 191128 - DNA, 1604 bp, Homo sapiens
  Payload ID: 17754
  Gene Name: thymidine phosphorylase
  Uniprot ID: P19971
  ENST ID: ENST00000395681
  CDS Start-End: 123-1586
ggcagtggaccgctgtgcgcgaaccctgaaccctacggtcccgacccgcgggcgaggccgggtacctgggctgggatccggagcaagcgggcgagggcagcgccctaagcaggcccggagcgatggcagccttgatgaccccgggaaccggggccccacccgcgcctggtgacttctccggggaagggagccagggacttcccgacccttcgccagagcccaagcagctcccggagctgatccgcatgaagcgagacggaggccgcctgagcgaagcggacatcaggggcttcgtggccgctgtggtgaatgggagcgcgcagggcgcacagatcggggccatgctgatggccatccgacttcggggcatggatctggaggagacctcggtgctgacccaggccctggctcagtcgggacagcagctggagtggccagaggcctggcgccagcagcttgtggacaagcattccacagggggtgtgggtgacaaggtcagcctggtcctcgcacctgccctggcggcatgtggctgcaaggtgccaatgatcagcggacgtggtctggggcacacaggaggcaccttggataagctggagtctattcctggattcaatgtcatccagagcccagagcagatgcaagtgctgctggaccaggcgggctgctgtatcgtgggtcagagtgagcagctggttcctgcggacggaatcctatatgcagccagagatgtgacagccaccgtggacagcctgccactcatcacagcctccattctcagtaagaaactcgtggaggggctgtccgctctggtggtggacgttaagttcggaggggccgccgtcttccccaaccaggagcaggcccgggagctggcaaagacgctggttggcgtgggagccagcctagggcttcgggtcgcggcagcgctgaccgccatggacaagcccctgggtcgctgcgtgggccacgccctggaggtggaggaggcgctgctctgcatggacggcgcaggcccgccagacttaagggacctggtcaccacgctcgggggcgccctgctctggctcagcggacacgcggggactcaggcccagggcgctgcccgggtggccgcggcgctggacgacggctcggcccttggccgcttcgagcggatgctggcggcgcagggcgtggatcccggtctggcccgagccctgtgctcgggaagtcccgcagaacgccggcagctgctgcctcgcgcccgggagcaggaggagctgctggcgcccgcagatgcccctctccccgcaggcaccgtggagctggtccgggcgctgccgctggcgctggtgctgcacgagctcggggccgggcgcagccgcgctggggagccgctccgcctgggggtgggcgcagagctgctggtcgacgtgggtcagaggctgcgccgtgggaccccctggctccgcgtgcaccgggacggccccgcgctcagcggcccgcagagccgcgccctgcaggaggcgctcgtactctccgaccgcgcgccattcgccgccccctcgcccttcgcagagctcgttctgccgccgcagcaataaagctcctttgccgcgaaa

SEQ ID NO: 191129 - DNA, 1432 bp, Homo sapiens
  Payload ID: 17754
  Gene Name: thymidine phosphorylase
  ENST ID: ENST00000425169
  CDS Start-End: 98-1432
ctgaaccctacggtcccgacccgcgggcgaggccgggtacctgggctgggatccggagcaagcgggcgagggcagcgccctaagcaggcccggagcgatggcagccttgatgaccccgggaaccggggccccacccgcgcctggtgacttctccggggaagggagccagggacttcccgacccttcgccagagcccaagcagctcccggagctgatccgcatgaagcgagacggaggccgcctgagcgaagcggacatcaggggcttcgtggccgctgtggtgaatgggagcgcgcagggcgcacagatcggggccatgctgatggccatccgacttcggggcatggatctggaggagacctcggtgctgacccaggccctggctcagtcgggacagcagctggagtggccagaggcctggcgccagcagcttgtggacaagcattccacagggggtgtgggtgacaaggtcagcctggtcctcgcacctgccctggcggcatgtggctgcaagatgcaagtgctgctggaccaggcgggctgctgtatcgtgggtcagagtgagcagctggttcctgcggacggaatcctatatgcagccagagatgtgacagccaccgtggacagcctgccactcatcacagcctccattctcagtaagaaactcgtggaggggctgtccgctctggtggtggacgttaagttcggaggggccgccgtcttccccaaccaggagcaggcccgggagctggcaaagacgctggttggcgtgggagccagcctagggcttcgggtcgcggcagcgctgaccgccatggacaagcccctgggtcgctgcgtgggccacgccctggaggtggaggaggcgctgctctgcatggacggcgcaggcccgccagacttaagggacctggtcaccacgctcgggggcgccctgctctggctcagcggacacgcggggactcaggcccagggcgctgcccgggtggccgcggcgctggacgacggctcggcccttggccgcttcgagcggatgctggcggcgcagggcgtggatcccggtctggcccgagccctgtgctcgggaagtcccgcagaacgccggcagctgctgcctcgcgcccgggagcaggaggagctgctggcgcccgcagatggcaccgtggagctggtccgggcgctgccgctggcgctggtgctgcacgagctcggggccgggcgcagccgcgctggggagccgctccgcctgggggtgggcgcagagctgctggtcgacgtgggtcagaggctgcgccgtgggaccccctggctccgcgtgcaccgggacggccccgcgctcagcggcccgcagagccgcgccctgcaggaggcgctcgtactctccgaccgcgcgccattcgccgccccctcgcccttcgcagagctcgttctg

SEQ ID NO: 191130 - DNA, 1327 bp, Homo sapiens
  Payload ID: 17755
  Gene Name: thymidylate synthetase
  Uniprot ID: P04818
  ENST ID: ENST00000323224
  CDS Start-End: 1-840
atgcctgtggccggctcggagctgccgcgccggcccttgccccccgccgcacaggagcgggacgccgagccgcgtccgccgcacggggagctgcagtacctggggcagatccaacacatcctccgctgcggcgtcaggaaggacgaccgcacgggcaccggcaccctgtcggtattcggcatgcaggcgcgctacagcctgagagatgaattccctctgctgacaaccaaacgtgtgttctggaagggtgttttggaggagttgctgtggtttatcaagggatccacaaatgctaaagagctgtcttccaagggagtgaaaatctgggatgccaatggatcccgagactttttggacagcctgggattctccaccagagaagaaggggacttgggcccagtttatggcttccagtggaggcattttggggcagaatacagagatatggaatcagatcttcctctgatggcgctgcctccatgccatgccctctgccagttctatgtggtgaacagtgagctgtcctgccagctgtaccagagatcgggagacatgggcctcggtgtgcctttcaacatcgccagctacgccctgctcacgtacatgattgcgcacatcacgggcctgaagccaggtgactttatacacactttgggagatgcacatatttacctgaatcacatcgagccactgaaaattcagcttcagcgagaacccagacctttcccaaagctcaggattcttcgaaaagttgagaaaattgatgacttcaaagctgaagactttcagattgaagggtacaatccgcatccaactattaaaatggaaatggctgtttagggtgctttcaaaggagctcgaaggatattgtcagtctttaggggttgggctggatgccgaggtaaaagttctttttgctctaaaagaaaaaggaactaggtcaaaaatctgtccgtgacctatcagttattaatttttaaggatgttgccactggcaaatgtaactgtgccagttctttccataataaaaggctttgagttaactcactgagggtatctgacaatgctgaggttatgaacaaagtgaggagaatgaaatgtatgtgctcttagcaaaaacatgtatgtgcatttcaatcccacgtacttataaagaaggttggtgaatttcacaagctatttttggaatatttttagaatattttaagaatttcacaagctattccctcaaatctgagggagctgagtaacaccatcgatcatgatgtagagtgtggttatgaactttaaagttatagttgttttatatgttgctataataaagaag

SEQ ID NO: 191131 - DNA, 693 bp, Homo sapiens
  Payload ID: 17755
  Gene Name: thymidylate synthetase
  Uniprot ID: P04818
  ENST ID: ENST00000323250
  CDS Start-End: 1-693
atgcctgtggccggctcggagctgccgcgccggcccttgccccccgccgcacaggagcgggacgccgagccgcgtccgccgcacggggagctgcagtacctggggcagatccaacacatcctccgctgcggcgtcaggaaggacgaccgcacgggcaccggcaccctgtcggtattcggcatgcaggcgcgctacagcctgagagattattcaggacagggagttgaccaactgcaaagagtgattgacaccatcaaaaccaaccctgacgacagaagaatcatcatgtgcgcttggaatccaagagatcttcctctgatggcgctgcctccatgccatgccctctgccagttctatgtggtgaacagtgagctgtcctgccagctgtaccagagatcgggagacatgggcctcggtgtgcctttcaacatcgccagctacgccctgctcacgtacatgattgcgcacatcacgggcctgaagccaggtgactttatacacactttgggagatgcacatatttacctgaatcacatcgagccactgaaaattcagcttcagcgagaacccagacctttcccaaagctcaggattcttcgaaaagttgagaaaattgatgacttcaaagctgaagactttcagattgaagggtacaatccgcatccaactattaaaatggaaatggctgtttag

SEQ ID NO: 191132 - DNA, 1662 bp, Homo sapiens
  Payload ID: 17755
  Gene Name: thymidylate synthetase
  Uniprot ID: P04818
  ENST ID: ENST00000323274
  CDS Start-End: 140-1081
cgggacggccgcgggaaaaggcgcgcggaaggggtcctgccaccgcgccacttggcctgcctccgtcccgccgcgccacttggcctgcctccgtcccgccgcgccacttcgcctgcctccgtcccccgcccgccgcgccatgcctgtggccggctcggagctgccgcgccggcccttgccccccgccgcacaggagcgggacgccgagccgcgtccgccgcacggggagctgcagtacctggggcagatccaacacatcctccgctgcggcgtcaggaaggacgaccgcacgggcaccggcaccctgtcggtattcggcatgcaggcgcgctacagcctgagagatgaattccctctgctgacaaccaaacgtgtgttctggaagggtgttttggaggagttgctgtggtttatcaagggatccacaaatgctaaagagctgtcttccaagggagtgaaaatctgggatgccaatggatcccgagactttttggacagcctgggattctccaccagagaagaaggggacttgggcccagtttatggcttccagtggaggcattttggggcagaatacagagatatggaatcagattattcaggacagggagttgaccaactgcaaagagtgattgacaccatcaaaaccaaccctgacgacagaagaatcatcatgtgcgcttggaatccaagagatcttcctctgatggcgctgcctccatgccatgccctctgccagttctatgtggtgaacagtgagctgtcctgccagctgtaccagagatcgggagacatgggcctcggtgtgcctttcaacatcgccagctacgccctgctcacgtacatgattgcgcacatcacgggcctgaagccaggtgactttatacacactttgggagatgcacatatttacctgaatcacatcgagccactgaaaattcagcttcagcgagaacccagacctttcccaaagctcaggattcttcgaaaagttgagaaaattgatgacttcaaagctgaagactttcagattgaagggtacaatccgcatccaactattaaaatggaaatggctgtttagggtgctttcaaaggagctcgaaggatattgtcagtctttaggggttgggctggatgccgaggtaaaagttctttttgctctaaaagaaaaaggaactaggtcaaaaatctgtccgtgacctatcagttattaatttttaaggatgttgccactggcaaatgtaactgtgccagttctttccataataaaaggctttgagttaactcactgagggtatctgacaatgctgaggttatgaacaaagtgaggagaatgaaatgtatgtgctcttagcaaaaacatgtatgtgcatttcaatcccacgtacttataaagaaggttggtgaatttcacaagctatttttggaatatttttagaatattttaagaatttcacaagctattccctcaaatctgagggagctgagtaacaccatcgatcatgatgtagagtgtggttatgaactttaaagttatagttgttttatatgttgctataataaagaagtgttctgcattcgtccacgctttgttcattctgtactgccacttatctgctcagttccttcctaaaatagattaaagaactctccttaagtaaa

SEQ ID NO: 191133 - DNA, 1602 bp, Homo sapiens
  Payload ID: 17756
  Gene Name: thymine DNA glycosylase
  ENST ID: ENST00000266775
  CDS Start-End: 280-1500
acagaaagggggtccgtgggggacggtagaagcctggaggaggagcttgagtccagccactgtctgggtactgccagccatcgggcccaggtctctggggttgtcttaccgcagtgagtaccacgcggtactacagagaccggctgcccgtgtgcccggcaggtggagccgcccgcatcagcggcctcggggaatggaagcggagaacgcgggcagtttgcattttcatgaagtgctcaaaatgggacatgtgaaattctgagagtagtagtaagaaacatgggagagtgctattcccttcagcaagctcaagctttttatacgtttccatttcaacaactgatggctgaagctcctaatatggcagttgtgaatgaacagcaaatgccagaagaagttccagccccagctcctgctcaggaaccagtgcaagaggctccaaaaggaagaaaaagaaaacccagaacaacagaaccaaaacaaccagtggaacccaaaaaacctgttgagtcaaaaaaatctggcaagtctgcaaaatcaaaagaaaaacaagaaaaaattacagacacatttaaagtaaaaagaaaagtagaccgttttaatggtgtttcagaagctgaacttctgaccaagactctccccgatattttgaccttcaatctggacattgtcattattggcataaacccgggactaatggctgcttacaaagggcatcattaccctggacctggaaaccatttttggaagtgtttgtttatgtcagggctcagtgaggtccagctgaaccatatggatgatcacactctaccagggaagtatggtattggatttaccaacatggtggaaaggaccacgcccggcagcaaagatctctccagtaaagaatttcgtgaaggaggacgtattctagtacagaaattacagaaatatcagccacgaatagcagtgtttaatggaaaatgtatttatgaaatttttagtaaagaagtttttggagtaaaggttaagaacttggaatttgggcttcagccccataagattccagacacagaaactctctgctatgttatgccatcatccagtgcaagatgtgctcagtttcctcgagcccaagacaaagttcattactacataaaactgaaggacttaagagatcagttgaaaggcattgaacgaaatatggacgttcaagaggtgcaatatacatttgacctacagcttgcccaagaggatgcaaagaagatggctgttaaggaagaaaaatatgatccaggttatgaggcagcatatggtggtgcttacggagaaaatccatgcagcagtgaaccttgtggcttctcttcaaatgggctaattgagagcgtggagttaagaggagaatcagctttcagtggcattcctaatgggcagtggatgacccagtcatttacagaccaaattccttcctttagtaatcactgtggaacacaagaacaggaagaagaaagccatgcttaagaatggtgcttctcagctctgcttaaatgctgcagttttaatgcagttgtcaacaagtagaacctcagtttgctaactgaagtgttttattagtattttact

SEQ ID NO: 191134 - DNA, 3251 bp, Homo sapiens
  Payload ID: 17756
  Gene Name: thymine DNA glycosylase
  Uniprot ID: Q13569
  ENST ID: ENST00000392872
  CDS Start-End: 235-1467
agtacgcgtgggatttggctccgaggaggcggaagtgcagcacagaaagggggtccgtgggggacggtagaagcctggaggaggagcttgagtccagccactgtctgggtactgccagccatcgggcccaggtctctggggttgtcttaccgcagtgagtaccacgcggtactacagagaccggctgcccgtgtgcccggcaggtggagccgcccgcatcagcggcctcggggaatggaagcggagaacgcgggcagctattcccttcagcaagctcaagctttttatacgtttccatttcaacaactgatggctgaagctcctaatatggcagttgtgaatgaacagcaaatgccagaagaagttccagccccagctcctgctcaggaaccagtgcaagaggctccaaaaggaagaaaaagaaaacccagaacaacagaaccaaaacaaccagtggaacccaaaaaacctgttgagtcaaaaaaatctggcaagtctgcaaaatcaaaagaaaaacaagaaaaaattacagacacatttaaagtaaaaagaaaagtagaccgttttaatggtgtttcagaagctgaacttctgaccaagactctccccgatattttgaccttcaatctggacattgtcattattggcataaacccgggactaatggctgcttacaaagggcatcattaccctggacctggaaaccatttttggaagtgtttgtttatgtcagggctcagtgaggtccagctgaaccatatggatgatcacactctaccagggaagtatggtattggatttaccaacatggtggaaaggaccacgcccggcagcaaagatctctccagtaaagaatttcgtgaaggaggacgtattctagtacagaaattacagaaatatcagccacgaatagcagtgtttaatggaaaatgtatttatgaaatttttagtaaagaagtttttggagtaaaggttaagaacttggaatttgggcttcagccccataagattccagacacagaaactctctgctatgttatgccatcatccagtgcaagatgtgctcagtttcctcgagcccaagacaaagttcattactacataaaactgaaggacttaagagatcagttgaaaggcattgaacgaaatatggacgttcaagaggtgcaatatacatttgacctacagcttgcccaagaggatgcaaagaagatggctgttaaggaagaaaaatatgatccaggttatgaggcagcatatggtggtgcttacggagaaaatccatgcagcagtgaaccttgtggcttctcttcaaatgggctaattgagagcgtggagttaagaggagaatcagctttcagtggcattcctaatgggcagtggatgacccagtcatttacagaccaaattccttcctttagtaatcactgtggaacacaagaacaggaagaagaaagccatgcttaagaatggtgcttctcagctctgcttaaatgctgcagttttaatgcagttgtcaacaagtagaacctcagtttgctaactgaagtgttttattagtattttactctagtggtgtaattgtaatgtagaacagttgtgtggtagtgtgaaccgtatgaacctaagtagtttggaagaaaaagtagggtttttgtatactagcttttgtatttgaattaattatcattccagctttttatatactatatttcatttatgaagaaattgattttcttttgggagtcacttttaatctgtaattttaaaatacaagtctgaatatttatagttgattcttaactgcataaacctagatataccattatcccttttatacctaagaagggcatgctaataattaccactgtcaaagaggcaaaggtgttgatttttgtatatgaagttaagcctcagtggagtctcatttgttagtttttagtggtaactaagggtaaactcagggttccctgagctatatgcacactcagacctctttgctttaccagtggtgtttgtgagttgctcagtagtaaaaactggcccttacctgacagagccctggctttgacctgctcagccctgtgtgttaatcctctagtagccaattaactactctggggtggcaggttccagagaatgcagtagaccttttgccactcatctgtgttttacttgagacatgtaaatatgatagggaaggaactgaatttctccattcatatttataaccattctagttttatcttccttggctttaagagtgtgccatggaaagtgataagaaatgaacttctaggctaagcaaaaagatgctggagatatttgatactctcatttaaactggtgctttatgtacatgagatgtactaaaataagtaatatagaatttttcttgctaggtaaatccagtaagccaataattttaaagattctttatctgcatcattgctgtttgttactataaattaaatgaacctcatggaaaggttgaggtgtatacctttgtgattttctaatgagttttccatggtgctacaaataatccagactaccaggtctggtagatattaaagctgggtactaagaaatgttatttgcatcctctcagttactcctgaatattctgatttcatacgtacccagggagcatgctgttttgtcaatcaatataaaatatttatgaggtctcccccacccccaggaggttatatgattgctcttctctttataataagagaaacaaattcttattgtgaatcttaacatgctttttagctgtggctatgatggattttattttttcctaggtcaagctgtgtaaaagtcatttatgttatttaaatgatgtactgtactgctgtttacatggacgttttgtgcgggtgctttgaagtgccttgcatcagggattaggagcaattaaattattttttcacgggactgtgtaaagcatgtaactaggtattgctttggtatataactattgtagctttacaagagattgttttatttgaatggggaaaataccctttaaattatgacggacatccactagagatgggtttgaggattttccaagcgtgtaataatgatgtttttcctaacatgacagatgagtagtaaatgttgatatatcctatacatgacagtgtgagactttttcattaaataatattgaaagattttaaaattcatttgaaagtctgatggcttttacaataaaagatattaagaattgttatccttaa

SEQ ID NO: 191135 - DNA, 824 bp, Homo sapiens
  Payload ID: 17756
  Gene Name: thymine DNA glycosylase
  ENST ID: ENST00000436021
  CDS Start-End: 410-824
ctccgaggaggcggaagtgcagcacagaaagggggtccgtgggggacggtagaagcctggaggaggagcttgagtccagccactgtctgggtactgccagccatcgggcccaggtctctggggttgtcttaccgcagtgagtaccacgcggtactacagagaccggctgcccgtgtgcccggcaggtggagccgcccgcatcagcggcctcggggaatggaagcggagaacgcgggcagagtttcactctgttgcccaagatggagtacagtggtgcgatcaccgttcactgcaacctctgcttcccgagtttaagcgattctcatgcctcagcctcccaagcatctgggactacagctattcccttcagcaagctcaagctttttatacgtttccatttcaacaactgatggctgaagctcctaatatggcagttgtgaatgaacagcaaatgccagaagaagttccagccccagctcctgctcaggaaccagtgcaagaggctccaaaaggaagaaaaagaaaacccagaacaacagaaccaaaacaaccagtggaacccaaaaaacctgttgagtcaaaaaaatctggcaagtctgcaaaatcaaaagaaaaacaagaaaaaattacagacacatttaaagtaaaaagaaaagtagaccgttttaatggtgtttcagaagctgaacttctgaccaagactctccccgatattttgaccttcaatctggacattgtcattattggcataaacccgggactaatggctgcttacaaagggcatcattaccctggacctggaaaccatttttggaagtgtttgt

SEQ ID NO: 191136 - DNA, 923 bp, Homo sapiens
  Payload ID: 17756
  Gene Name: thymine DNA glycosylase
  ENST ID: ENST00000537100
  CDS Start-End: 153-923
ggagcttgagtccagccactgtctgggtactgccagccatcgggcccaggtctctggggttgtcttaccgcagtgagtaccacgcggtactacagagaccggctgcccgtgtgcccggcaggtggagccgcccgcatcagcggcctcggggaatggaagcggagaacgcgggcagctattcccttcagcaagctcaagctttttatacgtttccatttcaacaactgatggctgaagctcctaatatggcagttgtgaatgaacagcaaatgccagaagaagttccagccccagctcctgctcaggaaccagtgcaagaggctccaaaaggaagaaaaagaaaacccagaacaacagaaccaaaacaaccagtggaacccaaaaaacctgttgagtcaaaaaaatctggcaagtctgcaaaatcaaaagaaaaacaagaaaaaattacagacacatttaaagtaaaaagaaaagtagaccgttttaatggtgtttcagaagctgaacttctgaccaagactctccccgatattttgaccttcaatctggacattgtcattattggcataaacccgggactaatggctgcttacaaagggcatcattaccctggacctggaaaccatttttggctcagtgaggtccagctgaaccatatggatgatcacactctaccagggaagtatggtattggatttaccaacatggtggaaaggaccacgcccggcagcaaagatctctccagtaaagaatttcgtgaaggaggacgtattctagtacagaaattacagaaatatcagccacgaatagcagtgtttaatggaaaatgtatttatgaaatttttagtaaagaagtttttggagtaaaggttaagaacttggaatttgggcttcagccccataagattccagacacagaaact

SEQ ID NO: 191137 - DNA, 1014 bp, Homo sapiens
  Payload ID: 17756
  Gene Name: thymine DNA glycosylase
  ENST ID: ENST00000540956
  CDS Start-End: 1-334
aattacagacacatttaaagtaaaaagaaaagtagaccgttttaatggtgtttcagaagctgaacttctgaccaagactctccccgatattttgaccttcaatctggacattgtcattattggcataaacccgggactaatggctgcttacaaagggcatcattaccctggacctggaaaccatttttggaagtgtttgtttatgtcagggctcagtgaggtccagctgaaccatatggatgatcacactctaccagggaagtatggtattggatttaccaacatggtggaaaggaccacgcccggcagcaaagatctctccaggtatttatgaaatttttagtaaagaagtttttggagtaaaggttaagaacttggaatttgggcttcagccccataagattccagacacagaaactctctgctatgttatgccatcatccagtgcaagatgtgctcagtttcctcgagcccaagacaaagttcattactacataaaactgaaggacttaagagatcagttgaaaggcattgaacgaaatatggacgttcaagaggtgcaatatacatttgacctacagcttgcccaagaggatgcaaagaagatggctgttaaggaagaaaaatatgatccaggttatgaggcagcatatggtggtgcttacggagaaaatccatgcagcagtgaaccttgtggcttctcttcaaatgggctaattgagagcgtggagttaagaggagaatcagctttcagtggcattcctaatgggcagtggatgacccagtcatttacagaccaaattccttcctttagtaatcactgtggaacacaagaacaggaagaagaaagccatgcttaagaatggtgcttctcagctctgcttaaatgctgcagttttaatgcagttgtcaacaagtagaacctcagtttgctaactgaagtgttttattagtattttactctagtggtgtaattgtaatgtagaacagttgtgtggtagtgtgaaccgtatg

SEQ ID NO: 191138 - DNA, 1387 bp, Homo sapiens
  Payload ID: 17756
  Gene Name: thymine DNA glycosylase
  ENST ID: ENST00000544861
  CDS Start-End: 480-1283
acagaaagggggtccgtgggggacggtagaagcctggaggaggagcttgagtccagccactgtctgggtactgccagccatcgggcccaggtctctggggttgtcttaccgcagtgagtaccacgcggtactacagagaccggctgcccgtgtgcccggcaggtggagccgcccgcatcagcggcctcggggaatggaagcggagaacgcgggcagaggctccaaaaggaagaaaaagaaaacccagaacaacagaaccaaaacaaccagtggaacccaaaaaacctgttgagtcaaaaaaatctggcaagtctgcaaaatcaaaagaaaaacaagaaaaaattacagacacatttaaagtaaaaagaaaagtagaccgttttaatggtgtttcagaagctgaacttctgaccaagactctccccgatattttgaccttcaatctggacattgtcattattggcataaacccgggactaatggctgcttacaaagggcatcattaccctggacctggaaaccatttttggaagtgtttgtttatgtcagggctcagtgaggtccagctgaaccatatggatgatcacactctaccagggaagtatggtattggatttaccaacatggtggaaaggaccacgcccggcagcaaagatctctccagtaaagaatttcgtgaaggaggacgtattctagtacagaaattacagaaatatcagccacgaatagcagtgtttaatggaaaatgtatttatgaaatttttagtaaagaagtttttggagtaaaggttaagaacttggaatttgggcttcagccccataagattccagacacagaaactctctgctatgttatgccatcatccagtgcaagatgtgctcagtttcctcgagcccaagacaaagttcattactacataaaactgaaggacttaagagatcagttgaaaggcattgaacgaaatatggacgttcaagaggtgcaatatacatttgacctacagcttgcccaagaggatgcaaagaagatggctgttaaggaagaaaaatatgatccaggttatgaggcagcatatggtggtgcttacggagaaaatccatgcagcagtgaaccttgtggcttctcttcaaatgggctaattgagagcgtggagttaagaggagaatcagctttcagtggcattcctaatgggcagtggatgacccagtcatttacagaccaaattccttcctttagtaatcactgtggaacacaagaacaggaagaagaaagccatgcttaagaatggtgcttctcagctctgcttaaatgctgcagttttaatgcagttgtcaacaagtagaacctcagtttgctaactgaagtgttttattagtattttactct

SEQ ID NO: 191139 - DNA, 1898 bp, Homo sapiens
  Payload ID: 17757
  Gene Name: thymocyte expressed, positive selection associated 1
  Uniprot ID: A2RU30
  ENST ID: ENST00000316577
  CDS Start-End: 111-1676
aagtgtggcaggaggaaggctgtatgatataaaggaagaaagcatgcatctggaactcagaacttgacggcattactgttacgggaggccctgaagtctgagccagggccatggaggcctctgtgctgagccccacatcctgggagaaacggcgggcctggctccgtcagagccgtaactggcagacccaggtcctagaagaggaggctgccgccgccctgcaggatgtcccagatcctgagccttccagcctggatgacgttttccaagaagggaatccaatcaataaaattgaagactggctgcaggattgcggatactctgaagaaggattttctgaggaagcaggacagtttatctacaatggcttctgcagccatgggaccagctttgaagatgacttgaccctgggagcggaggccacactactggccgccaatggcaaactcttctccaggagtttcctcgagacagccaggccttgccagctacttgatcttggctgtagtttggcttccagcagcatgactggggggaccaacaagactagttcaagcatctcagaaattctggacaaagtgcaagaagatgcagaagatgtcctcttcagtctgggctttggccaagaggatcacaaagacacttctcggatacccgcccgatttttcaccaccccctctcaggccaagggcattgatttccagctcttcctgaagtcccaggtgcggaggattgaaatggaagacccctgcctcatgctggccagcaggtttaagcaggtgcaaacactggctgtcactgctgatgccttcttctgtctctactcctatgtgtctaagacacctgtccaaaagttcacaccatcccacatgttctggaattgcaaccatccaactgatgtgccatccatcaggattctgtcccgagagcctgaaccccagtcacccagagaccgccttcggaaagccatctccaagatgtgtctgtacacatgcccccgagaccggccaccaccaccccacaacacccccaaaaggaacagtttggaccaagttgtgttggaagtgatggacaaagtgaaagaagagaagcagttcctccagcaagactctgatttggggcaattctcacaggaagatcctgtgccccctgctgagggtaagaagttgcccacttctccctatccatgtgtcttctgctgtgaagaggaaacacagcagaggatgtccacagtgctagcaccatcccaaactctggattcgaaccccaaggtaccctgttgcacacattctctgcccatagaagatccacagtggagcacagacccagctcagataaggagagagctgtgtagtctaccagccaccaatacggaaacccatccagccaaggatgagactttctggaaaagaaagagcagagcaagaaagagcctcttccagaagaatctcatgggcaggaaggttaagtccttggacctgtccatcacccagcagaaatggaagcagagtgtagacagaccagaactgcgtcggtctttaagccagcagccacaggacacttttgacttggaggaggtgcaaagcaacagtgaggaggagcagagtcagagtcgctggcccagcagacccaggcacccccaccaccaccagacttttgctggcaaagactcgtgaagctttctccaccaccacaacagcatgtggtctgacagaattggcttcaaagaagaaactaaaagccacctcttgcaggaaactgcactgccctcaacatccagcccctactccttggtcctccaaacccccaaactctgcaggagaaaggcagcatggtacatggggaggaagaccagactgagcgatttggaatccacatcctaatgctgccacaagctg

SEQ ID NO: 191140 - DNA, 2010 bp, Homo sapiens
  Payload ID: 17757
  Gene Name: thymocyte expressed, positive selection associated 1
  Uniprot ID: A2RU30
  ENST ID: ENST00000449076
  CDS Start-End: 134-1699
gcttcacctctgtgcccacacctgtgaaggcctcggcccagcttcgacaactgctttgcctcaaactcagctttctaccagcagacaggacggcattactgttacgggaggccctgaagtctgagccagggccatggaggcctctgtgctgagccccacatcctgggagaaacggcgggcctggctccgtcagagccgtaactggcagacccaggtcctagaagaggaggctgccgccgccctgcaggatgtcccagatcctgagccttccagcctggatgacgttttccaagaagggaatccaatcaataaaattgaagactggctgcaggattgcggatactctgaagaaggattttctgaggaagcaggacagtttatctacaatggcttctgcagccatgggaccagctttgaagatgacttgaccctgggagcggaggccacactactggccgccaatggcaaactcttctccaggagtttcctcgagacagccaggccttgccagctacttgatcttggctgtagtttggcttccagcagcatgactggggggaccaacaagactagttcaagcatctcagaaattctggacaaagtgcaagaagatgcagaagatgtcctcttcagtctgggctttggccaagaggatcacaaagacacttctcggatacccgcccgatttttcaccaccccctctcaggccaagggcattgatttccagctcttcctgaagtcccaggtgcggaggattgaaatggaagacccctgcctcatgctggccagcaggtttaagcaggtgcaaacactggctgtcactgctgatgccttcttctgtctctactcctatgtgtctaagacacctgtccaaaagttcacaccatcccacatgttctggaattgcaaccatccaactgatgtgccatccatcaggattctgtcccgagagcctgaaccccagtcacccagagaccgccttcggaaagccatctccaagatgtgtctgtacacatgcccccgagaccggccaccaccaccccacaacacccccaaaaggaacagtttggaccaagttgtgttggaagtgatggacaaagtgaaagaagagaagcagttcctccagcaagactctgatttggggcaattctcacaggaagatcctgtgccccctgctgagggtaagaagttgcccacttctccctatccatgtgtcttctgctgtgaagaggaaacacagcagaggatgtccacagtgctagcaccatcccaaactctggattcgaaccccaaggtaccctgttgcacacattctctgcccatagaagatccacagtggagcacagacccagctcagataaggagagagctgtgtagtctaccagccaccaatacggaaacccatccagccaaggatgagactttctggaaaagaaagagcagagcaagaaagagcctcttccagaagaatctcatgggcaggaaggttaagtccttggacctgtccatcacccagcagaaatggaagcagagtgtagacagaccagaactgcgtcggtctttaagccagcagccacaggacacttttgacttggaggaggtgcaaagcaacagtgaggaggagcagagtcagagtcgctggcccagcagacccaggcacccccaccaccaccagacttttgctggcaaagactcgtgaagctttctccaccaccacaacagcatgtggtctgacagaattggcttcaaagaagaaactaaaagccacctcttgcaggaaactgcactgccctcaacatccagcccctactccttggtcctccaaacccccaaactctgcaggagaaaggcagcatggtacatggggaggaagaccagactgagcgatttggaatccacatcctaatgctgccacaagctgcatgcacaaagaccttaggcacatctcttcatttctctgtacactggtttctctactatgtgtgtattaaaatatataatgtggatgat

SEQ ID NO: 191141 - DNA, 2000 bp, Homo sapiens
  Payload ID: 17757
  Gene Name: thymocyte expressed, positive selection associated 1
  Uniprot ID: A2RU30
  ENST ID: ENST00000532804
  CDS Start-End: 537-1688
tatatacggtgtattcctctcatatcttaaagaaaagctttatgtagaaaaaaagattcatgacgcagcttatgtaagaataaacttgtggaatggaattagttgcagggaggaggtctgatttcgttcagttctcacagtgatctagtgtctgacttttctagggaatccaatcaataaaattgaagactggctgcaggattgcggcaaattaaatactactgactctcactggaaaagaatatgaatatgtgtgagtttttccatgaaaaagctccttggaaaatgtagtaagtgacttcaacctataagactgtttttggtttagatactctgaagaaggattttctgaggaagcaggacagtttatctacaatggcttctgcagccatgggaccagctttgaagatgacttgaccctgggagcggaggccacactactggccgccaatggcaaactcttctccaggagtttcctcgagacagccaggccttgccagctacttgatcttggctgtagtttggcttccagcagcatgactggggggaccaacaagactagttcaagcatctcagaaattctggacaaagtgcaagaagatgcagaagatgtcctcttcagtctgggctttggccaagaggatcacaaagacacttctcggatacccgcccgatttttcaccaccccctctcaggccaagggcattgatttccagctcttcctgaagtcccaggtgcggaggattgaaatggaagacccctgcctcatgctggccagcaggtttaagcaggtgcaaacactggctgtcactgctgatgccttcttctgtctctactcctatgtgtctaagacacctgtccaaaagttcacaccatcccacatgttctggaattgcaaccatccaactgatgtgccatccatcaggattctgtcccgagagcctgaaccccagtcacccagagaccgccttcggaaagccatctccaagatgtgtctgtacacatgcccccgagaccggccaccaccaccccacaacacccccaaaaggaacagtttggaccaagttgtgttggaagtgatggacaaagtgaaagaagagaagcagttcctccagcaagactctgatttggggcaattctcacaggaagatcctgtgccccctgctgagggtaagaagttgcccacttctccctatccatgtgtcttctgctgtgaagaggaaacacagcagaggatgtccacagtgctagcaccatcccaaactctggattcgaaccccaaggtaccctgttgcacacattctctgcccatagaagatccacagtggagcacagacccagctcagataaggagagagctgtgtagtctaccagccaccaatacggaaacccatccagccaaggatgagactttctggaaaagaaagagcagagcaagaaagagcctcttccagaagaatctcatgggcaggaaggttaagtccttggacctgtccatcacccagcagaaatggaagcagagtgtagacagaccagaactgcgtcggtctttaagccagcagccacaggacacttttgacttggaggaggtgcaaagcaacagtgaggaggagcagagtcagagtcgctggcccagcagacccaggcacccccaccaccaccagacttttgctggcaaagactcgtgaagctttctccaccaccacaacagcatgtggtctgacagaattggcttcaaagaagaaactaaaagccacctcttgcaggaaactgcactgccctcaacatccagcccctactccttggtcctccaaacccccaaactctgcaggagaaaggcagcatggtacatggggaggaagaccagactgagcgatttggaatccacatcctaatgctgccacaagctgcatgcacaaagaccttaggcacatctcttcatttctctgtacactggtttctctactatgtgtgtattaaaatatataatgtggatgata

SEQ ID NO: 191142 - DNA, 1517 bp, Homo sapiens
  Payload ID: 17757
  Gene Name: thymocyte expressed, positive selection associated 1
  Uniprot ID: A2RU30
  ENST ID: ENST00000531122
  CDS Start-End: 328-1479
ttttatatacggtgtattcctctcatatcttaaagaaaagctttatgtagaaaaaaagattcatgacgcagcttatggaatccaatcaataaaattgaagactggctgcaggattgcggatactctgaagaaggattttctgaggaagcaggacagtttatctacaatggcttctgcagccatgggaccagctttgaagatgacttgaccctgggagcggaggccacactactggccgccaatggcaaactcttctccaggagtttcctcgagacagccaggccttgccagctacttgatcttggctgtagtttggcttccagcagcatgactggggggaccaacaagactagttcaagcatctcagaaattctggacaaagtgcaagaagatgcagaagatgtcctcttcagtctgggctttggccaagaggatcacaaagacacttctcggatacccgcccgatttttcaccaccccctctcaggccaagggcattgatttccagctcttcctgaagtcccaggtgcggaggattgaaatggaagacccctgcctcatgctggccagcaggtttaagcaggtgcaaacactggctgtcactgctgatgccttcttctgtctctactcctatgtgtctaagacacctgtccaaaagttcacaccatcccacatgttctggaattgcaaccatccaactgatgtgccatccatcaggattctgtcccgagagcctgaaccccagtcacccagagaccgccttcggaaagccatctccaagatgtgtctgtacacatgcccccgagaccggccaccaccaccccacaacacccccaaaaggaacagtttggaccaagttgtgttggaagtgatggacaaagtgaaagaagagaagcagttcctccagcaagactctgatttggggcaattctcacaggaagatcctgtgccccctgctgagggtaagaagttgcccacttctccctatccatgtgtcttctgctgtgaagaggaaacacagcagaggatgtccacagtgctagcaccatcccaaactctggattcgaaccccaaggtaccctgttgcacacattctctgcccatagaagatccacagtggagcacagacccagctcagataaggagagagctgtgtagtctaccagccaccaatacggaaacccatccagccaaggatgagactttctggaaaagaaagagcagagcaagaaagagcctcttccagaagaatctcatgggcaggaaggttaagtccttggacctgtccatcacccagcagaaatggaagcagagtgtagacagaccagaactgcgtcggtctttaagccagcagccacaggacacttttgacttggaggaggtgcaaagcaacagtgaggaggagcagagtcagagtcgctggcccagcagacccaggcacccccaccaccaccagacttttgctggcaaagactcgtgaagctttctccaccaccacaacagcatgtggtctgacag

SEQ ID NO: 191143 - DNA, 582 bp, Homo sapiens
  Payload ID: 17757
  Gene Name: thymocyte expressed, positive selection associated 1
  ENST ID: ENST00000526532
  CDS Start-End: 341-582
agttctcacagtgatctagtgtctgacttttctagggaatccaatcaataaaattgaagactggctgcaggattgcggctccttggaaaatgtagtaagtgacttcaacctataagactgtttttggtttagatactctgaagaaggattttctgaggaagcaggacagtttatctacaatggcttctgcagccatgggaccagctttgaagatgacttgaccctgggagcggaggccacactactggccgccaatggcaaactcttctccaggagtttcctcgagacagccaggccttgccagctacttgatcttggctgtagtttggcttccagcagcatgactggggggaccaacaagactagttcaagcatctcagaaattctggacaaagtgcaagaagatgcagaagatgtcctcttcagtctgggctttggccaagaggatcacaaagacacttctcggatacccgcccgatttttcaccaccccctctcaggccaagggcattgatttccagctcttcctgaagtcccaggtgcggaggattgaaatggaagacccctgcctcatgctggccag

SEQ ID NO: 191144 - DNA, 523 bp, Homo sapiens
  Payload ID: 17757
  Gene Name: thymocyte expressed, positive selection associated 1
  ENST ID: ENST00000533607
  CDS Start-End: 381-523
cttttgagcaggcaacagcagttgaatgagttcagggagaaaggcataatctacaacatgatactttctcacttgcttcacctctgtgcccacacctgtgaaggcctcggcccagcttcgacaactgctttgcctcaaactcagctttctaccagcagacaggccctactctagtgtccatagctccaaccattgagagtacctggctgaaatcaactttgctttctgtgggtatgacctctttcttcagaagctgtagaagaaacttgttgagataaactgcagcaagatatattgaggtcagctacgagggaggatgtacacacttgagtgaggacggcattactgttacgggaggccctgaagtctgagccagggccatggaggcctctgtgctgagccccacatcctgggagaaacggcgggcctggctccgtcagagccgtaactggcagacccaggtcctagaagaggaggctgccgccgccctgcaggatgtcccagatcctgagccttccagcct

SEQ ID NO: 191145 - DNA, 655 bp, Homo sapiens
  Payload ID: 17757
  Gene Name: thymocyte expressed, positive selection associated 1
  ENST ID: ENST00000525978
  CDS Start-End: 1-242
aggcctctgtgctgagccccacatcctgggagaaacggcgggcctggctccgtcagagccgtaactggcagacccaggtcctagaagaggaggctgccgccgccctgcaggatgtcccagatcctgagccttccagcctggatgacgttttccaagaagggaatccaatcaataaaattgaagactggctgcaggattgcggcaaattaaatactactgactctcactggaaaagaatatgaatatgtgtgagtttttccatgaaaaagctccttggaaaatgtagtaagtgacttcaacctataagactgtttttggtttagatactctgaagaaggattttctgaggaagcaggacagtttatctacaatggcttctgcagccatgggaccagctttgaagatgacttgaccctgggagcggaggccacactactggccgccaatggcaaactcttctccaggagtttcctcgagacagccaggccttgccagctacttgatcttggctgtagtttggcttccagcagcatgactggggggaccaacaagactagttcaagcatctcagaaattctggacaaagtgcaagaagatgcagaagatgtcctcttcagtctgggctttggccaagaggatcacaaagacacttctc

SEQ ID NO: 191146 - DNA, 1861 bp, Homo sapiens
  Payload ID: 17757
  Gene Name: thymocyte expressed, positive selection associated 1
  ENST ID: ENST00000524923
  CDS Start-End: 316-519
agttgcagggaggaggtctgatttcgttcagttctcacagtgatctagtgtctgacttttctagggaatccaatcaataaaattgaagactggctgcaggattgcggatactctgaagaaggattttctgaggaagcaggacagtttatctacaatggcttctgcagccatgggaccagctttgaagatgacttgaccctgggagcggaggccacactactggccgccaatggcaaactcttctccaggagtttcctcgagacagccaggccttgccagctacttgatcttggctgtagtttggcttccagcagcatgactggggggaccaacaagactagttcaagcatctcagaaattctggacaaagtgcaagaagatgcagaagatgtcctcttcagtctgggctttggccaagaggatcacaaagacacttctcggatacccgcccgatttttcaccaccccctctcaggccaagggcattgatttccagctcttcctgaagtcccaggtttaagcaggtgcaaacactggctgtcactgctgatgccttcttctgtctctactcctatgtgtctaagacacctgtccaaaagttcacaccatcccacatgttctggaattgcaaccatccaactgatgtgccatccatcaggattctgtcccgagagcctgaaccccagtcacccagagaccgccttcggaaagccatctccaagatgtgtctgtacacatgcccccgagaccggccaccaccaccccacaacacccccaaaaggaacagtttggaccaagttgtgttggaagtgatggacaaagtgaaagaagagaagcagttcctccagcaagactctgatttggggcaattctcacaggaagatcctgtgccccctgctgagggtaagaagttgcccacttctccctatccatgtgtcttctgctgtgaagaggaaacacagcagaggatgtccacagtgctagcaccatcccaaactctggattcgaaccccaaggtaccctgttgcacacattctctgcccatagaagatccacagtggagcacagacccagctcagataaggagagagctgtgtagtctaccagccaccaatacggaaacccatccagccaaggatgagactttctggaaaagaaagagcagagcaagaaagagcctcttccagaagaatctcatgggcaggaaggttaagtccttggacctgtccatcacccagcagaaatggaagcagagtgtagacagaccagaactgcgtcggtctttaagccagcagccacaggacacttttgacttggaggaggtgcaaagcaacagtgaggaggagcagagtcagagtcgctggcccagcagacccaggcacccccaccaccaccagacttttgctggcaaagactcgtgaagctttctccaccaccacaacagcatgtggtctgacagaattggcttcaaagaagaaactaaaagccacctcttgcaggaaactgcactgccctcaacatccagcccctactccttggtcctccaaacccccaaactctgcaggagaaaggcagcatggtacatggggaggaagaccagactgagcgatttggaatccacatcctaatgctgccacaagctgcatgcacaaagaccttaggcacatctcttcatttctctgtacactggtttctctactatgtgtgtattaaaatatataatgtggatgatagtaaactgaacaaagccttaattttctcccaagctttgacattgccaagggcagttaggagacttcaggatcaagtttaggggacaagtttttttctaatactttcaaaaggcccaagtgaagagagga

SEQ ID NO: 191147 - DNA, 4188 bp, Homo sapiens
  Payload ID: 17757
  Gene Name: thymocyte expressed, positive selection associated 1
  Uniprot ID: A2RU30
  ENST ID: ENST00000524622
  CDS Start-End: 663-1814
atgagaccacagtcataagagtaaaacaaaaattctgatggaaataaatgcttatttggtaggaagcaaaaagcacaaaaacaagattgtctttctttttctttttctttttaaatgagaaggatccacccttgtgggaaaggaactctcaaaagacagcagtgggcctgacatcttgggcactttccaggttcttgggaggaagggagaaaagaagcagagagagagaagaaatatctactatttttatatacggtgtattcctctcatatcttaaagaaaagctttatgtagaaaaaaagattcatgacgcagcttatgtaagaataaacttgtggaatggaattagttgcagggaggaggtctgatttcgttcagttctcacagtgatctagtgtctgacttttctagggaatccaatcaataaaattgaagactggctgcaggattgcggatactctgaagaaggattttctgaggaagcaggacagtttatctacaatggcttctgcagccatgggaccagctttgaagatgacttgaccctgggagcggaggccacactactggccgccaatggcaaactcttctccaggagtttcctcgagacagccaggccttgccagctacttgatcttggctgtagtttggcttccagcagcatgactggggggaccaacaagactagttcaagcatctcagaaattctggacaaagtgcaagaagatgcagaagatgtcctcttcagtctgggctttggccaagaggatcacaaagacacttctcggatacccgcccgatttttcaccaccccctctcaggccaagggcattgatttccagctcttcctgaagtcccaggtgcggaggattgaaatggaagacccctgcctcatgctggccagcaggtttaagcaggtgcaaacactggctgtcactgctgatgccttcttctgtctctactcctatgtgtctaagacacctgtccaaaagttcacaccatcccacatgttctggaattgcaaccatccaactgatgtgccatccatcaggattctgtcccgagagcctgaaccccagtcacccagagaccgccttcggaaagccatctccaagatgtgtctgtacacatgcccccgagaccggccaccaccaccccacaacacccccaaaaggaacagtttggaccaagttgtgttggaagtgatggacaaagtgaaagaagagaagcagttcctccagcaagactctgatttggggcaattctcacaggaagatcctgtgccccctgctgagggtaagaagttgcccacttctccctatccatgtgtcttctgctgtgaagaggaaacacagcagaggatgtccacagtgctagcaccatcccaaactctggattcgaaccccaaggtaccctgttgcacacattctctgcccatagaagatccacagtggagcacagacccagctcagataaggagagagctgtgtagtctaccagccaccaatacggaaacccatccagccaaggatgagactttctggaaaagaaagagcagagcaagaaagagcctcttccagaagaatctcatgggcaggaaggttaagtccttggacctgtccatcacccagcagaaatggaagcagagtgtagacagaccagaactgcgtcggtctttaagccagcagccacaggacacttttgacttggaggaggtgcaaagcaacagtgaggaggagcagagtcagagtcgctggcccagcagacccaggcacccccaccaccaccagacttttgctggcaaagactcgtgaagctttctccaccaccacaacagcatgtggtctgacagaattggcttcaaagaagaaactaaaagccacctcttgcaggaaactgcactgccctcaacatccagcccctactccttggtcctccaaacccccaaactctgcaggagaaaggcagcatggtacatggggaggaagaccagactgagcgatttggaatccacatcctaatgctgccacaagctgcatgcacaaagaccttaggcacatctcttcatttctctgtacactggtttctctactatgtgtgtattaaaatatataatgtggatgatagtaaactgaacaaagccttaattttctcccaagctttgacattgccaagggcagttaggagacttcaggatcaagtttaggggacaagtttttttctaatactttcaaaaggcccaagtgaagagaggaaggacacctcactttctggctctaaaagcatggtacatctcacactaggattccctctgcacctctgttcatccctgtattcctaactaaattccagaaaatcttctacaacactggagtcctatttttcttcttgagacctcctttgaagaaatcaacttggagactcctccttaaatccagtttctttctctacccaaaattttgcatctttatagaaaaagagataagtaggattcagagtctcttctcctagccattgtggggggaaaaaatgctatttctgttggcagaaaacaatacaaatattttttttaaatcatggcatgtttttaaagttaactaacagctgtagtttgctttggaagttaaatgttttgtcaataaacagggcttgagcacatgcagtgctctcttaggcagtatgtggtttcagagcatcttggacacatttctcccctgagaaaatattaatattaatagaatgggagaagtaagatgcacgcatttccagaagtatattatttggctgcctaataaattgtgagacaaaagaaaaaaaaaaaaaaaacaggaagagagggacttgagggaatttgagggaaatcataaccaaaagtttaaaggaaaaaattacaccagacatgataagcagaagttgattttgttctggtgctattgccagcattaggggagaaggcacaaactgagtctgatacgtagtgaggcagagacaaaagggctagggtggaaaaatttttaaaccatctgtgtttactaattccccataccaaaagaacaaaatgaactttctcctatttcatgataaaagatagtttcacaatttggaaaaagcccccccactccaagtttcctacccttcccacccacagaaaccaggagacaggggaactatcttccttgatgttaacatttcaaagaggtggttctcaggtcctagagaaagatattcctgagttgtaaaactgggaagaggctggaagaagatttagatctcaagaaatagaaagaactacagcaaattttctaaagcaaatattcttaagggaggtcaagggcctgaagtcaggaagaaacctatttggtcaagctgaggggaaagttaaggctatcttgtcacaagagaacagaaatatctgacaatatttcatttaaagaactgtattagtccattctcacactgctataaataaatacctgagactgggtaatttatacagaaaagaggtttaattggctcacagttccgcaggctgtacaggaagcatggcaacatcagtttctggggaggcctcagggagctttaactcatggtggaaagcaaagtgggagcaggcatcttacatggtatgagcaggaggaacaaaggaaaggggaggtgctaacacttttaaatgaccagatcttgtaagaactcactcattatacagtaccaaggggagatggtgctaaacgattaatgaaaactctacccagtaatccaatcaccacccaccaggccccacctccaacaatggggattacagtttgacatgagatttgggtgaggacacagatccaaactgtcaggcctctgagcccaagctaagccatcatatcccctgtgacctgcatgtatacatccagatggcctgaagcaagtggagaatcacaaaagaagtgaaaatggcctgttgctgccttaacagatgacattactttgtgaaattccttcttctggctcagaagctcccccactgagcaccttgtgacccccacccctgcctgccagagaataatcccctttgactgtaattttccactacctacctaaatcctataaaacagccccacccctatctccctttgctgactctctttttggactcagcctgcctgcacccaggtgattaaaaagctttattgctcacac

SEQ ID NO: 191148 - DNA, 562 bp, Homo sapiens
  Payload ID: 17757
  Gene Name: thymocyte expressed, positive selection associated 1
  ENST ID: ENST00000533446
  CDS Start-End: 381-562
agaaaagaagcagagagagagaagaaatatctactatttttatatacggtgtattcctctcatatcttaaagaaaagctttatgtagaaaaaaagattcatgacgcagcttattgtctgacttttctagggaatccaatcaataaaattgaagactggctgcaggattgcggatactctgaagaaggattttctgaggaagcaggacagtttatctacaatggcttctgcagccatgggaccagctttgaagatgacttgaccctgggagcggaggccacactactggccgccaatggcaaactcttctccaggagtttcctcgagacagccaggccttgccagctacttgatcttggctgtagtttggcttccagcagcatgactggggggaccaacaagactagttcaagcatctcagaaattctggacaaagtgcaagaagatgcagaagatgtcctcttcagtctgggctttggccaagaggatcacaaagacacttctcggatacccgcccgatttttcaccaccccctctcaggccaagggcattgatttccagct

SEQ ID NO: 191149 - DNA, 592 bp, Homo sapiens
  Payload ID: 17757
  Gene Name: thymocyte expressed, positive selection associated 1
  ENST ID: ENST00000532757
  CDS Start-End: 291-592
gttcagttctcacagtgatctagtgtctgacttttctagggaatccaatcaataaaattgaagactggctgcaggattgcggatactctgaagaaggattttctgaggaagcaggacagtttatctacaatggcttctgcagccatgggaccagctttgaagatgacttgaccctgggagcggaggccacactactggccgccaatggcaaactcttctccaggagtttcctcgagacagccaggccttgccagctacttgatcttggctgtagtttggcttccagcagcatgactggggggaccaacaagactagttcaagcatctcagaaattctggacaaagtgcaagaagatgcagaagatgtcctcttcagtctgggctttggccaagaggatcacaaagacacttctcggatacccgcccgatttttcaccaccccctctcaggccaagggcattgatttccagctcttcctgaagtcccaggtgcggaggattgaaatggaagacccctgcctcatgctggccagctttctccaccaccacaacagcatgtggtctgacagaattggcttcaaagaagaaactaa

SEQ ID NO: 191150 - DNA, 783 bp, Homo sapiens
  Payload ID: 17757
  Gene Name: thymocyte expressed, positive selection associated 1
  ENST ID: ENST00000524668
  CDS Start-End: 538-783
cagcagttgaatgagttcagggagaaaggcataatctacaacatgatactttctcacttgcttcacctctgtgcccacacctgtgaaggcctcggcccagcttcgacaactgctttgcctcaaactcagctttctaccagcagacaggccctactctagtgtccatagctccaaccattgagagtacctggctgaaatcaactttgctttctgtgggtatgacctctttcttcagaagctgtagaagaaacttgttgagataaactgcagcaagatatattgaggtcagctacgagggaggatgtacacacttgagtgaggcactgcttggggcataggtacaaaacagacagaagagaagagaggtctgtctcatacatgtcccctagagcactaaaggcaaacctgggactgggccttggaaaccaagtgtggcaggaggaaggctgtatgatataaaggaagaaagcatgcatctggaactcagaacttgacggcattactgttacgggaggccctgaagtctgagccagggccatggaggcctctgtgctgagccccacatcctgggagaaacggcgggcctggctccgtcagagccgtaactggcagacccaggtcctagaagaggaggctgccgccgccctgcaggatgtcccagatcctgagccttccagcctggatgacgttttccaagaagggaatccaatcaataaaattgaagactggctgcaggattgcggatactctgaagaaggattttctgaggaagcaggacagttt

SEQ ID NO: 191151 - DNA, 580 bp, Homo sapiens
  Payload ID: 17757
  Gene Name: thymocyte expressed, positive selection associated 1
  ENST ID: ENST00000528240
  CDS Start-End: 1-450
cagtggagcacagacccagctcagataaggagagagctgtgtagtctaccagccaccaatacggaaacccatccagccaaggatgagactttctggaaaagaaagagcagagcaagaaagagcctcttccagaagaatctcatgggcaggaaggttaagtccttggacctgtccatcacccagcagaaatggaagcagagtgtagacagaccagaactgcgtcggtctttaagccagcagccacaggacacttttgacttggaggaggctttctccaccaccacaacagcatgtggtctgacagaattggcttcaaagaagaaactaaaagccacctcttgcaggaaactgcactgccctcaacatccagcccctactccttggtcctccaaacccccaaactctgcaggagaaaggcagcatggtacatggggaggaagaccagactgagcgatttggaatccacatcctaatgctgccacaagctgcatgcacaaagaccttaggcacatctcttcatttctctgtacactggtttctctactatgtgtgtattaaaatatataatgtggatgatagt

SEQ ID NO: 191152 - DNA, 1753 bp, Homo sapiens
  Payload ID: 17757
  Gene Name: thymocyte expressed, positive selection associated 1
  ENST ID: ENST00000620453
  CDS Start-End: 295-1479
tttcgttcagttctcacagtgatctagtgtctgacttttctagggaatccaatcaataaaattgaagactggctgcaggattgcggatactctgaagaaggattttctgaggaagcaggacagtttatctacaatggcttctgcagccatgggaccagctttgaagatgacttgaccctgggagcggaggccacactactggccgccaatggcaaactcttctccaggagtttcctcgagacagccaggccttgccagctacttgatcttggctgtagtttggcttccagcagcatgactggggggaccaacaagactagttcaagcatctcagaaattctggacaaagtgcaagaagatgcagaagatgtcctcttcagtctgggctttggccaagaggatcacaaagacacttctcggatacccgcccgatttttcaccaccccctctcaggccaagggcattgatttccagctcttcctgaagtcccaggtgcggaggattgaaatggaagacccctgcctcatgctggccagcaggtttaagcaggtgcaaacactggctgtcactgctgatgccttcttctgtctctactcctatgtgtctaagacacctgtccaaaagttcacaccatcccacatgttctggaattgcaaccatccaactgatgtgccatccatcaggattctgtcccgagagcctgaaccccagtcacccagagaccgccttcggaaagccatctccaagatgtgtctgtacacatgcccccgagaccggccaccaccaccccacaacacccccaaaaggaacagtttggaccaagttgtgttggaagtgatggacaaagtgaaagaagagaagcagttcctccagcaagactctgatttggggcaattctcacaggaagatcctgtgccccctgctgagggtaagaagttgcccacttctccctatccatgtgtcttctgctgtgaagaggaaacacagcagaggatgtccacagtgctagcaccatcccaaactctggattcgaaccccaaggtaccctgttgcacacattctctgcccatagaagatccacagtggagcacagacccagctcagataaggagagagctgtgtagtctaccagccaccaatacggaaacccatccagccaaggatgagactttctggaaaagaaagagcagagcaagaaagagcctcttccagaagaatctcatgggcaggaaggttaagtccttggacctgtccatcacccagcagaaatggaagcagagtgtagacagaccagaactgcgtcggtctttaagccagcagccacaggacacttttgacttggaggaggtgcaaagcaacagtgaggaggagcagagtcagagtcgctggcccagcagacccaggcacccccaccaccaccagacttttgctggcaaactcgtgaagctttctccaccaccacaacagcatgtggtctgacagaattggcttcaaagaagaaactaaaagccacctcttgcaggaaactgcactgccctcaacatccagcccctactccttggtcctccaaacccccaaactctgcaggagaaaggcagcatggtacatggggaggaagaccagactgagcgatttggaatccacatcctaatgctgccacaagctgcatgcacaaagaccttaggcacatctcttcatttctctgtacactggtttctctactatgtgtgtattaaaatatataatgtggatg

SEQ ID NO: 191153 - DNA, 835 bp, Homo sapiens
  Payload ID: 17758
  Gene Name: thymocyte nuclear protein 1
  Uniprot ID: Q9P016
  ENST ID: ENST00000352327
  CDS Start-End: 159-659
acagcctgcggcgcagcggaggcggaccgcagtcgagtctgcagagtgttgggtctgtagccagcaaattacttcatcatctagattatccattcagttgatcctaattagcaaggataacaagaatcgtccgcactaaagtcccctgcagcgtgaccatgtcgagaccccggaagaggctggctgggacttctggttcagacaagggactatcaggaaaacgcaccaaaactgagaactcaggtgaggcattagctaaagtggaggactccaaccctcagaagacttcagccactaaaaactgtttgaagaatctaagcagccactggctgatgaagtcagagccagagagccgcctagagaaaggtgtagatgtgaagttcagcattgaggatctcaaagcacagcccaaacagacaacatgctgggatggtgttcgtaactaccaggctcggaacttccttagagccatgaagctgggagaagaagccttcttctaccatagcaactgcaaagagccaggcatcgcaggactcatgaagatcgtgaaagaggcttacccagaccacacacagtttgagaaaaacaatccccattatgacccatctagcaaagaggacaaccctaagtggtccatgaagagtttgattttgttttgagcctggaggaaaaggaaccaagttaactgagatactgctgctggaatgggcgagacattgctgcaaagaagtcaagcttttttcagacaaaaggtgtgagggggcttgcttggtatgcttacctgggcttgtgtacctcagtggtttttgtgtacttttttcaataaaatatcaaa

SEQ ID NO: 191154 - DNA, 1299 bp, Homo sapiens
  Payload ID: 17758
  Gene Name: thymocyte nuclear protein 1
  Uniprot ID: Q9P016
  ENST ID: ENST00000341541
  CDS Start-End: 463-1140
tgcggcgcagcggaggcggaccgcagtcgagtctgcagagtgttgggtctgtagccagcaaattacttcatcatctagattatccattcagttgatcctaattagcaaggataacaaggtaacacaaggcttacttatattcacccaacaaaagtgtctctgtggagccacttcccagtgaactacatactgagataggggttcctggatgagaaggaccaaggacagaaccgagaagagtttaggggcaggttatgcgagatggaaatggcgcagataacggagggaaggatttgagggctcaaacgtaggcgtctgtgtttcgcaaaagttggagacgttctaggctgcctctcgttgcctccatctcgctctgcgcgggttttggaggacattagcattctttcttgtatctccgttgattccagaatcgtccgcactaaagtcccctgcagcgtgaccatgtcgagaccccggaagaggctggctgggacttctggttcagacaagggactatcaggaaaacgcaccaaaactgagaactcaggtgaggcattagctaaagtggaggactccaaccctcagaagacttcagccactaaaaactgtttgaagaatctaagcagccactggctgatgaagtcagagccagagagccgcctagagaaaggtgtagatgtgaagttcagcattgaggatctcaaagcacagcccaaacagacaacatgctgggatggtgttcgtaactaccaggctcggaacttccttagagccatgaagctgggagaagaagccttcttctaccatagcaactgcaaagagccaggcatcgcaggactcatgaagatcgtgaaagaggcttacccagaccacacacagtttgagaaaaacaatccccattatgacccatctagcaaagaggacaaccctaagtggtccatggtggatgtacagtttgttcggatgatgaaacgtttcattcccctggctgagctcaaatcctatcatcaagctcacaaagctactggtggccccttaaaaaatatggttctcttcactcgccagagattatcaatccagcccctgacccaggaagagtttgattttgttttgagcctggaggaaaaggaaccaagttaactgagatactgctgctggaatgggcgagacattgctgcaaagaagtcaagcttttttcagacaaaaggtgtgagggggcttgcttggtatgcttacctgggcttgtgtacctcagtggtttttgtgtacttttttcaataaaatatcaaagttgaagaa

SEQ ID NO: 191155 - DNA, 943 bp, Homo sapiens
  Payload ID: 17758
  Gene Name: thymocyte nuclear protein 1
  Uniprot ID: Q9P016
  ENST ID: ENST00000392594
  CDS Start-End: 107-784
cgccgcgggggtcgcgctgcacagcctgcggcgcagcggaggcggaccgcagtcgagtctgcagagtgttggaatcgtccgcactaaagtcccctgcagcgtgaccatgtcgagaccccggaagaggctggctgggacttctggttcagacaagggactatcaggaaaacgcaccaaaactgagaactcaggtgaggcattagctaaagtggaggactccaaccctcagaagacttcagccactaaaaactgtttgaagaatctaagcagccactggctgatgaagtcagagccagagagccgcctagagaaaggtgtagatgtgaagttcagcattgaggatctcaaagcacagcccaaacagacaacatgctgggatggtgttcgtaactaccaggctcggaacttccttagagccatgaagctgggagaagaagccttcttctaccatagcaactgcaaagagccaggcatcgcaggactcatgaagatcgtgaaagaggcttacccagaccacacacagtttgagaaaaacaatccccattatgacccatctagcaaagaggacaaccctaagtggtccatggtggatgtacagtttgttcggatgatgaaacgtttcattcccctggctgagctcaaatcctatcatcaagctcacaaagctactggtggccccttaaaaaatatggttctcttcactcgccagagattatcaatccagcccctgacccaggaagagtttgattttgttttgagcctggaggaaaaggaaccaagttaactgagatactgctgctggaatgggcgagacattgctgcaaagaagtcaagcttttttcagacaaaaggtgtgagggggcttgcttggtatgcttacctgggcttgtgtacctcagtggtttttgtgtacttttttcaataaaatatcaaagttgaagaa

SEQ ID NO: 191156 - DNA, 893 bp, Homo sapiens
  Payload ID: 17758
  Gene Name: thymocyte nuclear protein 1
  Uniprot ID: Q9P016
  ENST ID: ENST00000392595
  CDS Start-End: 57-734
cctaattagcaaggataacaagaatcgtccgcactaaagtcccctgcagcgtgaccatgtcgagaccccggaagaggctggctgggacttctggttcagacaagggactatcaggaaaacgcaccaaaactgagaactcaggtgaggcattagctaaagtggaggactccaaccctcagaagacttcagccactaaaaactgtttgaagaatctaagcagccactggctgatgaagtcagagccagagagccgcctagagaaaggtgtagatgtgaagttcagcattgaggatctcaaagcacagcccaaacagacaacatgctgggatggtgttcgtaactaccaggctcggaacttccttagagccatgaagctgggagaagaagccttcttctaccatagcaactgcaaagagccaggcatcgcaggactcatgaagatcgtgaaagaggcttacccagaccacacacagtttgagaaaaacaatccccattatgacccatctagcaaagaggacaaccctaagtggtccatggtggatgtacagtttgttcggatgatgaaacgtttcattcccctggctgagctcaaatcctatcatcaagctcacaaagctactggtggccccttaaaaaatatggttctcttcactcgccagagattatcaatccagcccctgacccaggaagagtttgattttgttttgagcctggaggaaaaggaaccaagttaactgagatactgctgctggaatgggcgagacattgctgcaaagaagtcaagcttttttcagacaaaaggtgtgagggggcttgcttggtatgcttacctgggcttgtgtacctcagtggtttttgtgtacttttttcaataaaatatcaaagttgaagaa

SEQ ID NO: 191157 - DNA, 3866 bp, Homo sapiens
  Payload ID: 17759
  Gene Name: thymocyte selection associated
  Uniprot ID: Q8N1K5
  ENST ID: ENST00000368248
  CDS Start-End: 150-2075
agctactccaccccactctggctgtagtgtgacattcctgcctgcctgaggaagaaatggtgagcaggggctgcaattgcagacaagtgtcacccagaagccacaagtttctgtgagcaccaggtctacaaactacccaaggcatagcaatggcattatcactggaagaattcgtccactcccttgacctcaggaccctacccagggttctagaaatccaggcaggcatctatcttgaaggctctatttatgaaatgtttggaaatgaatgctgtttttcaacaggagaagtgattaaaattactggtctcaaagttaagaagatcatagctgaaatttgtgagcagattgaaggttgtgagtctctacagccatttgaactgcctatgaattttccaggtctttttaagattgtggctgataaaactccataccttactatggaagaaatcacaaggaccattcatattggaccaagtagactagggcatccttgcttctatcatcagaaggatataaaactagagaacctcatcataaagcagggtgagcaaatcatgctcaactcagttgaagagattgatggagaaataatggtgagctgtgcagtagcaaggaatcatcaaactcactcatttaatttgcctttgtcacaagaaggagaattctacgagtgtgaagatgaacgtatttacactctaaaggagattgttgaatggaagattcctaagaacagaacaagaactgtaaaccttacagatttttcaaataagtgggactcaacgaatccatttcctaaagacttttatggtaccctgattctcaagcctgtttatgaaattcaaggtgtgatgaaatttcgaaaagatataatccgcatcctccccagtctagatgtcgaagtcaaagacatcactgattcttacgatgctaactggtttcttcagctgttatcaacagaagatctttttgaaatgactagtaaagagttccccatagtgactgaagtcatagaagcacctgaaggaaaccacctgccccaaagcattttacagcctgggaaaaccattgtgatccacaaaaagtaccaggcatcaagaatcttagcttcagaaattagaagcaattttcctaaaagacacttcttgatccccactagctataaaggcaagttcaagcggcgaccgagggagttcccaacggcctatgacctagagatcgctaagagtgaaaaggagcctcttcacgtggtggccaccaaagcgtttcattcccctcatgacaagctgtcatccgtatctgttggggaccagtttctggtgcatcagtcagagacgactgaagtcctctgtgagggaataaaaaaagtggtgaatgttctggcctgtgaaaaaatcctcaaaaagtcctatgaggctgcgctgctccctttgtacatggaaggaggttttgtagaggtgattcatgataagaaacagtacccgatttctgagctctgtaaacagttccgtttgcccttcaatgtgaaggtgtctgtcagggatctttccattgaagaggacgtgttggctgccacaccaggactgcagttggaggaggacattacagactcttacctactcataagtgactttgccaaccccacggagtgctgggaaattcctgtgggccgcttgaatatgactgttcagttagttagtaatttctctagggatgcagaaccatttctagtcaggactctggtagaagagatcactgaagagcaatattacatgatgcggagatatgaaagctcagcctcacatcccccacctcgccctccgaaacacccctcagtagaggaaacaaagttaaccctgctaaccttagcagaagaaaggacggtagacctgcccaagtctcccaagcgtcatcacgtagacataaccaagaaacttcacccaaatcaagctggcctggattcaaaagtactgattggtagtcagaatgatttggtggatgaagagaaagaaaggagcaaccgtggggccacagcaatagcagaaacattcaaaaatgaaaaacatcaaaaataacaagatgtgacagaagccacttaggcagcaaacataaatgttgcagtgaaaaaagaagctagccttctagctgaaaaacgagtattccccaatggactccagaagaaacttgattcatcgctgcaaaggaaagaacaaccttaaaacttttaacagataaaacttacagaaacctatgatatagaattcatatagtctattctgttgtgtctaaatctgtaggcattgtgttgttgttctttaggacgtatttatttaacttgcacattttttcagattcttatttctactaccaacaactaagtaattgggaaataattctgtatttcagtttctgagtaaaaccagtctgaaataggataaaagccaccaaatattttcttttttttccagaatttgttttgccattttttagtgctatcatcattcctaacaagactaacttacagaaaaataattatatctgactgatttaaaatgttcaggtttcttatccaaatcccttggaactatggaaaggagtttgatttcacattcacagtgtatttacaaaatacgctgtgtcataaatatgtttgaattccaacagccaaagccattgagagtcataggagttttccataaccttctcttctatgacccaacaacaagctcatgactgaaatttcaccagatttctgagacgatgtcttaatattctatgtgctatgtaccagataattctttagatgaatgtttcttaggattgtaggaaaattatctagttaatcataatatttgatggaaagaaaaagacaataaaattgtaatataataaatttggctgacaagaaaccaaagtgattcttaattagtatacatcagaatgatgctcttatagttgtaccatctataaaaattactttaagggctctcacattttaataatttatcttattatgtattaagtatacaggaacaatattatttttcctttaacaaaatgaagagacaggctatctggttaatgttacataggaatttaatagtaatgcttgaacttcatccatagatcatactctgtacaaaatttgttagctaacatcctatctcataattattttatgttttgtggagaaatttgttgattttgtaccaaagtgtttctgaagacaataaattgtgagtcaactttagaacaaaaaaaattagagttttttcaatgtttatattctgattaagcttactttaccttacattttttctaagtaacaatgaatcctgatttctagtgtcctaaaaattgcttagtgatttgattgtggtaatatcatttcttatctacaatgtctaaagttttatgggacagtttttcttttatttattttgcctgtttgtgcagataagaacagaaacttttctaagacccacatttggttattgaaggccacagcgaatcttaacctaacagccttgacaaactgcaccataggtgtttttagactcatataatttgttatttttcaaacaatagtgaataattaatatttttgtttggaatttgagaacaattaaatttgtacttttagtaactaccattctttgattagaaaattaagagaatgcatatcttactttggttgtaaattatcaagggctttctaatagaaatcatatataacatttctaaatataagtcctttcacatactgtgtttccagttgtcttgatattgaaaagtgtaataaacttcatgctcacctattggagatttgggaaggttgaaaataaacttcctaatttttatttgta

SEQ ID NO: 191158 - DNA, 4101 bp, Homo sapiens
  Payload ID: 17759
  Gene Name: thymocyte selection associated
  Uniprot ID: Q8N1K5
  ENST ID: ENST00000368250
  CDS Start-End: 263-2188
tgagaggctcttcctggatcccttattttctacaggagaggaggaaaacacctgggatgctccagtgctcttacgcagataatgatcattaacatcagcctctctgatcaaagagctactccaccccactctggctgtagtgtgacattcctgcctgcctgaggaagaaatggtgagcaggggctgcaattgcagacaagtgtcacccagaagccacaagtttctgtgagcaccaggtctacaaactacccaaggcatagcaatggcattatcactggaagaattcgtccactcccttgacctcaggaccctacccagggttctagaaatccaggcaggcatctatcttgaaggctctatttatgaaatgtttggaaatgaatgctgtttttcaacaggagaagtgattaaaattactggtctcaaagttaagaagatcatagctgaaatttgtgagcagattgaaggttgtgagtctctacagccatttgaactgcctatgaattttccaggtctttttaagattgtggctgataaaactccataccttactatggaagaaatcacaaggaccattcatattggaccaagtagactagggcatccttgcttctatcatcagaaggatataaaactagagaacctcatcataaagcagggtgagcaaatcatgctcaactcagttgaagagattgatggagaaataatggtgagctgtgcagtagcaaggaatcatcaaactcactcatttaatttgcctttgtcacaagaaggagaattctacgagtgtgaagatgaacgtatttacactctaaaggagattgttgaatggaagattcctaagaacagaacaagaactgtaaaccttacagatttttcaaataagtgggactcaacgaatccatttcctaaagacttttatggtaccctgattctcaagcctgtttatgaaattcaaggtgtgatgaaatttcgaaaagatataatccgcatcctccccagtctagatgtcgaagtcaaagacatcactgattcttacgatgctaactggtttcttcagctgttatcaacagaagatctttttgaaatgactagtaaagagttccccatagtgactgaagtcatagaagcacctgaaggaaaccacctgccccaaagcattttacagcctgggaaaaccattgtgatccacaaaaagtaccaggcatcaagaatcttagcttcagaaattagaagcaattttcctaaaagacacttcttgatccccactagctataaaggcaagttcaagcggcgaccgagggagttcccaacggcctatgacctagagatcgctaagagtgaaaaggagcctcttcacgtggtggccaccaaagcgtttcattcccctcatgacaagctgtcatccgtatctgttggggaccagtttctggtgcatcagtcagagacgactgaagtcctctgtgagggaataaaaaaagtggtgaatgttctggcctgtgaaaaaatcctcaaaaagtcctatgaggctgcgctgctccctttgtacatggaaggaggttttgtagaggtgattcatgataagaaacagtacccgatttctgagctctgtaaacagttccgtttgcccttcaatgtgaaggtgtctgtcagggatctttccattgaagaggacgtgttggctgccacaccaggactgcagttggaggaggacattacagactcttacctactcataagtgactttgccaaccccacggagtgctgggaaattcctgtgggccgcttgaatatgactgttcagttagttagtaatttctctagggatgcagaaccatttctagtcaggactctggtagaagagatcactgaagagcaatattacatgatgcggagatatgaaagctcagcctcacatcccccacctcgccctccgaaacacccctcagtagaggaaacaaagttaaccctgctaaccttagcagaagaaaggacggtagacctgcccaagtctcccaagcgtcatcacgtagacataaccaagaaacttcacccaaatcaagctggcctggattcaaaagtactgattggtagtcagaatgatttggtggatgaagagaaagaaaggagcaaccgtggggccacagcaatagcagaaacattcaaaaatgaaaaacatcaaaaataacaagatgtgacagaagccacttaggcagcaaacataaatgttgcagtgaaaaaagaagctagccttctagctgaaaaacgagtattccccaatggactccagaagaaacttgattcatcgctgcaaaggaaagaacaaccttaaaacttttaacagataaaacttacagaaacctatgatatagaattcatatagtctattctgttgtgtctaaatctgtaggcattgtgttgttgttctttaggacgtatttatttaacttgcacattttttcagattcttatttctactaccaacaactaagtaattgggaaataattctgtatttcagtttctgagtaaaaccagtctgaaataggataaaagccaccaaatattttcttttttttccagaatttgttttgccattttttagtgctatcatcattcctaacaagactaacttacagaaaaataattatatctgactgatttaaaatgttcaggtttcttatccaaatcccttggaactatggaaaggagtttgatttcacattcacagtgtatttacaaaatacgctgtgtcataaatatgtttgaattccaacagccaaagccattgagagtcataggagttttccataaccttctcttctatgacccaacaacaagctcatgactgaaatttcaccagatttctgagacgatgtcttaatattctatgtgctatgtaccagataattctttagatgaatgtttcttaggattgtaggaaaattatctagttaatcataatatttgatggaaagaaaaagacaataaaattgtaatataataaatttggctgacaagaaaccaaagtgattcttaattagtatacatcagaatgatgctcttatagttgtaccatctataaaaattactttaagggctctcacattttaataatttatcttattatgtattaagtatacaggaacaatattatttttcctttaacaaaatgaagagacaggctatctggttaatgttacataggaatttaatagtaatgcttgaacttcatccatagatcatactctgtacaaaatttgttagctaacatcctatctcataattattttatgttttgtggagaaatttgttgattttgtaccaaagtgtttctgaagacaataaattgtgagtcaactttagaacaaaaaaaattagagttttttcaatgtttatattctgattaagcttactttaccttacattttttctaagtaacaatgaatcctgatttctagtgtcctaaaaattgcttagtgatttgattgtggtaatatcatttcttatctacaatgtctaaagttttatgggacagtttttcttttatttattttgcctgtttgtgcagataagaacagaaacttttctaagacccacatttggttattgaaggccacagcgaatcttaacctaacagccttgacaaactgcaccataggtgtttttagactcatataatttgttatttttcaaacaatagtgaataattaatatttttgtttggaatttgagaacaattaaatttgtacttttagtaactaccattctttgattagaaaattaagagaatgcatatcttactttggttgtaaattatcaagggctttctaatagaaatcatatataacatttctaaatataagtcctttcacatactgtgtttccagttgtcttgatattgaaaagtgtaataaacttcatgctcacctattggagatttgggaaggttgaaaataaacttcctaatttttatttgtatgtgttctcttctatgtttaactctagaataactatcttcctgtaacgattaagttaaaatattctttaactagaattgaaataaattgttcactaaggagggggctgcttgtgctaaaaaa

SEQ ID NO: 191159 - DNA, 631 bp, Homo sapiens
  Payload ID: 17759
  Gene Name: thymocyte selection associated
  ENST ID: ENST00000434358
  CDS Start-End: 1-631
gtctacaaactacccaaggcatagcaatggcattatcactggaagaattcgtccactcccttgacctcaggaccctacccagggttctagaaatccaggcaggcatctatcttgaaggctctatttatgaaatgtttggaaatgaatgctgtttttcaacaggagaagtgattaaaattactggtctcaaagttaagaagatcatagctgaaatttgtgagcagattgaaggttgtgagtctctacagccatttgaactgcctatgaattttccagttcgaaaagatataatccgcatcctccccagtctagatgtcgaagtcaaagacatcactgattcttacgatgctaactggtttcttcagctgttatcaacagaagatctttttgaaatgactagtaaagagttccccatagtgactgaagtcatagaagcacctgaaggaaaccacctgccccaaagcattttacagcctgggaaaaccattgtgatccacaaaaagtaccaggcatcaagaatcttagcttcagaaattagaagcaattttcctaaaagacacttcttgatccccactagctataaaggcaagttcaagcggcgaccgagggagttcccaacggcctatgacct

SEQ ID NO: 191160 - DNA, 3830 bp, Homo sapiens
  Payload ID: 17759
  Gene Name: thymocyte selection associated
  Uniprot ID: Q8N1K5
  ENST ID: ENST00000537166
  CDS Start-End: 219-2039
ttcacagataaagtgttctgcagactcaaggtttatacttacaattacgagatttatatttgcattagtctctttggctggtgggtaggggtgagaggctcttcctggatcccttattttctacaggagaggaggaaaacacctgggatgctccagtgctcttacgcagataatgatcattaacatcagcctctctgatcaaaggctctatttatgaaatgtttggaaatgaatgctgtttttcaacaggagaagtgattaaaattactggtctcaaagttaagaagatcatagctgaaatttgtgagcagattgaaggttgtgagtctctacagccatttgaactgcctatgaattttccaggtctttttaagattgtggctgataaaactccataccttactatggaagaaatcacaaggaccattcatattggaccaagtagactagggcatccttgcttctatcatcagaaggatataaaactagagaacctcatcataaagcagggtgagcaaatcatgctcaactcagttgaagagattgatggagaaataatggtgagctgtgcagtagcaaggaatcatcaaactcactcatttaatttgcctttgtcacaagaaggagaattctacgagtgtgaagatgaacgtatttacactctaaaggagattgttgaatggaagattcctaagaacagaacaagaactgtaaaccttacagatttttcaaataagtgggactcaacgaatccatttcctaaagacttttatggtaccctgattctcaagcctgtttatgaaattcaaggtgtgatgaaatttcgaaaagatataatccgcatcctccccagtctagatgtcgaagtcaaagacatcactgattcttacgatgctaactggtttcttcagctgttatcaacagaagatctttttgaaatgactagtaaagagttccccatagtgactgaagtcatagaagcacctgaaggaaaccacctgccccaaagcattttacagcctgggaaaaccattgtgatccacaaaaagtaccaggcatcaagaatcttagcttcagaaattagaagcaattttcctaaaagacacttcttgatccccactagctataaaggcaagttcaagcggcgaccgagggagttcccaacggcctatgacctagagatcgctaagagtgaaaaggagcctcttcacgtggtggccaccaaagcgtttcattcccctcatgacaagctgtcatccgtatctgttggggaccagtttctggtgcatcagtcagagacgactgaagtcctctgtgagggaataaaaaaagtggtgaatgttctggcctgtgaaaaaatcctcaaaaagtcctatgaggctgcgctgctccctttgtacatggaaggaggttttgtagaggtgattcatgataagaaacagtacccgatttctgagctctgtaaacagttccgtttgcccttcaatgtgaaggtgtctgtcagggatctttccattgaagaggacgtgttggctgccacaccaggactgcagttggaggaggacattacagactcttacctactcataagtgactttgccaaccccacggagtgctgggaaattcctgtgggccgcttgaatatgactgttcagttagttagtaatttctctagggatgcagaaccatttctagtcaggactctggtagaagagatcactgaagagcaatattacatgatgcggagatatgaaagctcagcctcacatcccccacctcgccctccgaaacacccctcagtagaggaaacaaagttaaccctgctaaccttagcagaagaaaggacggtagacctgcccaagtctcccaagcgtcatcacgtagacataaccaagaaacttcacccaaatcaagctggcctggattcaaaagtactgattggtagtcagaatgatttggtggatgaagagaaagaaaggagcaaccgtggggccacagcaatagcagaaacattcaaaaatgaaaaacatcaaaaataacaagatgtgacagaagccacttaggcagcaaacataaatgttgcagtgaaaaaagaagctagccttctagctgaaaaacgagtattccccaatggactccagaagaaacttgattcatcgctgcaaaggaaagaacaaccttaaaacttttaacagataaaacttacagaaacctatgatatagaattcatatagtctattctgttgtgtctaaatctgtaggcattgtgttgttgttctttaggacgtatttatttaacttgcacattttttcagattcttatttctactaccaacaactaagtaattgggaaataattctgtatttcagtttctgagtaaaaccagtctgaaataggataaaagccaccaaatattttcttttttttccagaatttgttttgccattttttagtgctatcatcattcctaacaagactaacttacagaaaaataattatatctgactgatttaaaatgttcaggtttcttatccaaatcccttggaactatggaaaggagtttgatttcacattcacagtgtatttacaaaatacgctgtgtcataaatatgtttgaattccaacagccaaagccattgagagtcataggagttttccataaccttctcttctatgacccaacaacaagctcatgactgaaatttcaccagatttctgagacgatgtcttaatattctatgtgctatgtaccagataattctttagatgaatgtttcttaggattgtaggaaaattatctagttaatcataatatttgatggaaagaaaaagacaataaaattgtaatataataaatttggctgacaagaaaccaaagtgattcttaattagtatacatcagaatgatgctcttatagttgtaccatctataaaaattactttaagggctctcacattttaataatttatcttattatgtattaagtatacaggaacaatattatttttcctttaacaaaatgaagagacaggctatctggttaatgttacataggaatttaatagtaatgcttgaacttcatccatagatcatactctgtacaaaatttgttagctaacatcctatctcataattattttatgttttgtggagaaatttgttgattttgtaccaaagtgtttctgaagacaataaattgtgagtcaactttagaacaaaaaaaattagagttttttcaatgtttatattctgattaagcttactttaccttacattttttctaagtaacaatgaatcctgatttctagtgtcctaaaaattgcttagtgatttgattgtggtaatatcatttcttatctacaatgtctaaagttttatgggacagtttttcttttatttattttgcctgtttgtgcagataagaacagaaacttttctaagacccacatttggttattgaaggccacagcgaatcttaacctaacagccttgacaaactgcaccataggtgtttttagactcatataatttgttatttttcaaacaatagtgaataattaatatttttgtttggaatttgagaacaattaaatttgtacttttagtaactaccattctttgattagaaaattaagagaatgcatatcttactttggttgtaaattatcaagggctttctaatagaaatcatatataacatttctaaatataagtcctttcacatactgtgtttccagttgtcttgatattgaaaagtgtaataaacttcatgctcacctattggagatttgggaaggttgaaaataaacttcctaatttttatttgta

SEQ ID NO: 191161 - DNA, 4101 bp, Homo sapiens; identical to SEQ ID NO: 191158
  Payload ID: 17759
  Gene Name: thymocyte selection associated
  Uniprot ID: Q8N1K5
  ENST ID: ENST00000610842
  CDS Start-End: 263-2188

SEQ ID NO: 191162 - DNA, 3866 bp, Homo sapiens; identical to SEQ ID NO: 191157
  Payload ID: 17759
  Gene Name: thymocyte selection associated
  Uniprot ID: Q8N1K5
  ENST ID: ENST00000613862
  CDS Start-End: 150-2075

SEQ ID NO: 191163 - DNA, 3179 bp, Homo sapiens
  Payload ID: 17759
  Gene Name: thymocyte selection associated
  Uniprot ID: Q8N1K5
  ENST ID: ENST00000614155
  CDS Start-End: 185-2005
atacttacaattacgagatttatatttgcattagtctctttggctggtgggtaggggtgagaggctcttcctggatcccttattttctacaggagaggaggaaaacacctgggatgctccagtgctcttacgcagataatgatcattaacatcagcctctctgatcaaaggctctatttatgaaatgtttggaaatgaatgctgtttttcaacaggagaagtgattaaaattactggtctcaaagttaagaagatcatagctgaaatttgtgagcagattgaaggttgtgagtctctacagccatttgaactgcctatgaattttccaggtctttttaagattgtggctgataaaactccataccttactatggaagaaatcacaaggaccattcatattggaccaagtagactagggcatccttgcttctatcatcagaaggatataaaactagagaacctcatcataaagcagggtgagcaaatcatgctcaactcagttgaagagattgatggagaaataatggtgagctgtgcagtagcaaggaatcatcaaactcactcatttaatttgcctttgtcacaagaaggagaattctacgagtgtgaagatgaacgtatttacactctaaaggagattgttgaatggaagattcctaagaacagaacaagaactgtaaaccttacagatttttcaaataagtgggactcaacgaatccatttcctaaagacttttatggtaccctgattctcaagcctgtttatgaaattcaaggtgtgatgaaatttcgaaaagatataatccgcatcctccccagtctagatgtcgaagtcaaagacatcactgattcttacgatgctaactggtttcttcagctgttatcaacagaagatctttttgaaatgactagtaaagagttccccatagtgactgaagtcatagaagcacctgaaggaaaccacctgccccaaagcattttacagcctgggaaaaccattgtgatccacaaaaagtaccaggcatcaagaatcttagcttcagaaattagaagcaattttcctaaaagacacttcttgatccccactagctataaaggcaagttcaagcggcgaccgagggagttcccaacggcctatgacctagagatcgctaagagtgaaaaggagcctcttcacgtggtggccaccaaagcgtttcattcccctcatgacaagctgtcatccgtatctgttggggaccagtttctggtgcatcagtcagagacgactgaagtcctctgtgagggaataaaaaaagtggtgaatgttctggcctgtgaaaaaatcctcaaaaagtcctatgaggctgcgctgctccctttgtacatggaaggaggttttgtagaggtgattcatgataagaaacagtacccgatttctgagctctgtaaacagttccgtttgcccttcaatgtgaaggtgtctgtcagggatctttccattgaagaggacgtgttggctgccacaccaggactgcagttggaggaggacattacagactcttacctactcataagtgactttgccaaccccacggagtgctgggaaattcctgtgggccgcttgaatatgactgttcagttagttagtaatttctctagggatgcagaaccatttctagtcaggactctggtagaagagatcactgaagagcaatattacatgatgcggagatatgaaagctcagcctcacatcccccacctcgccctccgaaacacccctcagtagaggaaacaaagttaaccctgctaaccttagcagaagaaaggacggtagacctgcccaagtctcccaagcgtcatcacgtagacataaccaagaaacttcacccaaatcaagctggcctggattcaaaagtactgattggtagtcagaatgatttggtggatgaagagaaagaaaggagcaaccgtggggccacagcaatagcagaaacattcaaaaatgaaaaacatcaaaaataacaagatgtgacagaagccacttaggcagcaaacataaatgttgcagtgaaaaaagaagctagccttctagctgaaaaacgagtattccccaatggactccagaagaaacttgattcatcgctgcaaaggaaagaacaaccttaaaacttttaacagataaaacttacagaaacctatgatatagaattcatatagtctattctgttgtgtctaaatctgtaggcattgtgttgttgttctttaggacgtatttatttaacttgcacattttttcagattcttatttctactaccaacaactaagtaattgggaaataattctgtatttcagtttctgagtaaaaccagtctgaaataggataaaagccaccaaatattttcttttttttccagaatttgttttgccattttttagtgctatcatcattcctaacaagactaacttacagaaaaataattatatctgactgatttaaaatgttcaggtttcttatccaaatcccttggaactatggaaaggagtttgatttcacattcacagtgtatttacaaaatacgctgtgtcataaatatgtttgaattccaacagccaaagccattgagagtcataggagttttccataaccttctcttctatgacccaacaacaagctcatgactgaaatttcaccagatttctgagacgatgtcttaatattctatgtgctatgtaccagataattctttagatgaatgtttcttaggattgtaggaaaattatctagttaatcataatatttgatggaaagaaaaagacaataaaattgtaatataataaatttggctgacaagaaaccaaagtgattcttaattagtatacatcagaatgatgctcttatagttgtaccatctataaaaattactttaagggctctcacattttaataatttatcttattatgtattaagtatacaggaacaatattatttttcctttaacaaaatgaagagacaggctatctggttaatgttacataggaatttaatagtaatgcttgaacttcatccatagatcatactctgtacaaaatttgttagctaacatcctatctcataattattttatgttttgtggagaaatttgttgattttgtaccaaagtgtttctgaagacaataaattgtgagtcaacttt

SEQ ID NO: 191164 - DNA, 631 bp, Homo sapiens; identical to SEQ ID NO: 191159
  Payload ID: 17759
  Gene Name: thymocyte selection associated
  ENST ID: ENST00000626111
  CDS Start-End: 1-631

SEQ ID NO: 191165 - DNA, 3179 bp, Homo sapiens; identical to SEQ ID NO: 191163
  Payload ID: 17759
  Gene Name: thymocyte selection associated
  ENST ID: ENST00000626040
  CDS Start-End: 317-2005

SEQ ID NO: 191166 - DNA, 2786 bp, Homo sapiens
  Payload ID: 17759
  Gene Name: thymocyte selection associated
  Uniprot ID: Q8N1K5
  ENST ID: ENST00000630369
  CDS Start-End: 142-2184
caccccactctggctgtagtgtgacattcctgcctgcctgaggaagaaatggtgagcaggggctgcaattgcagacaagtgtcacccagaagccacaagtttctgtgagcaccaggtctacaaactacccaaggcatagcaatggcattatcactggaagaattcgtccactcccttgacctcaggaccctacccagggttctagaaatccaggcaggcatctatcttgaaggctctatttatgaaatgtttggaaatgaatgctgtttttcaacaggagaagtgattaaaattactggtctcaaagttaagaagatcatagctgaaatttgtgagcagattgaaggttgtgagtctctacagccatttgaactgcctatgaattttccaggtctttttaagattgtggctgataaaactccataccttactatggaagaaatcacaaggaccattcatattggaccaagtagactagggcatccttgcttctatcatcagaaggatataaaactagagaacctcatcataaagcagggtgagcaaatcatgctcaactcagttgaagagattgatggagaaataatggtgagctgtgcagtagcaaggaatcatcaaactcactcatttaatttgcctttgtcacaagaaggagaattctacgagtgtgaagatgaacgtatttacactctaaaggagattgttgaatggaagattcctaagaacagaacaagaactgtaaaccttacagatttttcaaataagtgggactcaacgaatccatttcctaaagacttttatggtaccctgattctcaagcctgtttatgaaattcaaggtgtgatgaaatttcgaaaagatataatccgcatcctccccagtctagatgtcgaagtcaaagacatcactgattcttacgatgctaactggtttcttcagctgttatcaacagaagatctttttgaaatgactagtaaagagttccccatagtgactgaagtcatagaagcacctgaaggaaaccacctgccccaaagcattttacagcctgggaaaaccattgtgatccacaaaaagtaccaggcatcaagaatcttagcttcagaaattagaagcaattttcctaaaagacacttcttgatccccactagctataaaggcaagttcaagcggcgaccgagggagttcccaacggcctatgacctagagatcgctaagagtgaaaaggagcctcttcacgtggtggccaccaaagcgtttcattcccctcatgacaagctgtcatccgtatctgttggggaccagtttctggtgcatcagtcagagacgactgaagtcctctgtgagggaataaaaaaagtggtgaatgttctggcctgtgaaaaaatcctcaaaaagtcctatgaggctgcgctgctccctttgtacatggaaggaggttttgtagaggtgattcatgataagaaacagtacccgatttctgagctctgtaaacagttccgtttgcccttcaatgtgaaggtgtctgtcagggatctttccattgaagaggacgtgttggctgccacaccaggactgcagttggaggaggacattacagactcttacctactcataagtgactttgccaaccccacggagtgctgggaaattcctgtgggccgcttgaatatgactgttcagttagttagtaatttctctagggatgcagaaccatttctagtcaggactctggtagaagagatcactgaagagcaatattacatgatgcggagatatgaaagctcagcctcacatcccccacctcgccctccgaaacacccctcagtagaggaaacaaagttaaccctgctaaccttagcagaagaaaggacggtagacctgcccaagtctcccaaggctggagtgcaatggcgtgatcttggctcgctgcaacctctgcctcccgggttcaagcaattctctgcctcagcctcccacgtagctgggattacaggcaccccccaccacgtccagcgtcatcacgtagacataaccaagaaacttcacccaaatcaagctggcctggattcaaaagtactgattggtagtcagaatgatttggtggatgaagagaaagaaaggagcaaccgtggggccacagcaatagcagaaacattcaaaaatgaaaaacatcaaaaataacaagatgtgacagaagccacttaggcagcaaacataaatgttgcagtgaaaaaagaagctagccttctagctgaaaaacgagtattccccaatggactccagaagaaacttgattcatcgctgcaaaggaaagaacaaccttaaaacttttaacagataaaacttacagaaacctatgatatagaattcatatagtctattctgttgtgtctaaatctgtaggcattgtgttgttgttctttaggacgtatttatttaacttgcacattttttcagattcttatttctactaccaacaactaagtaattgggaaataattctgtatttcagtttctgagtaaaaccagtctgaaataggataaaagccaccaaatattttcttttttttccagaatttgttttgccattttttagtgctatcatcattcctaacaagactaacttacagaaaaataattatatctgactgatttaaaatgttcaggtttcttatccaaatcccttggaactatggaaaggagtttgatttcacattcacagtgtatttacaaaatacgctgtgtcataaatatgtttgaattccaacagccaaagccattga

SEQ ID NO: 191167 - DNA, 2337 bp, Homo sapiens
  Payload ID: 17760
  Gene Name: thymocyte selection associated family member 2
  Uniprot ID: Q5TEJ8
  ENST ID: ENST00000328928
  CDS Start-End: 30-1574
cagtctgagcccagagagccgcggggaccatggagccggtgccgctgcaggacttcgtgcgcgccttggaccccgcctccctcccgcgcgtgctgcgggtctgctcgggggtctacttcgagggctccatctatgagatctctgggaatgagtgctgcctctccacgggggacctgatcaaggtcacccaggtccgcctccagaaggtggtctgtgagaacccgaagaccagccagaccatggagctcgcccccaacttccagggctacttcacccccctcaacaccccacagagctatgaaaccctggaggagctggtctctgccacaactcagagctccaagcagctgcccacttgcttcatgtcgacccacaggattgtcacagagggcagggtggtgactgaggaccagctcctcatgcttgaggctgtggtgatgcacctcgggatccgctctgcccgctgtgtcctgggcatggagggtcagcaggtcatcctgcacctgcccctatcccagaaggggcccttctggacatgggagcctagtgcccctcgaactctgctccaggtcctacaggatccagccctgaaagacctcgtcctcacctgccccaccctgccctggcattccctgatcctgcggccccagtatgagatccaagccatcatgcacatgcgcaggaccattgtcaagatcccttctaccctggaggtcgacgtggaggacgtcaccgcctcctcccggcacgtccactttatcaaaccgctgctgctgagcgaggtcctggcctgggaaggccctttccccctgtccatggagatcctggagcggctgagtgaccaggctggggaggatgaggaggaagagtgcaaagaggaggcagagagcccagagcgggtcctgctgcccttccacttccctggcagtttcgtggaggagatgagtgacagccggcgctacagcctggcagatctgactgcccagttttcactgccttgtgaggtcaaggtggtggccaaggacaccagccaccccactgaccctctgacctccttcctgggcctgcggctggaggagaagatcacagagccattcttggtggtgagcctagactctgagcctgggatgtgctttgagatccctccccggtggctggacctgactgttgtgaaggccaaggggcagccagacttgccagaggggtctctccccatagccacagtggaggagctgacagacaccttctattatcgtcttcggaagttaccagcctgtgagatccaagcccccccacccaggccccctaaaaatcagggcctcagcaagcagaggagacacagcagtgagggaggcgtcaagtcttctcaagtcttaggattgcagcaacacgctcggctgcccaaacccaaggcgaagaccttgccagagttcatcaaggatggctccagtacgtacagcaagattcctgcccacaggaagggccacaggcccgctaagccccaaaggcaggatctagatgatgatgaacatgattatgaagaaatacttgagcaatttcagaaaaccatctaagtgctggaggaaccacgcttcctaactgctgcttctcagggaatccgacaccagccaaccattttaagcctctaaaagacctcgggcaagtctcacagaaactgagctgcagacggggagtagctttgtggaaactgatttgatggacactgcaccagcttccttcaggttctagattcttgctacttagggcgggctggtttggacctaacatctcgcacgtgactccctcagcctcagagccttgggatgcagagcagctggcagggttcctctcaatcctgcaaccccagctgtcccaccggtggatgcagaggggaatccgaggccatcaaccttggtgacagcagcgcagtgccaatgctgatcacactgcatgggagattttgttaacgtctgccacccccactctcacccccaagctctaagcccccgggaggcctggactgtcttcctcatctctgtagcaccaagcctgatagatctgtatatggtaaacaggggtttaaccacatgtggttaacatggattaatgtgggaacttggcttcaagaacacaaccttaggaccttgggccccaaaagctggtggtgaaatgaggaggagccaatttaagaagacccttatggagacctgaggctgcagaaactggtaggtttcatcaggtggttaaagtcgtcaaagttgtaagtgactaaccaagattatttcattttaaaaccatagaataaaaatgacacctgagcttctctatgaatgagaa

SEQ ID NO: 191168 - DNA, 2687 bp, Homo sapiens
  Payload ID: 17760
  Gene Name: thymocyte selection associated family member 2
  Uniprot ID: Q5TEJ8
  ENST ID: ENST00000373921
  CDS Start-End: 5-1936
gaccatggagccggtgccgctgcaggacttcgtgcgcgccttggaccccgcctccctcccgcgcgtgctgcgggtctgctcgggggtctacttcgagggctccatctatgagatctctgggaatgagtgctgcctctccacgggggacctgatcaaggtcacccaggtccgcctccagaaggtggtctgtgagaacccgaagaccagccagaccatggagctcgcccccaacttccagggctacttcacccccctcaacaccccacagagctatgaaaccctggaggagctggtctctgccacaactcagagctccaagcagctgcccacttgcttcatgtcgacccacaggattgtcacagagggcagggtggtgactgaggaccagctcctcatgcttgaggctgtggtgatgcacctcgggatccgctctgcccgctgtgtcctgggcatggagggtcagcaggtcatcctgcacctgcccctatcccagaaggggcccttctggacatgggagcctagtgcccctcgaactctgctccaggtcctacaggatccagccctgaaagacctcgtcctcacctgccccaccctgccctggcattccctgatcctgcggccccagtatgagatccaagccatcatgcacatgcgcaggaccattgtcaagatcccttctaccctggaggtcgacgtggaggacgtcaccgcctcctcccggcacgtccactttatcaaaccgctgctgctgagcgaggtcctggcctgggaaggccctttccccctgtccatggagatcctggaggttcctgagggccgccccatcttcctcagcccgtgggtgggctccttgcaaaaaggccagaggctttgcgtctatggcctagcctcaccaccctggcgggtcctggcctcaagcaagggccgcaaggtgcccaggcacttcctggtgtcagggggctaccaaggcaagctgcggcggcggccaagggagttccccacggcctatgacctcctaggtgctttccagccaggccggccactccgggtggtggccacaaaggactgtgagggcgagagggaggagaatcccgagttcacgtccctggctgtgggtgaccggctggaggtgctggggcctggccaggcccatggggcccagggcagtgacgtggatgtcttggtttgtcagcggctgagtgaccaggctggggaggatgaggaggaagagtgcaaagaggaggcagagagcccagagcgggtcctgctgcccttccacttccctggcagtttcgtggaggagatgagtgacagccggcgctacagcctggcagatctgactgcccagttttcactgccttgtgaggtcaaggtggtggccaaggacaccagccaccccactgaccctctgacctccttcctgggcctgcggctggaggagaagatcacagagccattcttggtggtgagcctagactctgagcctgggatgtgctttgagatccctccccggtggctggacctgactgttgtgaaggccaaggggcagccagacttgccagaggggtctctccccatagccacagtggaggagctgacagacaccttctattatcgtcttcggaagttaccagcctgtgagatccaagcccccccacccaggccccctaaaaatcagggcctcagcaagcagaggagacacagcagtgagggaggcgtcaagtcttctcaagtcttaggattgcagcaacacgctcggctgcccaaacccaaggcgaagaccttgccagagttcatcaaggatggctccagtacgtacagcaagattcctgcccacaggaagggccacaggcccgctaagccccaaaggcaggatctagatgatgatgaacatgattatgaagaaatacttgagcaatttcagaaaaccatctaagtgctggaggaaccacgcttcctaactgctgcttctcagggaatccgacaccagccaaccattttaagcctctaaaagacctcgggcaagtctcacagaaactgagctgcagacggggagtagctttgtggaaactgatttgatggacactgcaccagcttccttcaggttctagattcttgctacttagggcgggctggtttggacctaacatctcgcacgtgactccctcagcctcagagccttgggatgcagagcagctggcagggttcctctcaatcctgcaaccccagctgtcccaccggtggatgcagaggggaatccgaggccatcaaccttggtgacagcagcgcagtgccaatgctgatcacactgcatgggagattttgttaacgtctgccacccccactctcacccccaagctctaagcccccgggaggcctggactgtcttcctcatctctgtagcaccaagcctgatagatctgtatatggtaaacaggggtttaaccacatgtggttaacatggattaatgtgggaacttggcttcaagaacacaaccttaggaccttgggccccaaaagctggtggtgaaatgaggaggagccaatttaagaagacccttatggagacctgaggctgcagaaactggtaggtttcatcaggtggttaaagtcgtcaaagttgtaagtgactaaccaagattatttcattttaaaaccatagaataaaaatgacacctgagcttctc

SEQ ID NO: 191169 - DNA, 1650 bp, Homo sapiens
  Payload ID: 17760
  Gene Name: thymocyte selection associated family member 2
  Uniprot ID: Q5TEJ8
  ENST ID: ENST00000373925
  CDS Start-End: 29-811
agtctgagcccagagagccgcggggaccatggagccggtgccgctgcaggacttcgtgcgcgccttggaccccgcctccctcccgcgcgtgctgcgggtctgctcgggggtctacttcgagggctccatctatgagatctctgggaatgagtgctgcctctccacgggggacctgatcaaggtcacccaggtccgcctccagaaggtggtctgtgagaacccgaagaccagccagaccatggagctcgcccccaacttccagggctacttcacccccctcaacaccccacagagctatgaaaccctggaggagctggtctctgccacaactcagagctccaagcagctgcccacttgcttcatgtcgacccacaggattgtcacagagggcagggtggtgactgaggaccagctcctcatgcttgaggctgtggtgatgcacctcgggatccgctctgcccgctgtgtcctgggcatggagggtcagcaggtcatcctgcacctgcccctatcccagaaggggcccttctggacatgggagcctagtgcccctcgaactctgctccaggtcctacaggatccagccctgaaagacctcgtcctcacctgccccaccctgccctggcattccctgatcctgcggccccagtatgagatccaagccatcatgcacatcttctcaagtcttaggattgcagcaacacgctcggctgcccaaacccaaggcgaagaccttgccagagttcatcaaggatggctccagtacgtacagcaagattcctgcccacaggaagggccacaggcccgctaagccccaaaggcaggatctagatgatgatgaacatgattatgaagaaatacttgagcaatttcagaaaaccatctaagtgctggaggaaccacgcttcctaactgctgcttctcagggaatccgacaccagccaaccattttaagcctctaaaagacctcgggcaagtctcacagaaactgagctgcagacggggagtagctttgtggaaactgatttgatggacactgcaccagcttccttcaggttctagattcttgctacttagggcgggctggtttggacctaacatctcgcacgtgactccctcagcctcagagccttgggatgcagagcagctggcagggttcctctcaatcctgcaaccccagctgtcccaccggtggatgcagaggggaatccgaggccatcaaccttggtgacagcagcgcagtgccaatgctgatcacactgcatgggagattttgttaacgtctgccacccccactctcacccccaagctctaagcccccgggaggcctggactgtcttcctcatctctgtagcaccaagcctgatagatctgtatatggtaaacaggggtttaaccacatgtggttaacatggattaatgtgggaacttggcttcaagaacacaaccttaggaccttgggccccaaaagctggtggtgaaatgaggaggagccaatttaagaagacccttatggagacctgaggctgcagaaactggtaggtttcatcaggtggttaaagtcgtcaaagttgtaagtgactaaccaagattatttcattttaaaaccatagaataaaaatgacacctgagcttctctatgaatgagaa

SEQ ID NO: 191170 - DNA, 1082 bp, Homo sapiens
  Payload ID: 17760
  Gene Name: thymocyte selection associated family member 2
  Uniprot ID: Q5TEJ8
  ENST ID: ENST00000373927
  CDS Start-End: 24-395
gagcccagagagccgcggggaccatggagccggtgccgctgcaggacttcgtgcgcgccttggaccccgcctccctcccgcgcgtgctgcgggtctgctcgggggtctacttcgagggctccatctatgagatctctgggaatgagtgctgcctctccacgggggacctgatcaaggtcacccaggtccgcctccagaaggtggtctgtgagaacccgaagaccagccagaccatggagctcgcccccaacttccaggtcttctcaagtcttaggattgcagcaacacgctcggctgcccaaacccaaggcgaagaccttgccagagttcatcaaggatggctccagtacgtacagcaagattcctgcccacaggaagggccacaggcccgctaagccccaaaggcaggatctagatgatgatgaacatgattatgaagaaatacttgagcaatttcagaaaaccatctaagtgctggaggaaccacgcttcctaactgctgcttctcagggaatccgacaccagccaaccattttaagcctctaaaagacctcgggcaagtctcacagaaactgagctgcagacggggagtagctttgtggaaactgatttgatggacactgcaccagcttccttcaggttctagattcttgctacttagggcgggctggtttggacctaacatctcgcacgtgactccctcagcctcagagccttgggatgcagagcagctggcagggttcctctcaatcctgcaaccccagctgtcccaccggtggatgcagaggggaatccgaggccatcaaccttggtgacagcagcgcagtgccaatgctgatcacactgcatgggagattttgttaacgtctgccacccccactctcacccccaagctctaagcccccgggaggcctggactgtcttcctcatctctgtagcaccaagcctgatagatctgtatatggtaaacaggggtttaaccacatgtggttaacatggattaatgtgggaacttggcttcaagaacacaaccttaggaccttgggccccaaaagctggtggtgaaatgaggaggagccaat

SEQ ID NO: 191171 - DNA, 415 bp, Homo sapiens
  Payload ID: 17760
  Gene Name: thymocyte selection associated family member 2
  ENST ID: ENST00000427466
  CDS Start-End: 17-415
gagagccgcggggaccatggagccggtgccgctgcaggacttcgtgcgcgccttggaccccgcctccctcccgcgcgtgctgcgggtctgctcgggggtctacttcgagggctacttcacccccctcaacaccccacagagctatgaaaccctggaggagctggtctctgccacaactcagagctccaagcagctgcccacttgcttcatgtcgacccacaggattgtcacagagggcagggtggtgactgaggaccagctcctcatgcttgaggctgtggtgatgcacctcgggatccgctctgcccgctgtgtcctgggcatggagggtcagcaggtcatcctgcacctgcccctatcccagaaggggcccttctggacatgggagcctagtgcccctcgaactctgctccag

SEQ ID NO: 191172 - DNA, 1926 bp, Homo sapiens
  Payload ID: 17760
  Gene Name: thymocyte selection associated family member 2
  ENST ID: ENST00000456990
  CDS Start-End: 1-1175
ccacttgcttcatgtcgacccacaggattgtcacagagggcagggtggtgactgaggaccagctcctcatgcttgaggctgtggtgatgcacctcgggatccgctctgcccgctgtgtcctgggcatggagggtcagcaggtcatcctgcacctgcccctatcccagaaggggcccttctggacatgggagcctagtgcccctcgaactctgctccaggtcctacaggatccagccctgaaagacctcgtcctcacctgccccaccctgccctggcattccctgatcctgcggccccagtatgagatccaagccatcatgcacatgcgcaggaccattgtcaagatcccttctaccctggaggtcgacgtggaggacgtcaccgcctcctcccggcacgtccactttatcaaaccgctgctgctgagcgagcggctgagtgaccaggctggggaggatgaggaggaagagtgcaaagaggaggcagagagcccagagcgggtcctgctgcccttccacttccctggcagtttcgtggaggagatgagtgacagccggcgctacagcctggcagatctgactgcccagttttcactgccttgtgaggtcaaggtggtggccaaggacaccagccaccccactgaccctctgacctccttcctgggcctgcggctggaggagaagatcacagagccattcttggtggtgagcctagactctgagcctgggatgtgctttgagatccctccccggtggctggacctgactgttgtgaaggccaaggggcagccagacttgccagaggggtctctccccatagccacagtggaggagctgacagacaccttctattatcgtcttcggaagttaccagcctgtgagatccaagcccccccacccaggccccctaaaaatcagggcctcagcaagcagaggagacacagcagtgagggaggcgtcaagtcttctcaagtcttaggattgcagcaacacgctcggctgcccaaacccaaggcgaagaccttgccagagttcatcaaggatggctccagtacgtacagcaagattcctgcccacaggaagggccacaggcccgctaagccccaaaggcaggatctagatgatgatgaacatgattatgaagaaatacttgagcaatttcagaaaaccatctaagtgctggaggaaccacgcttcctaactgctgcttctcagggaatccgacaccagccaaccattttaagcctctaaaagacctcgggcaagtctcacagaaactgagctgcagacggggagtagctttgtggaaactgatttgatggacactgcaccagcttccttcaggttctagattcttgctacttagggcgggctggtttggacctaacatctcgcacgtgactccctcagcctcagagccttgggatgcagagcagctggcagggttcctctcaatcctgcaaccccagctgtcccaccggtggatgcagaggggaatccgaggccatcaaccttggtgacagcagcgcagtgccaatgctgatcacactgcatgggagattttgttaacgtctgccacccccactctcacccccaagctctaagcccccgggaggcctggactgtcttcctcatctctgtagcaccaagcctgatagatctgtatatggtaaacaggggtttaaccacatgtggttaacatggattaatgtgggaacttggcttcaagaacacaaccttaggaccttgggccccaaaagctggtggtgaaatgaggaggagccaatttaagaagacccttatggagacctgaggctgcagaaactggtaggtttcatcaggtggttaaagtcgtcaaagttgtaagtgactaaccaagattatttcattttaaaaccatagaataaaaatgacacctgagcttctc

SEQ ID NO: 191173 - DNA, 754 bp, Homo sapiens
  Payload ID: 17760
  Gene Name: thymocyte selection associated family member 2
  ENST ID: ENST00000442118
  CDS Start-End: 15-754
gagccgcggggaccatggagccggtgccgctgcaggacttcgtgcgcgccttggaccccgcctccctcccgcgcgtgctgcgggtctgctcgggggtctacttcgagggctccatctatgagatctctgggaatgagtgctgcctctccacgggggacctgatcaaggtcacccaggtccgcctccagaaggtggtctgtgagaacccgaagaccagccagaccatggagctcgcccccaacttccaggtgcgcaggaccattgtcaagatcccttctaccctggaggtcgacgtggaggacgtcaccgcctcctcccggcacgtccactttatcaaaccgctgctgctgagcgaggtcctggcctgggaaggccctttccccctgtccatggagatcctggaggttcctgagggccgccccatcttcctcagcccgtgggtgggctccttgcaaaaaggccagaggctttgcgtctatggcctagcctcaccaccctggcgggtcctggcctcaagcaagggccgcaaggtgcccaggcacttcctggtgtcagggggctaccaaggcaagctgcggcggcggccaagggagttccccacggcctatgacctcctaggtgctttccagccaggccggccactccgggtggtggccacaaaggactgtgagggcgagagggaggagaatcccgagttcacgtccctggctgtgggtgaccggctggaggtgctggggcctggccaggcccatgg

SEQ ID NO: 191174 - DNA, 4131 bp, Homo sapiens
  Payload ID: 17761
  Gene Name: thymocyte selection-associated high mobility group box
  Uniprot ID: O94900
  ENST ID: ENST00000361421
  CDS Start-End: 222-1802
ggtgcgcgccgcggcttgggggagagttgagcgcttttcccccctcttttttttttttttcctcttcttcttaaacaaaccacaaacggatgtgagggaaggaaggtgtttcttttactcctgagcccagacacctcactctgttccgtctaagcttgttttgctgaacacttttttttaaaaaaggaaaaagaaaaggagttgcttgatgtgagagtgaaatggacgtaagattttatccacctccagcccagcccgccgctgcgcccgacgctccctgtctgggaccttctccctgcctggacccctactattgcaacaagtttgacggtgagaacatgtatatgagcatgacagagccgagccaggactatgtgccagccagccagtcctaccctggtccaagcctggaaagtgaagacttcaacattccaccaattactcctccttccctcccagaccactcgctggtgcacctgaatgaagttgagtctggttaccattctctgtgtcaccccatgaaccataatggcctgctaccatttcatccacaaaacatggacctccctgaaatcacagtctccaatatgctgggccaggatggaacactgctttctaattccatttctgtgatgccagatatacgaaacccagaaggaactcagtacagttcccatcctcagatggcagccatgagaccaaggggccagcctgcagacatcaggcagcagccaggaatgatgccacatggccagctgactaccattaaccagtcacagctaagtgctcaacttggtttgaatatgggaggaagcaatgttccccacaactcaccatctccacctggaagcaagtctgcaactccttcaccatccagttcagtgcatgaagatgaaggcgatgatacctctaagatcaatggtggagagaagcggcctgcctctgatatggggaaaaaaccaaaaactcccaaaaagaagaagaagaaggatcccaatgagccccagaagcctgtgtctgcctatgcgttattctttcgtgatactcaggccgccatcaagggccaaaatccaaacgctacctttggcgaagtctctaaaattgtggcttcaatgtgggacggtttaggagaagagcaaaaacaggtctataaaaagaaaaccgaggctgcgaagaaggagtacctgaagcaactcgcagcatacagagccagccttgtatccaagagctacagtgaacctgttgacgtgaagacatctcaacctcctcagctgatcaattcgaagccgtcggtgttccatgggcccagccaggcccactcggccctgtacctaagttcccactatcaccaacaaccgggaatgaatcctcacctaactgccatgcatcctagtctccccaggaacatagcccccaagccgaataaccaaatgccagtgactgtctctatagcaaacatggctgtgtcccctcctcctcccctccagatcagcccgcctcttcaccagcatctcaacatgcagcagcaccagccgctcaccatgcagcagccccttgggaaccagctccccatgcaggtccagtctgccttacactcacccaccatgcagcaaggatttactcttcaacccgactatcagactattatcaatcctacatctacagctgcacaagttgtcacccaggcaatggagtatgtgcgttcggggtgcagaaatcctcccccacaaccggtggactggaataacgactactgcagtagtgggggcatgcagagggacaaagcactgtaccttacttgagaatctgaacacctcttctttccactgaggaattcagggaagtgttttcaccatggattgctttgtacagtcaaggcagttctccattttattagaaaatacaagttgctaagcacttaggaccatttgagcttgtgggtcacccactctggaagaaatagtcatgcttctttattatttttttaatcctttatggacattgtttttcttcttccctgaaggaaatttggaccattcagattttatgttggttttttgctgtgaagtgctgcgctctagtaactgccttagcaactgtagatgtctcggataaaagtcctggattttccattggttttcataatgggtgtttatatgaaactactaaagactttttaaatggcttgatgtagcagtcatagcaagtttgtaaatagcatctatgttacactctcctagagtataaaatgtgaatgtttttgtagctaaattgtaattgaaactggctcattccagtttattgatttcacaataggggttaaattggcaaacattcatatttttacttcatttttaaaacaactgactgatagttctatattttcaaaatatttgaaaataaaaagtattcccaagtgattttaatttaaaaacaaattggctttgtctcattgatcagacaaaaagaaactagtattaagggaagcgcaaacacatttattttgtactgcagaaaaattgcttttttgtatcactttttgtgtaatggttagtaaatgtcatttaagtccttttatgtataaaactgccaaatgcttacctggtattttattagatgcagaaacagattggaaacagctaaattacaacttttacatatggctctgtcttattgtttcttcatactgtgtctgtatttaatctttttttatggaacctgttgcgcctatttatgaaataataaatataggtgtttgtaagtaaatttgttagtatttgaaagaggtttctttgatgttttaacttttgctggcaaaaaaaaattcacgcttggtgtgaatactttattatttagtttttacagtaacatgaataaagccaaacctgcttttcatttagcagcaaattaaagtaaccagtccttatttctgcatttctttggttgatgcaaacaaaaaactattatatttaagaactttatttcttcatacgacataacagaattgccctccaagtcacacaagctccaagactaaacaaacagacaggtcctctgtcttaaaaaggttacttcttggttctcagctggttctagtcaattctgaaccaccaccccccgccccccgcaaaaaagtaaaagtcaaaccaaacttcctcaagctgcatgcttttcacaaaatccagaaagcatttaagaattgaactaggggctggaagaagtgaaagggaagcatctaaaaatgaaaggtgagtaaccagatagcaaaagaaaagggaaagccatccaaatttgaaagctgttgatagaaattgagattcttgctgtcttttgtgcctctacaagctactactcattccagaattcctgggtcttccaagaggattcttaaggtaccagagatttgctagggaaccaaaagtgcttgagaatctgcctgagggcttgcatagctttcacattaaaaaaagaaaaagctagcagatttactcctttttaggggatcatatcaagaaagttagtctggttggaaaccaagagaatggctgatgtctctttcttggaatatgtgaaataaatttagcagtttaactaaatacaaatatatgcattgtgtaatccactcagaattaaacagacaaaaggtatgcttgctttggaatgattttaggcattgtacaaccttgaatcacttgagcatgtaataactaataaataatgcagatccatgtgattattaaaatgactgtagctgagagctctaattttcctgtcttgaaactgtataagaactcatgtgattaagttcacagtttattgtttgtctgtttagtattttagaaatataccagcactactaattaactaatgtcttttatttattatattatgataaagtaaaaatttcacttgcattaagtctaaactgagaaggtaattactgggaggagaatgagcagctttgactttgacaggcggtttgtgcaggaaagcacagtgccgtgttgtttacagcttttctagagcagctgtgcgaccagggtagagagtgttgaaattcaataccaaatacagtaaaaacaaatgtaaataaaagaaaacacatcatcaataaaactgttattatgcgtg

SEQ ID NO: 191175 - DNA, 820 bp, Homo sapiens
  Payload ID: 17762
  Gene Name: thymopoietin
  Uniprot ID: P42167
  ENST ID: ENST00000261210
  CDS Start-End: 17-763
ttcgcagatccccgagatgccggagttcctggaagacccctcggtcctgacaaaagacaagttgaagagtgagttggtcgccaacaatgtgacgctgccggccggggagcagcgcaaagacgtgtacgtccagctctacctgcagcacctcacggctcgcaaccggccgccgctccccgccggcaccaacagcaaggggcccccggacttctccagtgacgaagagcgcgagcccaccccggtcctcggctctggggccgccgccgcgggccggagccgagcagccgtcggcaggaaagccacaaaaaaaactgataaacccagacaagaagataaagatgatctagatgtaacagagctcactaatgaagatcttttggatcagcttgtgaaatacggagtgaatcctggtcctattgtgggaacaaccaggaagctatatgagaaaaagcttttgaaactgagggaacaaggaacagaatcaagatcttctactcctctgccaacaatttcttcttcagcagaaaatacaaggcagaatggaagtaatgattctgacagatacagtgacaatgaagaagactctaaaatagagctcaagcttgagaagagagaaccactaaagggcagagcaaagactccagtaacactcaagcaaagaagagttgagcacaatcaggtatctttagttttattaccaccgtgtacaggtataaataacctcctgacaacactaatccatgttttagcctttaatggttgacacccagattccagcacgctcaataaacttaattctgttgttaaatgatactaaaaa

SEQ ID NO: 191176 - DNA, 3615 bp, Homo sapiens
  Payload ID: 17762
  Gene Name: thymopoietin
  Uniprot ID: P42166
  ENST ID: ENST00000266732
  CDS Start-End: 239-2323
gggttggtgcgagcttccagcttggccgcagttggttcgtagttcggctctggggtcttttgtgtccgggtctggcttggctttgtgtccgcgagtttttgttccgctccgcagcgctcttcccgggcaggagccgtgaggctcggaggcggcagcgcggtccccggccaggagcaagcgcgccggcgtgagcggcggcggcaaaggctgtggggagggggcttcgcagatccccgagatgccggagttcctggaagacccctcggtcctgacaaaagacaagttgaagagtgagttggtcgccaacaatgtgacgctgccggccggggagcagcgcaaagacgtgtacgtccagctctacctgcagcacctcacggctcgcaaccggccgccgctccccgccggcaccaacagcaaggggcccccggacttctccagtgacgaagagcgcgagcccaccccggtcctcggctctggggccgccgccgcgggccggagccgagcagccgtcggcaggaaagccacaaaaaaaactgataaacccagacaagaagataaagatgatctagatgtaacagagctcactaatgaagatcttttggatcagcttgtgaaatacggagtgaatcctggtcctattgtgggaacaaccaggaagctatatgagaaaaagcttttgaaactgagggaacaaggaacagaatcaagatcttctactcctctgccaacaatttcttcttcagcagaaaatacaaggcagaatggaagtaatgattctgacagatacagtgacaatgaagaaggaaagaagaaagaacacaagaaagtgaagtccactagggatattgttcctttttctgaacttggaactactccctctggtggtggattttttcagggtatttcttttcctgaaatctccacccgtcctcctttgggcagtaccgaactacaggcagctaagaaagtacatacttctaagggagacctacctagggagcctcttgttgccacaaacttgcctggcaggggacagttgcagaagttagcctctgaaaggaatttgtttatttcatgcaagtctagccatgataggtgtttagagaaaagttcttcgtcatcttctcagcctgaacacagtgccatgttggtctctactgcagcttctccttcactgattaaagaaaccaccactggttactataaagacatagtagaaaatatttgcggtagagagaaaagtggaattcaaccattatgtcctgagaggtcccatatttcagatcaatcgcctctctccagtaaaaggaaagcactagaagagtctgagagctcacaactaatttctccgccacttgcccaggcaatcagagattatgtcaattctctgttggtccagggtggggtaggtagtttgcctggaacttctaactctatgcccccactggatgtagaaaacatacagaagagaattgatcagtctaagtttcaagaaactgaattcctgtctcctccaagaaaagtccctagactgagtgagaagtcagtggaggaaagggattcaggttcctttgtggcatttcagaacatacctggatccgaactgatgtcttcttttgccaaaactgttgtctctcattcactcactaccttaggtctagaagtggctaagcaatcacagcatgataaaatagatgcctcagaactatcttttcccttccatgaatctattttaaaagtaattgaagaagaatggcagcaagttgacaggcagctgccttcactggcatgcaaatatccagtttcttccagggaggcaacacagatattatcagttccaaaagtagatgatgaaatcctagggtttatttctgaagccactccactaggaggtattcaagcagcctccactgagtcttgcaatcagcagttggacttagcactctgtagagcatatgaagctgcagcatcagcattgcagattgcaactcacactgcctttgtagctaaggctatgcaggcagacattagtcaagctgcacagattcttagctcagatcctagtcgtacccaccaagcgcttgggattctgagcaaaacatatgatgcagcctcatatatttgtgaagctgcatttgatgaagtgaagatggctgcccataccatgggaaatgccactgtaggtcgtcgatacctctggctgaaggattgcaaaattaatttagcttctaagaataagctggcttccactccctttaaaggtggaacattatttggaggagaagtatgcaaagtaattaaaaagcgtggaaataaacactagtaaaattaaggacaaaaagacatctatcttatctttcaggtactttatgccaacattttcttttctgttaaggttgttttagtttccagatagggctaattacaaaatgttaagcttctacccatcaaattacagtataaaagtaattgcctgtgtagaactacttgtcttttctaaagatttgcgtagataggaagcctggtacaaacaatttaacgctttctagatcacatattagtctctaagttgttttctgtttcctgctttacttatgtttttacaattctccaaaactaagaaaattctaattaggatataaggagtatttactgttcaatagaataatatgcatcctcctttatacctaggacagaattaaacatttgttacacattcagaacagtgatgttgttctttttgatacttttatctcagtatcttttcacgttccataacttgtccatatttttgctcatattttcttacttttctttgttatttattcatgtctgcaacatcaatcatagtagtctagatcaatgcaactcaaagcaccagtctacaaactgttacttatccacaggcaagataagcatgcacaagaatttaaatctagagatactttttaggtcaatgacaggatttgattttttagcaaaattttattaatagctaaagcaatgtattgatttacactctgatgcaagtaatttatctcttcattgactggtagcaaccaattcatggaccagtaccatggaccacactttgagaaacacttctttggataataatagatatcctgggatagtgcatgttcaccatctattttgtcagataatggggccttttaaaaaataatactttgctttcatgatatattgtattttgtggaaagttaagtttagcaatatagactctaaaagcaaattaaatttttttaagccataagaaattatactatatcccagtatctgtatgtctgtataaagcagtgtattatcatgttttcatttctgtgattgtaagttaagagtcttaactgcagaggtattgtggaaagtagtagccttaagcataataaaatatggtctcttgggtactccctctggccattaccacattcttagattatatgtgtccatctttgcagctttctgagagtaattttatttgttgtcttctgaaatgtacatgtatacatgtacctactgagtgctatgtgatttttaaaaatgtattactgtagaatgcttctgcaaattcaataaagttgttaaatttgaacagtg

SEQ ID NO: 191177 - DNA, 2465 bp, Homo sapiens
  Payload ID: 17762
  Gene Name: thymopoietin
  ENST ID: ENST00000343315
  CDS Start-End: 251-1495
gtgtgtgggctggggttggtgcgagcttccagcttggccgcagttggttcgtagttcggctctggggtcttttgtgtccgggtctggcttggctttgtgtccgcgagtttttgttccgctccgcagcgctcttcccgggcaggagccgtgaggctcggaggcggcagcgcggtccccggccaggagcaagcgcgccggcgtgagcggcggcggcaaaggctgtggggagggggcttcgcagatccccgagatgccggagttcctggaagacccctcggtcctgacaaaagacaagttgaagagtgagttggtcgccaacaatgtgacgctgccggccggggagcagcgcaaagacgtgtacgtccagctctacctgcagcacctcacggctcgcaaccggccgccgctccccgccggcaccaacagcaaggggcccccggacttctccagtgacgaagagcgcgagcccaccccggtcctcggctctggggccgccgccgcgggccggagccgagcagccgtcggcaggaaagccacaaaaaaaactgataaacccagacaagaagataaagatgatctagatgtaacagagctcactaatgaagatcttttggatcagcttgtgaaatacggagtgaatcctggtcctattgtgggaacaaccaggaagctatatgagaaaaagcttttgaaactgagggaacaaggaacagaatcaagatcttctactcctctgccaacaatttcttcttcagcagaaaatacaaggcagaatggaagtaatgattctgacagatacagtgacaatgaagaagactctaaaatagagctcaagcttgagaagagagaaccactaaagggcagagcaaagactccagtaacactcaagcaaagaagagttgagcacaatcaggtggaaacttcagaacattttcgtatagatggtccagtaatttcagagagtactcccatagctgaaactataatggcttcaagcaacgaatccttagttgtcaatagggtgactggaaatttcaagcatgcatctcctattctgccaatcactgaattctcagacatacccagaagagcaccaaagaaaccattgacaagagctgaagtgggagaaaaaacagaggaaagaagagtagaaagggatattcttaaggaaatgttcccctatgaagcatctacaccaacaggaattagtgctagttgccgcagaccaatcaaaggggctgcaggccggccattagaactcagtgatttcaggatggaggagtctttttcatctaaatatgttcctaagtatgttcccttggcagatgtcaagtcagaaaagacaaaaaagggacgctccattcccgtatggataaaaattttgctgtttgttgttgtggcagtttttttgtttttggtctatcaagctatggaaaccaaccaagtaaatcccttctctaattttcttcatgttgaccctagaaaatccaactgaatggtatctctttggcacgttcaacttggtctcctattttcaataactgttgaaaaacatttgtgtacacttgttgactccaagaactaaaaataatgtgatttcgcctcaataaatgtagtatttcattgaaaagcaaacaaaatatatataaatggacttcattaaaatgtttttgaactttggactagtaggagatcactttgtgccatatgaataatcttttttagctctggaactttttgtaggctttatttttttaatgtgggcatcttatttcatttttgaaaaaatgtatatgttttttgtgtatttgggaaacgaagggtgaaacatggtagtataatgtgaagctacacatttaaatacttagaattcttacagaaaagattttaagaattattctctgctgaataaaaactgcaaatatgtgaaacataatgaaattcagtaagaggaaaagtaacttggttgtactttttgtaactgcaacaaagtttgatggtgtttatgaggaaaagtacagcaataatctcttctgtaacctttattaatagtaatgttgttgtagccctatcatactcactttttaagacacagtatcatgaaagtcctatttcagtaagacccatttacatacagtagatttttagcagagatcttttagtgtaacatacatattttagagaattgttggctagctgtacatgttttgaaaagctgtttagctagctataaggctataattggaaatttgtattttttatttacagcaaaacatttattcagtcatccagtttgctaccaaaatatgttttagataagtgtgtgtatgtttgtttagaagttagaaattgtaaacactggtcttatgtttcatttggattcattattgcattgtcttgttaccagaaacaaattttgccgagctttttttgccctatatttcccagcataatttgattagaaa

SEQ ID NO: 191178 - DNA, 2374 bp, Homo sapiens
  Payload ID: 17762
  Gene Name: thymopoietin
  Uniprot ID: P42167
  ENST ID: ENST00000393053
  CDS Start-End: 238-1275
ggttggtgcgagcttccagcttggccgcagttggttcgtagttcggctctggggtcttttgtgtccgggtctggcttggctttgtgtccgcgagtttttgttccgctccgcagcgctcttcccgggcaggagccgtgaggctcggaggcggcagcgcggtccccggccaggagcaagcgcgccggcgtgagcggcggcggcaaaggctgtggggagggggcttcgcagatccccgagatgccggagttcctggaagacccctcggtcctgacaaaagacaagttgaagagtgagttggtcgccaacaatgtgacgctgccggccggggagcagcgcaaagacgtgtacgtccagctctacctgcagcacctcacggctcgcaaccggccgccgctccccgccggcaccaacagcaaggggcccccggacttctccagtgacgaagagcgcgagcccaccccggtcctcggctctggggccgccgccgcgggccggagccgagcagccgtcggcaggaaagccacaaaaaaaactgataaacccagacaagaagataaagatgatctagatgtaacagagctcactaatgaagatcttttggatcagcttgtgaaatacggagtgaatcctggtcctattgtgggaacaaccaggaagctatatgagaaaaagcttttgaaactgagggaacaaggaacagaatcaagatcttctactcctctgccaacaatttcttcttcagcagaaaatacaaggcagaatggaagtaatgattctgacagatacagtgacaatgaagaagactctaaaatagagctcaagcttgagaagagagaaccactaaagggcagagcaaagactccagtaacactcaagcaaagaagagttgagcacaatcaggtgggagaaaaaacagaggaaagaagagtagaaagggatattcttaaggaaatgttcccctatgaagcatctacaccaacaggaattagtgctagttgccgcagaccaatcaaaggggctgcaggccggccattagaactcagtgatttcaggatggaggagtctttttcatctaaatatgttcctaagtatgttcccttggcagatgtcaagtcagaaaagacaaaaaagggacgctccattcccgtatggataaaaattttgctgtttgttgttgtggcagtttttttgtttttggtctatcaagctatggaaaccaaccaagtaaatcccttctctaattttcttcatgttgaccctagaaaatccaactgaatggtatctctttggcacgttcaacttggtctcctattttcaataactgttgaaaaacatttgtgtacacttgttgactccaagaactaaaaataatgtgatttcgcctcaataaatgtagtatttcattgaaaagcaaacaaaatatatataaatggacttcattaaaatgtttttgaactttggactagtaggagatcactttgtgccatatgaataatcttttttagctctggaactttttgtaggctttatttttttaatgtgggcatcttatttcatttttgaaaaaatgtatatgttttttgtgtatttgggaaacgaagggtgaaacatggtagtataatgtgaagctacacatttaaatacttagaattcttacagaaaagattttaagaattattctctgctgaataaaaactgcaaatatgtgaaacataatgaaattcagtaagaggaaaagtaacttggttgtactttttgtaactgcaacaaagtttgatggtgtttatgaggaaaagtacagcaataatctcttctgtaacctttattaatagtaatgttgttgtagccctatcatactcactttttaagacacagtatcatgaaagtcctatttcagtaagacccatttacatacagtagatttttagcagagatcttttagtgtaacatacatattttagagaattgttggctagctgtacatgttttgaaaagctgtttagctagctataaggctataattggaaatttgtattttttatttacagcaaaacatttattcagtcatccagtttgctaccaaaatatgttttagataagtgtgtgtatgtttgtttagaagttagaaattgtaaacactggtcttatgtttcatttggattcattattgcattgtcttgttaccagaaacaaattttgccgagctttttttgccctatatttcccagcataatttgattagaaagtacaaaaagggccaggcgcggtggcttacgcctgtaatcccagcactttgggaggccagggcgggtggatcacgaggtcaagagatcaagaccatcctggccaacatggtgaaaccccgtctctacta

SEQ ID NO: 191179 - DNA, 4242 bp, Homo sapiens
  Payload ID: 17762
  Gene Name: thymopoietin
  Uniprot ID: P42167
  ENST ID: ENST00000556029
  CDS Start-End: 357-1721
cgcgagccgtctcgccaatcaccgccgcgcttcctcccgtcgcccgccaatggcggcgcgcgttcttggggcgtgggcgaagcaggctgctcgcctcctgcctgtagtgtgtgggctggggttggtgcgagcttccagcttggccgcagttggttcgtagttcggctctggggtcttttgtgtccgggtctggcttggctttgtgtccgcgagtttttgttccgctccgcagcgctcttcccgggcaggagccgtgaggctcggaggcggcagcgcggtccccggccaggagcaagcgcgccggcgtgagcggcggcggcaaaggctgtggggagggggcttcgcagatccccgagatgccggagttcctggaagacccctcggtcctgacaaaagacaagttgaagagtgagttggtcgccaacaatgtgacgctgccggccggggagcagcgcaaagacgtgtacgtccagctctacctgcagcacctcacggctcgcaaccggccgccgctccccgccggcaccaacagcaaggggcccccggacttctccagtgacgaagagcgcgagcccaccccggtcctcggctctggggccgccgccgcgggccggagccgagcagccgtcggcaggaaagccacaaaaaaaactgataaacccagacaagaagataaagatgatctagatgtaacagagctcactaatgaagatcttttggatcagcttgtgaaatacggagtgaatcctggtcctattgtgggaacaaccaggaagctatatgagaaaaagcttttgaaactgagggaacaaggaacagaatcaagatcttctactcctctgccaacaatttcttcttcagcagaaaatacaaggcagaatggaagtaatgattctgacagatacagtgacaatgaagaagactctaaaatagagctcaagcttgagaagagagaaccactaaagggcagagcaaagactccagtaacactcaagcaaagaagagttgagcacaatcagagctattctcaagctggaataactgagactgaatggacaagtggatcttcaaaaggcggacctctgcaggcattaactagggaatctacaagagggtcaagaagaactccaaggaaaagggtggaaacttcagaacattttcgtatagatggtccagtaatttcagagagtactcccatagctgaaactataatggcttcaagcaacgaatccttagttgtcaatagggtgactggaaatttcaagcatgcatctcctattctgccaatcactgaattctcagacatacccagaagagcaccaaagaaaccattgacaagagctgaagtgggagaaaaaacagaggaaagaagagtagaaagggatattcttaaggaaatgttcccctatgaagcatctacaccaacaggaattagtgctagttgccgcagaccaatcaaaggggctgcaggccggccattagaactcagtgatttcaggatggaggagtctttttcatctaaatatgttcctaagtatgttcccttggcagatgtcaagtcagaaaagacaaaaaagggacgctccattcccgtatggataaaaattttgctgtttgttgttgtggcagtttttttgtttttggtctatcaagctatggaaaccaaccaagtaaatcccttctctaattttcttcatgttgaccctagaaaatccaactgaatggtatctctttggcacgttcaacttggtctcctattttcaataactgttgaaaaacatttgtgtacacttgttgactccaagaactaaaaataatgtgatttcgcctcaataaatgtagtatttcattgaaaagcaaacaaaatatatataaatggacttcattaaaatgtttttgaactttggactagtaggagatcactttgtgccatatgaataatcttttttagctctggaactttttgtaggctttatttttttaatgtgggcatcttatttcatttttgaaaaaatgtatatgttttttgtgtatttgggaaacgaagggtgaaacatggtagtataatgtgaagctacacatttaaatacttagaattcttacagaaaagattttaagaattattctctgctgaataaaaactgcaaatatgtgaaacataatgaaattcagtaagaggaaaagtaacttggttgtactttttgtaactgcaacaaagtttgatggtgtttatgaggaaaagtacagcaataatctcttctgtaacctttattaatagtaatgttgttgtagccctatcatactcactttttaagacacagtatcatgaaagtcctatttcagtaagacccatttacatacagtagatttttagcagagatcttttagtgtaacatacatattttagagaattgttggctagctgtacatgttttgaaaagctgtttagctagctataaggctataattggaaatttgtattttttatttacagcaaaacatttattcagtcatccagtttgctaccaaaatatgttttagataagtgtgtgtatgtttgtttagaagttagaaattgtaaacactggtcttatgtttcatttggattcattattgcattgtcttgttaccagaaacaaattttgccgagctttttttgccctatatttcccagcataatttgattagaaagtacaaaaagggccaggcgcggtggcttacgcctgtaatcccagcactttgggaggccagggcgggtggatcacgaggtcaagagatcaagaccatcctggccaacatggtgaaaccccgtctctactaaaaatacaaaaaaattagctgggcgtgatgatgtgcgcctgtagtcctgtctactagggagactgaggcaggagaatcgtttgaacccaggaggcagaggttgcagtgagcagagattacgtcactgcactgtagcctggcgacagagcaagactccatctcaaaaaaaataaaaaagtacaaaaagtacttgcttttatattacatcataagcagtagttaataaagttgtatactcttaagaggtgggcattatgattattttttatttttttattttttatgagatggagtctcactcttgtcacccagactgtagtgcagtggcacgatctgggctcgatgcaacctctgcctcccaggttcaagcaattttcctgcctcggcagagacggggtttcaccatgttggccaggctggtctcgaacccctgacctcaagtgatcagcccacctcagcttcccaaagtgctgggattacaggtgtgatccactgcacccggccggcattatgattttgtgtactcttgaaatggttatctttgtggatgatttttttttttaagctgaaacttacctcatgaataacttgattaaagtagtaggtgattaaaatttcaatagaatcaaatgagacaaaaattttaaactgactcatttgagtttcaactttacagtcattgaccataaagcacactaaaaatgtaagttatttttaaatacatctgaaataaaaatacttactaaaaaggaagaagccgaagatgtatatttagaccagcacacaattttgatttcaattagccttattctaatatttagcttttagatctttcatacacattttcacgtactttgcaattgagaccagaaagacttgtaggtctttctgcagaatgagtgggtccttgcaaagtgagtgggaaacttactcctagatcagaaatgtttgcctctctgagtaaaatgtttctttcagatgagccatagagggggcaccttttactcaacttttctttgttttgaaactttgtttcccatactgttttcagccttttgtttataattagaaattgtgagaagcttcatttagtgtttaaaaatgtggggagataaatcagacttaacatgtatgtaagatcaattcacttaaaagtatggtccaaatagcaaaaataggaccaggtgaaacatgtagtcattttttaaaaacatgtacttggtcttttgtgtgtgtctgttttattccattagaataaatgtgtccttgatgtaaatgcaaagcatttcttcctgattaaattgtagatgtagactttacaatataattcaataataaaaagtaattaacctctagttttgtcgttgcaataaatggttttcagatagcacaaactgtgatttctggataacatttcttatg

SEQ ID NO: 191180 - DNA, 713 bp, Homo sapiens
  Payload ID: 17762
  Gene Name: thymopoietin
  ENST ID: ENST00000556678
  CDS Start-End: 1-713
aaagccacaaaaaaaactgataaacccagacaagaagataaagatgatctagatgtaacagagctcactaatgaagatcttttggatcagcttgtgaaatacggagtgaatcctggtcctattgtgggaacaaccaggaagctatatgagaaaaagcttttgaaactgagggaacaaggaacagaatcaagatcttctactcctctgccaacaatttcttcttcagcagaaaatacaaggcagaatggaagtaatgattctgacagatacagtgacaatgaagaagactctaaaatagagctcaagcttgagaagagagaaccactaaagggcagagcaaagactccagtaacactcaagcaaagaagagttgagcacaatcaggttgtcaatagggtgactggaaatttcaagcatgcatctcctattctgccaatcactgaattctcagacatacccagaagagcaccaaagaaaccattgacaagagctgaagtgggagaaaaaacagaggaaagaagagtagaaagggatattcttaaggaaatgttcccctatgaagcatctacaccaacaggaattagtgctagttgccgcagaccaatcaaaggggctgcaggccggccattagaactcagtgatttcaggatggaggagtctttttcatctaaatatgttcctaagtatgttcccttggcagatgtcaagtcaga

SEQ ID NO: 191181 - DNA, 496 bp, Homo sapiens
  Payload ID: 17763
  Gene Name: thymosin beta 10
  Uniprot ID: P63313
  ENST ID: ENST00000233143
  CDS Start-End: 110-244
atataaggctaggggcgggcgccgctcttttgtttcttgctgcagcaacgcgagtgggagcaccaggatctcgggctcggaacgagactgcacggattgttttaagaaaatggcagacaaaccagacatgggggaaatcgccagcttcgataaggccaagctgaagaaaacggagacgcaggagaagaacaccctgccgaccaaagagaccattgagcaggagaagcggagtgaaatttcctaagatcctggaggatttcctacccccgtcctcttcgagaccccagtcgtgatgtggaggaagagccacctgcaagatggacacgagccacaagctgcactgtgaacctgggcactccgcgccgatgccaccggcctgtgggtctctgaagggacccccccccaatcggactgccaaattctccggtttgccccgggatattatagaaaattatttgtatgaataatgaaaataaaacacacctcgtggcatggc

SEQ ID NO: 191182 - DNA, 685 bp, Homo sapiens
  Payload ID: 17764
  Gene Name: thymosin beta 15a
  Uniprot ID: P0CG34
  ENST ID: ENST00000289373
  CDS Start-End: 137-274
ggcggggcctgctgggtggcttagcactgcagggctctgcgcgggaacgctaacctggtccggagcgagtctgggtctcagccccgcgaacagcctttcacgagtcttcaagctttcaggctatcttctagtcaagatgagtgataagccagacttgtcggaagtggagaagtttgacaggtcaaaactgaagaaaactaatactgaagaaaaaaatactcttccctcaaaggaaactatccagcaagagaaagagtgtgttcaaacatcataaaatggggatcgcctcccaacagcagatttcgacattacctgagagtcttgattttaggcttgttttttgtaaacccatgtgtttgtagagattttaggcgtcttcggatatcttctcacctatgttccctggctaagaagtcagaggtagccaatgtttccttaaattcatttttaaacttaccattggtgcatatgttccagatggcagatgctgtcaataatctcaccattgatgacctttgtgtatgtagttcttgcatcctatactggataagcctgttttaacctgctatgatgggtgcttccattgcttcataatcttcatgaagttgcatgcttttgcagcttttcacagtttatttgcatttctaatgtagtaataaagtaaccaatataatcattatcttga

SEQ ID NO: 191183 - DNA, 665 bp, Homo sapiens
  Payload ID: 17765
  Gene Name: thymosin beta 15B
  Uniprot ID: P0CG35
  ENST ID: ENST00000540220
  CDS Start-End: 115-252
agcactgcagggctctgggcgggaaggctaacctggtgcggagccagcctgggtctcagccccgcgtacggcctttcacgagtcttcaagccttcaggctttcttctagtcaagatgagtgataaaccagacttgtcggaagtggagaagtttgacaggtcaaaactgaagaaaactaatactgaagaaaaaaatactcttccctcaaaggaaactatccagcaggagaaagagtgtgttcaaacatcataaaatggggatctcctccaaagagcagatttcagcattgcctgacagtcttggttttaggcttgtttttttgtaaacctgtgtgtttgtagagatttcagacatcttctgatttcttctcacctatattccctggttaagaggtcaggggtagtgaatgtttccttaagttcctttttaaacttcccattggtatgtaaattccaaatggcagatgctgtcaataaccttgccatggatgacctttgtgtaggtagtccttgcacctcatgcaggataagccaattttaactttctacaatgggtgcctcaatagtttcataatcttcatgaagttgcatcctttggcagcttcttacagtttattttcacttccaatgtagcaataaaataataaatataatcgttgttgtctg

SEQ ID NO: 191184 - DNA, 2186 bp, Homo sapiens
  Payload ID: 17765
  Gene Name: thymosin beta 15B
  Uniprot ID: P0CG35
  ENST ID: ENST00000436583
  CDS Start-End: 1644-1781
gccagcctgggtctcagccccgcgtacggcctttcacgagtcttcaagccttcaggtgagtacctgcggcctcgcaggagccagaggaccatggggacgggaaggcgtgggggtcgcgaggcgggggatgccgcgccttcgggagccagaggggctggggttggggctggtgcttggtgtctgcgccgccgccaggcccggcgagtccgagcctttgtctttctggggcgccgccttctgcgagcgatgccgagccctcccgggggccggtccctggaaagaaggccccggggagtcggggtgggaggcggtggttggaggggtaggggacccttaaagcggccagtccgcggtagctgcaggtcagaggcttcgaggatgaagagtttgggggccgcccggaatgggccttgtggggctgggccctggttcctttccctcccgtggccgttagactgggcgtctaacaacgctaatagttatttgaaaaagtatgcaaactgctcctgacagactggcctatgcgcccggccctgctattatttattggttagttccaatttcccagctccgagcttggcgtctgatcgcttggcagaggagggtcttagggtaacctcgacagaatggaggcatgttcgacacttctgactgcttgggggcctctgcattctacgccagggactagacgaagtgtcttactccaccagggtggggccgggcttgctcatgaaagctctacctggtatatcctattgtctcttctgaacaaactcgagactttcacagggcaccaggcatttcgtcaggtccacagctacgcacgtctgagcctcatctcctccctctctgcagtgaaaacgtgaaagaagacccacttctatttggtttattccgttctgctgaagtcctgggtctgatcctagttagctgtcccttcttacagcgtttacaaaccagtgccacaaggagctattatgagacgtgtattgtagtgccttaatgtactgtcgtctttggggatttaaaatagatagaaattaatacaacttatctcattctttttttgtgtgctgctccccatctcccaagaaaaatggcaaaaccaaaagtaaatagaaagtgaagatgctcaaatggtgctatgttctgtttcaaaataattacctggttaaaaccagtctttattttttcttctatccctgtctggtcttgtgcttctatcacctccattttatccttgctgtgattttaagagtcagacaaatggctctgtgtttctagagcatcttggtttctggtgcgttatgatccaatgacatttactgcctatcagaaacggcaaatgatgtggagttgaaattattctaacaaaaatataacttttctaatatctgttgctgtttttctgttgaaaatgagcaggtagaatatacattgataggaaatgtgaaaatttttgcttgtgatcccttagtccgaagatagttctgccaggtaagttttcttaaaaatgtttttttctgtcctggcgcggtggctcacgcctgcaatcccagcactttgggaggccgaggcgggcagatcacttgaggccaggagttccagaccagcctggccaacatggctttcttctagtcaagatgagtgataaaccagacttgtcggaagtggagaagtttgacaggtcaaaactgaagaaaactaatactgaagaaaaaaatactcttccctcaaaggaaactatccagcaggagaaagagtgtgttcaaacatcataaaatggggatctcctccaaagagcagatttcagcattgcctgacagtcttggttttaggcttgtttttttgtaaacctgtgtgtttgtagagatttcagacatcttctgatttcttctcacctatattccctggttaagaggtcaggggtagtgaatgtttccttaagttcctttttaaacttcccattggtatgtaaattccaaatggcagatgctgtcaataaccttgccatggatgacctttgtgtaggtagtccttgcacctcatgcaggataagccaattttaactttctacaatgggtgcctcaatagtttcataatcttcatgaagttgcatcctttggcagcttcttacagtttattttcacttccaatgtagcaataaaataataaatataatcgtt

SEQ ID NO: 191185 - DNA, 1666 bp, Homo sapiens
  Payload ID: 17765
  Gene Name: thymosin beta 15B
  Uniprot ID: P0CG35
  ENST ID: ENST00000419165
  CDS Start-End: 1118-1255
catagctctgcaggggaacaggatcgctggcgcctcctgggccgctaagcgaccccggggctgcccggcttagcgagtgcttcgcagagaggtagccgagtcgaggcagcgcggttcccaaggaagtcacggctgcggccaccctccagttcggacctccgggcagccgcggttgctttcagtctctgcccattgagacaaaagagcgtgacaagccgcgcgacgcggccaatcagcggggcgaggaggcggcctacccaagcagcctctggccctgaagctactgctagcaagactcgggagctggctggcgggggctgaggccgacaggcacgggagccggcgcggcgtcaagtggagctcggacgcacggaccaggcccatttccctttcatctacagcaatgttcttactcctctcctgctgtaaagccactcatcttcgatttccctgaggacttctgctcctacagactctcgacggagtaaagcttccgatagaggggaaacagattcgctactagtgttgatagtcaagttactaaggttctttatcaacgtctcggagcagatttgagaggcccctgaatcgtcccgggaattttcttcggtgagcatttgtggagactctgggatgtaggttggattaaacttctgtgatgggtccatcggcgtcttgacacaacactaagcttctcctggatctttgaaacgtagcagaaactgatgacggagcctcaaattgctacaaggtagcccggaaagagcaagagtgagtgtacttcggatgaagggaatgtggaccctcaggactaaagcagtgggagaggcctgggaggtggggcctggggagggcgaggtctgctctgaagtcaccaagctcctgatcttagaagagatggtgggcgcaggctctggaggctcaagcggaggaggggaaggaggcgagtccggaaaccctcggccaatcagagagggctggggcggcgcctgctagaaggcttagcactgcagggctctgggcgggaaggctaacctggtgcggagccagcctgggtctcagccccgcgtacggcctttcacgagtcttcaagccttcaggctttcttctagtcaagatgagtgataaaccagacttgtcggaagtggagaagtttgacaggtcaaaactgaagaaaactaatactgaagaaaaaaatactcttccctcaaaggaaactatccagcaggagaaagagtgtgttcaaacatcataaaatggggatctcctccaaagagcagatttcagcattgcctgacagtcttggttttaggcttgtttttttgtaaacctgtgtgtttgtagagatttcagacatcttctgatttcttctcacctatattccctggttaagaggtcaggggtagtgaatgtttccttaagttcctttttaaacttcccattggtatgtaaattccaaatggcagatgctgtcaataaccttgccatggatgacctttgtgtaggtagtccttgcacctcatgcaggataagccaattttaactttctacaatgggtgcctcaatagtttcataatcttcatgaagttgcatcctttggcagcttcttacagtttattttcacttccaatgtagcaataaaataataaatataatcgttgttgtc

SEQ ID NO: 191186 - DNA, 663 bp, Homo sapiens
  Payload ID: 17765
  Gene Name: thymosin beta 15B
  Uniprot ID: P0CG35
  ENST ID: ENST00000569577
  CDS Start-End: 134-271
ctgggtctcagccccgcgtacggcctttcacgagtcttcaagccttcagcactttgggaggccgaggcgggcagatcacttgaggccaggagttccagaccagcctggccaacatggctttcttctagtcaagatgagtgataaaccagacttgtcggaagtggagaagtttgacaggtcaaaactgaagaaaactaatactgaagaaaaaaatactcttccctcaaaggaaactatccagcaggagaaagagtgtgttcaaacatcataaaatggggatctcctccaaagagcagatttcagcattgcctgacagtcttggttttaggcttgtttttttgtaaacctgtgtgtttgtagagatttcagacatcttctgatttcttctcacctatattccctggttaagaggtcaggggtagtgaatgtttccttaagttcctttttaaacttcccattggtatgtaaattccaaatggcagatgctgtcaataaccttgccatggatgacctttgtgtaggtagtccttgcacctcatgcaggataagccaattttaactttctacaatgggtgcctcaatagtttcataatcttcatgaagttgcatcctttggcagcttcttacagtttattttcacttccaatgtagcaataaaataat

SEQ ID NO: 191187 - DNA, 590 bp, Homo sapiens
  Payload ID: 17765
  Gene Name: thymosin beta 15B
  ENST ID: ENST00000563257
  CDS Start-End: 101-238
ctgggcgggaaggctaacctggtgcggagccagcctgggtctcagccccgcgtacggcctttcacgagtcttcaagccttcaggctttcttctagtcaagatgagtgataaaccagacttgtcggaagtggagaagtttgacaggtcaaaactgaagaaaactaatactgaagaaaaaaatactcttccctcaaaggaaatctttttcagcttagtgggagttaacatccaagactgaagttggatggagaaaggggcaggaggcacttgctaccaaacaccatattaagcacatcacatcttctaatgacctgtagcactgaacttctggtacggtttttctactgaacagaatttgctgttttatgaactaaacatttctggtgttcatggtgagcataaatgttatggtctgaattttgtcacctgtgacctcctgattaatatgctgaagccctaatccctagcatgattgtatctggagataggttgtttcagaagtaatttacgttatgaagtgataacagtcagggcctaatctaataggactgtggccttataaggagagagagaccagtctctaacatgcg

SEQ ID NO: 191188 - DNA, 495 bp, Homo sapiens
  Payload ID: 17766
  Gene Name: thymosin beta 4, X-linked
  Uniprot ID: P62328
  ENST ID: ENST00000380633
  CDS Start-End: 91-225
ggcaagaccggcttcggggcgcgcggcggccgctttgtgtgcggggctgcattgtgacgcgggcgatgaagccgcttttcctccgcaaccatgtctgacaaacccgatatggctgagatcgagaaattcgataagtcgaaactgaagaagacagagacgcaagagaaaaatccactgccttccaaagaaacgattgaacaggagaagcaagcaggcgaatcgtaatgaggcgtgcgccgccaatatgcactgtacattccacaagcattgccttcttattttacttcttttagctgtttaactttgtaagatgcaaagaggttggatcaagtttaaatgactgtgctgcccctttcacatcaaagaactactgacaacgaaggccgcgcctgcctttcccatctgtctatctatctggctggcagggaaggaaagaacttgcatgttggtgaaggaagaagtggggtggaagaagtggggtgggacgacagtgaa

SEQ ID NO: 191189 - DNA, 767 bp, Homo sapiens
  Payload ID: 17766
  Gene Name: thymosin beta 4, X-linked
  Uniprot ID: P62328
  ENST ID: ENST00000380635
  CDS Start-End: 217-351
gtgaaggcattccctaaatccgagcccgagtggttctccccgggaaggctactttggggagctggggggatgcgaaacaccctagatactggataatggggtggggaaatcgatgatttaagaacaaaaccgaaaaactggcgttttgccgtgccgctcggaggggacattaaaaaatttcttagtgtttgcccgcaaagcttttcctccgcaaccatgtctgacaaacccgatatggctgagatcgagaaattcgataagtcgaaactgaagaagacagagacgcaagagaaaaatccactgccttccaaagaaacgattgaacaggagaagcaagcaggcgaatcgtaatgaggcgtgcgccgccaatatgcactgtacattccacaagcattgccttcttattttacttcttttagctgtttaactttgtaagatgcaaagaggttggatcaagtttaaatgactgtgctgcccctttcacatcaaagaactactgacaacgaaggccgcgcctgcctttcccatctgtctatctatctggctggcagggaaggaaagaacttgcatgttggtgaaggaagaagtggggtggaagaagtggggtgggacgacagtgaaatctagagtaaaaccaagctggcccaaggtgtcctgcaggctgtaatgcagtttaatcagagtgccatttttttttttgttcaaatgattttaattattggaatgcacaatttttttaatatgcaaataaaaagtttaaaaactta

SEQ ID NO: 191190 - DNA, 1702 bp, Homo sapiens
  Payload ID: 17766
  Gene Name: thymosin beta 4, X-linked
  Uniprot ID: P62328
  ENST ID: ENST00000380636
  CDS Start-End: 1153-1287
aactcggtggtggccactgcgcagaccagacttcgctcgtactcgtgcgcctcgcttcggtgagccccagggcccctgcctccttcctcctgccgtcctgcctccgtccccgccctttcatcatccgcgtccctgtgaaggcattccctaaatccgagcccgagtggttctccccgggaaggctactttggggagctggggggatgcgaaacaccctagatactggataatggggtggggaaatcgatgatttaagaacaaaaccgaaaaactggcgttttgccgtgccgctcggaggggacattaaaaaatttcttagtgtttgcccgcaaaggtattgtgcgttgccttggaggctgagatatgggggaatagacaagtcctttgttctgaggttcatcttccgagccccgagcctcctcccagcctcggacggctgcgcgggctgcatctgtgcagcctggcggcggcggggctgtgctatgacatctttacagtccttcttgcagagacatgtgtgccagggatgccgaattgccgggagagcaggcaagaccggcttcggggcgcgcggcggccgctttgtgtgcggggctgcattgtgacgcgggcgatgaagccggtagggcggtggtcggaagctccagccgcggccgccgcctttgtgagaggactagaaagccggatccggcccgcatccttgcggagaggccgcggctaggaaatggaaacgcttttcctacctgggctccattttaggaattcttgccgatttttcccacttgaatttggaagtggctttcctcttctttccttgtcctagccagcctttaattttaaacgctgtaattaacaattcgcagtggtcaatttcctttattctgcaagattcggctttgagaggcatccgccctctttggtccacagcgttttgaaatatggggaggaggggcgcggggggtgtcgcctctttttctgtagaaagaggaagctcgtgagcgcggaacggcagcagtaggagagcgagaagggtttttttcaggctgcgggtcggagggcagaagtgcagttcccagcccagagacagcggggcgggtggctcttcctcacgctcgctcttggcttgctccctgcagcttttcctccgcaaccatgtctgacaaacccgatatggctgagatcgagaaattcgataagtcgaaactgaagaagacagagacgcaagagaaaaatccactgccttccaaagaaacgattgaacaggagaagcaagcaggcgaatcgtaatgaggcgtgcgccgccaatatgcactgtacattccacaagcattgccttcttattttacttcttttagctgtttaactttgtaagatgcaaagaggttggatcaagtttaaatgactgtgctgcccctttcacatcaaagaactactgacaacgaaggccgcgcctgcctttcccatctgtctatctatctggctggcagggaaggaaagaacttgcatgttggtgaaggaagaagtggggtggaagaagtggggtgggacgacagtgaaatctagagtaaaaccaagctggcccaaggtgtcctgcaggctgtaatgcagtttaatcagagtgccatttttttttttgttcaaatgattttaattattggaatgcacaatttttttaatatgcaaataaaaagtttaaaaactt

SEQ ID NO: 191191 - DNA, 628 bp, Homo sapiens
  Payload ID: 17766
  Gene Name: thymosin beta 4, X-linked
  Uniprot ID: P62328
  ENST ID: ENST00000451311
  CDS Start-End: 78-212
acaactcggtggtggccactgcgcagaccagacttcgctcgtactcgtgcgcctcgcttcgcttttcctccgcaaccatgtctgacaaacccgatatggctgagatcgagaaattcgataagtcgaaactgaagaagacagagacgcaagagaaaaatccactgccttccaaagaaacgattgaacaggagaagcaagcaggcgaatcgtaatgaggcgtgcgccgccaatatgcactgtacattccacaagcattgccttcttattttacttcttttagctgtttaactttgtaagatgcaaagaggttggatcaagtttaaatgactgtgctgcccctttcacatcaaagaactactgacaacgaaggccgcgcctgcctttcccatctgtctatctatctggctggcagggaaggaaagaacttgcatgttggtgaaggaagaagtggggtggaagaagtggggtgggacgacagtgaaatctagagtaaaaccaagctggcccaaggtgtcctgcaggctgtaatgcagtttaatcagagtgccatttttttttttgttcaaatgattttaattattggaatgcacaatttttttaatatgcaaataaaaagtttaaaaactta

SEQ ID NO: 191192 - DNA, 1669 bp, Homo sapiens
  Payload ID: 17767
  Gene Name: thymosin beta 4, Y-linked
  Uniprot ID: O14604
  ENST ID: ENST00000284856
  CDS Start-End: 770-904
tgggaacagacagatcctttgttctgaggctcactcatctcccgagccccgagccgtctcccagcctcagacggctctgcgggctgcatctgtgcagcctggcagcggcggcgctgcgctgtgacattttcacagcccttcttgcagaggcatgtgtgctagggatgccgaaatgccgagagcgccggcaggactagcttccgggccgcgctttgtgtgctgggctgcagtgtggcgcgggcgaggaagctggtagggcggttgtcgcaagctccagctgcagcctccgcctacgtgagaagactagaaagcgggcgcaggaccaggcctgcgttgtttgcagagaggccgtggctacaaaatggaagtgcttttgcgacctgggctccattttaggaattcttgcccgattttaaccacttgaacgcggaagtggctttcctattctcttccaagccagcctttaattttaaacgctgtaattaacagttcacaggggtcaaattcctttattccggaacattccactttgagagggatctgtcctctttggtcccctgcgttttcaaatatttgaggaaaggtgtcgcctctttttctgtggaaagaggaagctcatgagcgcgaaacagcaggggacggagggcgagaagggctttctcaggttgcgggtcggagggcagaagcacagttcccagtacagagacccggacaggtggctgtttctcacgctcactttggattgctccctacggcttcctccgcagccatgtctgacaaacctggtatggctgagatcgagaaattcgataagtcgaaactgaagaagacagaaacgcaagagaagaatccattgtcttccaaagaaactatcgaacaggagaggcaagcaggcgaatcttaaacaggcatgtgccaccaatatctactgtacattctacaagcattgctttcttattttacttcttttacttgtttaacttggttagatgcaaacacgttggatgagtttgaaaggactatgctgcccttttgacatcaaagacctgctgacaatggaggccacgcctgcttctcccatcgcctgtctggctggcagggaaggaaaatagcttgaatgttggtgaaagacttagcggagtgggagggcagtgaaatctagagtaaaaccaagttgggccaagtgtcctgcagaatctaaaatgaagtttaatcagcgtgccatttttgttgttgtttgaaagattttaatttttggaatgcacagtttttatttaaaaaagacatttttaaaccactgcttgtgagattgcttgttgattggaaagagtgttttattcaccatttaaacgtttgcaaagtggcgtgccccttggcctcacaggcaaagaataacttaaaagctgacgatttgaataaattatgttacagtatgaaatatgttttacctggatatgtaaaataccttctttattctagctaattgggagatgattttttttggctaattgagattacctttagattatgttttcaaaactggcttatactgtaatctacaactaataagcactaatttagagttcagctatattgttgcatgtagtgagaagggacttaattacaaacttaagacgtaagtgtgcaataaagtaagctaagaagaaaa

SEQ ID NO: 191193 - DNA, 1583 bp, Homo sapiens
  Payload ID: 17768
  Gene Name: thymus, brain and testes associated
  Uniprot ID: Q96M53
  ENST ID: ENST00000299290
  CDS Start-End: 391-1446
acaaagcaggcagacttgcccacagaacccacagccttcccctcgatttgtcctcttgctccttcctgctaggacagcagggcttctcgtacacatgctgtagcgggcactgccttggcaggaggatttggggcttccacatatcctgttctcaagattgtagcatctcagtactctagagcccagtacctgacatcaaggatgtctggagcttccttttaaggaaagaaaagatcagcaaacttgcctgttcccgtttacacttccaccaccagttcgtgagagttcctgttctgcatcctcaacactagtattaagtgagagttcctgttctgcatcctcaacgctagtattaagtgcactggcctttagtctgttaaaaagcatacaatggctacagatgttcaattggctgattatccactgatgagtccaaaggctgagctgaaactggagaagaagtcagggcgcaagccaaggagccccagggacagtgggccacagaaagaactggtgatcccagggattgtggatttcgagcggatccgccgggcattgaggaccccaaagccccaaacccctggcacctactgctttggacgcctcagtcaccactccttcttctcccggcaccacccacacccccagcacgtgacccacatccaagatctcaccgggaagcctgtctgtgtcgtcagggattttccagcccccttgcctgagtcaactgtcttttccggctgtcaaatggggatacccaccatctctgtccccattggagacccacagtctaatcggaacccccagctttcttctgaagcctggaagaaggagttgaaggagctagcttcccgggtggccttcctcaccaaggaggatgaactgaagaagaaagagaaggagcagaaggaggagcctctgcgggagcagggggcaaagtactcagcagagactgggaggctcatccccgcttccacccgggctgtcggccgccgcagatctcaccagggccagcagagtcagtcttccagcagacatgaaggagtccaggctttcctccttcaggatcaggagctgctggtcctggagctcctgtgtcggatcctggaaacagacttgctaagcgcaatccagttctggctgctctacgctccgcccaaggaaaaagacctcgctctgggactcctgcagacagcagtggctcagctccttccccagcccctagtctccatccctacagaaaagctcctaagccagcttccagaagtgcatgaacctcctcaagagaagcaagagccaccctgcagtcaatccccgaagaaaacgaagatatcaccttttacaaaaagcgaaaaaccagagtacattggagaagctcaagtcctccagatgcattcaagccagaacacagagaagaagacatcgaagccgagggcagagagctgaggggccctaacacttgcacctgccttgctcaagagcagccccaagggttcaggggtgtttctgtctccaccaccttcacagcagtacctgattccctaccgtgaaaactcttactaaataaaaccgtcttccctgag

SEQ ID NO: 191194 - DNA, 1586 bp, Homo sapiens
  Payload ID: 17768
  Gene Name: thymus, brain and testes associated
  ENST ID: ENST00000456372
  CDS Start-End: 391-1449
acaaagcaggcagacttgcccacagaacccacagccttcccctcgatttgtcctcttgctccttcctgctaggacagcagggcttctcgtacacatgctgtagcgggcactgccttggcaggaggatttggggcttccacatatcctgttctcaagattgtagcatctcagtactctagagcccagtacctgacatcaaggatgtctggagcttccttttaaggaaagaaaagatcagcaaacttgcctgttcccgtttacacttccaccaccagttcgtgagagttcctgttctgcatcctcaacactagtattaagtgagagttcctgttctgcatcctcaacgctagtattaagtgcactggcctttagtctgttaaaaagcatacaatggctacagatgttcaattggctgattatccactgatgagtccaaaggctgagctgaaactggagaagaagtcagggcgcaagccaaggagccccagggacagtgggccacagaaagaactggtgatcccagggattgtggatttcgagcggatccgccgggcattgaggaccccaaagccccaaacccctggcacctactgctttggacgcctcagtcaccactccttcttctcccggcaccacccacacccccagcacgtgacccacatccaagatctcaccgggaagcctgtctgtgtcgtcagggattttccagcccccttgcctgagtcaactgtcttttccggctgtcaaatggggatacccaccatctctgtccccattggagacccacagtctaatcggaacccccagctttcttctgaagcctggaagaaggagttgaaggagctagcttcccgggtggccttcctcaccaaggaggatgaactgaagaagaaagagcagaaggagcagaaggaggagcctctgcgggagcagggggcaaagtactcagcagagactgggaggctcatccccgcttccacccgggctgtcggccgccgcagatctcaccagggccagcagagtcagtcttccagcagacatgaaggagtccaggctttcctccttcaggatcaggagctgctggtcctggagctcctgtgtcggatcctggaaacagacttgctaagcgcaatccagttctggctgctctacgctccgcccaaggaaaaagacctcgctctgggactcctgcagacagcagtggctcagctccttccccagcccctagtctccatccctacagaaaagctcctaagccagcttccagaagtgcatgaacctcctcaagagaagcaagagccaccctgcagtcaatccccgaagaaaacgaagatatcaccttttacaaaaagcgaaaaaccagagtacattggagaagctcaagtcctccagatgcattcaagccagaacacagagaagaagacatcgaagccgagggcagagagctgaggggccctaacacttgcacctgccttgctcaagagcagccccaagggttcaggggtgtttctgtctccaccaccttcacagcagtacctgattccctaccgtgaaaactcttactaaataaaaccgtcttccctgag

SEQ ID NO: 191195 - DNA, 8450 bp, Homo sapiens
  Payload ID: 17769
  Gene Name: thyroglobulin
  Uniprot ID: P01266
  ENST ID: ENST00000220616
  CDS Start-End: 41-8347
cagtggtttctcctccttcctcccaggaagggccaggaaaatggccctggtcctggagatcttcaccctgctggcctccatctgctgggtgtcggccaatatcttcgagtaccaggtggatgcccagccccttcgtccctgtgagctgcagagggaaacggcctttctgaagcaagcagactacgtgccccagtgtgcagaggatggcagcttccagactgtccagtgccagaacgacggccgctcctgctggtgtgtgggtgccaacggcagtgaagtgctgggcagcaggcagccaggacggcctgtggcttgtctgtcattttgtcagctacagaaacagcagatcttactgagtggctacattaacagcacagacacctcctacctccctcagtgtcaggattcaggggactacgcgcctgttcagtgtgatgtgcagcaggtccagtgctggtgtgtggacgcagaggggatggaggtgtatgggacccgccagctggggaggccaaagcgatgtccaaggagctgtgaaataagaaatcgtcgtcttctccacggggtgggagataagtcaccaccccagtgttctgcggagggagagtttatgcctgtccagtgcaaatttgtcaacaccacagacatgatgatttttgatctggtccacagctacaacaggtttccagatgcatttgtgaccttcagttccttccagaggaggttccctgaggtatctgggtattgccactgtgctgacagccaagggcgggaactggctgagacaggtttggagttgttactggatgaaatttatgacaccatttttgctggcctggaccttccttccaccttcactgaaaccaccctgtaccggatactgcagagacggttcctcgcagttcaatcagtcatctctggcagattccgatgccccacaaaatgtgaagtggagcggtttacagcaaccagctttggtcacccctatgttccaagctgccgccgaaatggcgactatcaggcggtgcagtgccagacggaagggccctgctggtgtgtggacgcccaggggaaggaaatgcatggaacccggcagcaaggggagccgccatcttgtgctgaaggccaatcttgtgcctccgaaaggcagcaggccttgtccagactctactttgggacctcaggctacttcagccagcacgacctgttctcttccccagagaaaagatgggcctctccaagagtagccagatttgccacatcctgcccacccacgatcaaggagctctttgtggactctgggcttctccgcccaatggtggagggacagagccaacagttttctgtctcagaaaatcttctcaaagaagccatccgagcaatttttccctcccgagggctggctcgtcttgcccttcagtttaccaccaacccaaagagactccagcaaaacctttttggagggaaatttttggtgaatgttggccagtttaacttgtctggagcccttggcacaagaggcacatttaacttcagtcaatttttccagcaacttggtcttgcaagcttcttgaatggagggagacaagaagatttggccaagccactctctgtgggattagattcaaattcttccacaggaacccctgaagctgctaagaaggatggtactatgaataagccaactgtgggcagctttggctttgaaattaacctacaagagaaccaaaatgccctcaaattccttgcttctctcctggagcttccagaattccttctcttcttgcaacatgctatctctgtgccagaagatgtggcaagagatttaggtgatgtgatggaaacggtactcagctcccagacctgtgagcagacacctgaaaggctatttgtcccatcatgcacgacagaaggaagctatgaggatgtccaatgcttttccggagagtgctggtgtgtgaattcctggggcaaagagcttccaggctcaagagtcagaggtggacagccaaggtgccccacagactgtgaaaagcaaagggctcgcatgcaaagcctcatgggcagccagcctgctggctccaccttgtttgtccctgcttgtactagtgagggacatttcctgcctgtccagtgcttcaactcagagtgctactgtgttgatgctgagggtcaggccattcctggaactcgaagtgcaatagggaagcccaagaaatgccccacgccctgtcaattacagtctgagcaagctttcctcaggacggtgcaggccctgctctctaactccagcatgctacccaccctttccgacacctacatcccacagtgcagcaccgatgggcagtggagacaagtgcaatgcaatgggcctcctgagcaggtcttcgagttgtaccaacgatgggaggctcagaacaagggccaggatctgacgcctgccaagctgctagtgaagatcatgagctacagagaagcagcttccggaaacttcagtctctttattcaaagtctgtatgaggctggccagcaagatgtcttcccggtgctgtcacaatacccttctctgcaagatgtcccactagcagcactggaagggaaacggccccagcccagggagaatatcctcctggagccctacctcttctggcagatcttaaatggccaactcagccaatacccggggtcctactcagacttcagcactcctttggcacattttgatcttcggaactgctggtgtgtggatgaggctggccaagaactggaaggaatgcggtctgagccaagcaagctcccaacatgtcctggctcctgtgaggaagcaaagctccgtgtactgcagttcattagggaaacggaagagattgtttcagcttccaacagttctcggttccctctgggggagagtttcctggtggccaagggaatccggctgaggaatgaggacctcggccttcctccgctcttcccgccccgggaggctttcgcggagcagtttctgcgtgggagtgattacgccattcgcctggcggctcagtctaccttaagcttctatcagagacgccgcttttccccggacgactcggctggagcatccgcccttctgcggtcgggcccctacatgccacagtgtgatgcgtttggaagttgggagcctgtgcagtgccacgctgggactgggcactgctggtgtgtagatgagaaaggagggttcatccctggctcactgactgcccgctctctgcagattccacagtgcccgacaacctgcgagaaatctcgaaccagtgggctgctttccagttggaaacaggctagatcccaagaaaacccatctccaaaagacctgttcgtcccagcctgcctagaaacaggagagtatgccaggctgcaggcatcgggggctggcacctggtgtgtggaccctgcatcaggagaagagttgcggcctggctcgagcagcagtgcccagtgcccaagcctctgcaatgtgctcaagagtggagtcctctccaggagagtcagcccaggctatgtcccagcctgcagggcagaggatgggggcttttccccagtgcaatgtgaccaggcccagggcagctgctggtgtgtcatggacagcggagaagaggtgcctgggacgcgcgtgaccgggggccagcccgcctgtgagagcccgcggtgtccgctgccattcaacgcgtcggaggtggttggtggaacaatcctgtgtgagacaatctcgggccccacaggctctgccatgcagcagtgccaattgctgtgccgccagggctcctggagcgtgtttccaccagggccattgatatgtagcctggagagcggacgctgggagtcacagctgcctcagccccgggcctgccaacggccccagctgtggcagaccatccagacccaagggcactttcagctccagctcccgccgggcaagatgtgcagtgctgactacgcggatttgctgcagactttccaggttttcatattggatgagctgacagcccgcggcttctgccagatccaggtgaagacttttggcaccctggtttccattcctgtctgcaacaactcctctgtgcaggtgggttgtctgaccagggagcgtttaggagtgaatgttacatggaaatcacggcttgaggacatcccagtggcttctcttcctgacttacatgacattgagagagccttggtgggcaaggatctccttgggcgcttcacagatctgatccagagtggctcattccagcttcatctggactccaagacgttcccagcggaaaccatccgcttcctccaaggggaccactttggcacctctcccaggacatggtttgggtgctcggaaggattctaccaagtcttgacaagtgaggccagtcaggacggactgggatgcgttaagtgtcctgaaggaagctattcccaagatgaggaatgcattccttgtcctgttggattctaccaagaacaggcagggagcttggcctgtgtcccatgtcctgtgggcagaacgaccatttctgctggagctttcagccagactcactgtgtcactgactgtcagaggaacgaagcaggcctgcaatgtgaccagaatggccagtatcgagccagccagaaggacaggggcagtgggaaggccttctgtgtggacggcgaggggcggaggctgccatggtgggaaacagaggcccctcttgaggactcacagtgtttgatgatgcagaagtttgagaaggttccagaatcaaaggtgatcttcgacgccaatgctcctgtggctgtcagatccaaagttcctgattctgagttccccgtgatgcagtgcttgacagattgcacagaggacgaggcctgcagcttcttcaccgtgtccacgacggagccagagatttcctgtgatttctatgcttggacaagtgacaatgttgcctgcatgacttctgaccagaaacgagatgcactggggaactcaaaggccaccagctttggaagtcttcgctgccaggtgaaagtgaggagccatggtcaagattctccagctgtgtatttgaaaaagggccaaggatccaccacaacacttcagaaacgctttgaacccactggtttccaaaacatgctttctggattgtacaaccccattgtgttctcagcctcaggagccaatctaaccgatgctcacctcttctgtcttcttgcatgcgaccgtgatctgtgttgcgatggcttcgtcctcacacaggttcaaggaggtgccatcatctgtgggttgctgagctcacccagtgtcctgctttgtaatgtcaaagactggatggatccctctgaagcctgggctaatgctacatgtcctggtgtgacatatgaccaggagagccaccaggtgatattgcgtcttggagaccaggagttcatcaagagtctgacacccttagaaggaactcaagacacctttaccaattttcagcaggtttatctctggaaagattctgacatggggtctcggcctgagtctatgggatgtagaaaagacacagtgccaaggccagcatctccaacagaagcaggtttgacaacagaacttttctcccctgtggacctcaaccaggtcattgtcaatggaaatcaatcactatccagccagaagcactggcttttcaagcacctgttttcagcccagcaggcaaacctatggtgcctttctcgttgtgtgcaggagcactctttctgtcagctcgcagagataacagagagtgcatccttgtacttcacctgcaccctctacccagaggcacaggtgtgtgatgacatcatggagtccaatgcccagggctgcagactgatcctgcctcagatgccaaaggccctgttccggaagaaagttatactggaagataaagtgaagaacttttacactcgcctgccgttccaaaaactgatggggatatccattagaaataaagtgcccatgtctgaaaaatctatttctaatgggttctttgaatgtgaacgacggtgcgatgcggacccatgctgcactggctttggatttctaaatgtttcccagttaaaaggaggagaggtgacatgtctcactctgaacagcttgggaattcagatgtgcagtgaggagaatggaggagcctggcgcattttggactgtggctctcctgacattgaagtccacacctatcccttcggatggtaccagaagcccattgctcaaaataatgctcccagtttttgccctttggttgttctgccttccctcacagagaaagtgtctctggactcgtggcagtccctggccctctcttcagtggttgttgatccatccattaggcactttgatgttgcccatgtcagcactgctgccaccagcaatttctctgctgtccgagacctctgtttgtcggaatgttcccaacatgaggcctgtctcatcaccactctgcaaacccaacctggggctgtgagatgtatgttctatgctgatactcaaagctgcacacatagtctgcagggtcagaactgccgacttctgcttcgtgaagaggccacccacatctaccggaagccaggaatctctctgctcagctatgaggcatctgtaccttctgtgcccatttccacccatggccggctgctgggcaggtcccaggccatccaggtgggtacctcatggaagcaagtggaccagttccttggagttccatatgctgccccgcccctggcagagaggcgcttccaggcaccagagcccttgaactggacaggctcctgggatgccagcaagccaagggccagctgctggcagccaggcaccagaacatccacgtctcctggagtcagtgaagattgtttgtatctcaatgtgttcatccctcagaatgtggcccctaacgcgtctgtgctggtgttcttccacaacaccatggacagggaggagagtgaaggatggccggctatcgacggctccttcttggctgctgttggcaacctcatcgtggtcactgccagctaccgagtgggtgtcttcggcttcctgagttctgggtccggagaggtgagtggcaactgggggctgctggaccaggtggcggctctgacctgggtgcagacccacatccgaggatttggcggggaccctcggcgcgtgtccctggcagcagaccgtggcggggctgatgtggccagcatccaccttctcacggccagggccaccaactcccaacttttccggagagctgtgctgatgggaggctccgcactctccccggccgccgtcatcagccatgagagggctcagcagcaggcaattgctttggcaaaggaggtcagttgccccatgtcatccagccaagaagtggtgtcctgcctccgccagaagcctgccaatgtcctcaatgatgcccagaccaagctcctggccgtgagtggccctttccactactggggtcctgtgatcgatggccacttcctccgtgagcctccagccagagcactgaagaggtctttatgggtagaggtcgatctgctcattgggagttctcaggacgacgggctcatcaacagagcaaaggctgtgaagcaatttgaggaaagtcgaggccggaccagtagcaaaacagccttttaccaggcactgcagaattctctgggtggcgaggactcagatgcccgcgtcgaggctgctgctacatggtattactctctggagcactccacggatgactatgcctccttctcccgggctctggagaatgccacccgggactactttatcatctgccctataatcgacatggccagtgcctgggcaaagagggcccgaggaaacgtcttcatgtaccatgctcctgaaaactacggccatggcagcctggagctgctggcggatgttcagtttgccttggggcttcccttctacccagcctacgaggggcagttttctctggaggagaagagcctgtcgctgaaaatcatgcagtacttttcccacttcatcagatcaggaaatcccaactacccttatgagttctcacggaaagtacccacatttgcaaccccctggcctgactttgtaccccgtgctggtggagagaactacaaggagttcagtgagctgctccccaatcgacagggcctgaagaaagccgactgctccttctggtccaagtacatctcgtctctgaagacatctgcagatggagccaagggcgggcagtcagcagagagtgaagaggaggagttgacggctggatctgggctaagagaagatctcctaagcctccaggaaccaggctctaagacctacagcaagtgaccagcccttgagctccccaaaaacctcacccgaggctgcccactatggtcatctttttctctaaaatagccacttaccttcaataaagtatctacatgcggtg

SEQ ID NO: 191196 - DNA, 745 bp, Homo sapiens
  Payload ID: 17769
  Gene Name: thyroglobulin
  ENST ID: ENST00000523901
  CDS Start-End: 44-223
aagcagtggtttctcctccttcctcccaggaagggccaggaaaatggccctggtcctggagatcttcaccctgctggcctccatctgctgggtgtcggccaatatcttcgagtaccaggtggatgcccagccccttcgtccctgtgagctgcagagggaaacggcctttctgaagcaagcagactacgtgccccagtgtgcagaggatggcagcttccagtaaggcttatgtcagcagcgaactctcaaggactgtccagtgccagaacgacggccgctcctgctggtgtgtgggtgccaacggcagtgaagtgctgggcagcaggcagccaggacggcctgtggcttgtctgtcattttgtcagctacagaaacagcagatcttactgagtggctacattaacagcacagacacctcctacctccctcagtgtcaggattcaggggactacgcgcctgttcagtgtgatgtgcagcaggtccagtgctggtgtgtggacgcagaggggatggaggtgtatgggacccgccagctggggaggccaaagcgatgtccaaggagctgtgaaataagaaatcgtcgtcttctccacggggtgggagataagtcaccaccccagtgttctgcggagggagagtttatgcctgtccagtgcaaatttgtcaacaccacagacatgatgatttttgatctggtccacagctacaacaggtttccagatgcatttgtgaccttcagttcctt

SEQ ID NO: 191197 - DNA, 5065 bp, Homo sapiens
  Payload ID: 17769
  Gene Name: thyroglobulin
  ENST ID: ENST00000523756
  CDS Start-End: 1-442
ctcggctggagcatccgcccttctgcggtcgggcccctacatgccacagtgtgatgcgtttggaagttgggagcctgtgcagtgccacgctgggactgggcactgctggtgtgtagatgagaaaggagggttcatccctggctcactgactgcccgctctctgcagattccacagtgcccgacaacctgcgagaaatctcgaaccagtgggctgctttccagttggaaacaggctagatcccaagaaaacccatctccaaaagacctgttcgtcccagcctgcctagaagcccgcggtgtccgctgccattcaacgcgtcggaggtggttggtggaacaatcctgtgtgagacaatctcgggccccacaggctctgccatgcagcagtgccaattgctgtgccgccagggctcctggagcgtgtttccaccagggccattgatatgtagcctggagagcggacgctgggagtcacagctgcctcagccccgggcctgccaacggccccagctgtggcagaccatccagacccaagggcactttcagctccagctcccgccgggcaagatgtgcagtgctgactacgcggatttgctgcagactttccaggttttcatattggatgagctgacagcccgcggcttctgccagatccaggtgaagacttttggcaccctggtttccattcctgtctgcaacaactcctctgtgcaggtgggttgtctgaccagggagcgtttaggagtgaatgttacatggaaatcacggcttgaggacatcccagtggcttctcttcctgacttacatgacattgagagagccttggtgggcaaggatctccttgggcgcttcacagatctgatccagagtggctcattccagcttcatctggactccaagacgttcccagcggaaaccatccgcttcctccaaggggaccactttggcacctctcccaggacatggtttgggtgctcggaaggattctaccaagtcttgacaagtgaggccagtcaggacggactgggatgcgttaagtgtcctgaaggaagctattcccaagatgaggaatgcattccttgtcctgttggattctaccaagaacaggcagggagcttggcctgtgtcccatgtcctgtgggcagaacgaccatttctgctggagctttcagccagactcactgtgtcactgactgtcagaggaacgaagcaggcctgcaatgtgaccagaatggccagtatcgagccagccagaaggacaggggcagtgggaaggccttctgtgtggacggcgaggggcggaggctgccatggtgggaaacagaggcccctcttgaggactcacagtgtttgatgatgcagaagtttgagaaggttccagaatcaaaggtgatcttcgacgccaatgctcctgtggctgtcagatccaaagttcctgattctgagttccccgtgatgcagtgcttgacagattgcacagaggacgaggcctgcagcttcttcaccgtgtccacgacggagccagagatttcctgtgatttctatgcttggacaagtgacaatgttgcctgcatgacttctgaccagaaacgagatgcactggggaactcaaaggccaccagctttggaagtcttcgctgccaggtgaaagtgaggagccatggtcaagattctccagctgtgtatttgaaaaagggccaaggatccaccacaacacttcagaaacgctttgaacccactggtttccaaaacatgctttctggattgtacaaccccattgtgttctcagcctcaggagccaatctaaccgatgctcacctcttctgtcttcttgcatgcgaccgtgatctgtgttgcgatggcttcgtcctcacacaggttcaaggaggtgccatcatctgtgggttgctgagctcacccagtgtcctgctttgtaatgtcaaagactggatggatccctctgaagcctgggctaatgctacatgtcctggtgtgacatatgaccaggagagccaccaggtgatattgcgtcttggagaccaggagttcatcaagagtctgacacccttagaaggaactcaagacacctttaccaattttcagcaggtttatctctggaaagattctgacatggggtctcggcctgagtctatgggatgtagaaaagacacagtgccaaggccagcatctccaacagaagcaggtttgacaacagaacttttctcccctgtggacctcaaccaggtcattgtcaatggaaatcaatcactatccagccagaagcactggcttttcaagcacctgttttcagcccagcaggcaaacctatggtgcctttctcgttgtgtgcaggagcactctttctgtcagctcgcagagataacagagagtgcatccttgtacttcacctgcaccctctacccagaggcacaggtgtgtgatgacatcatggagtccaatgcccagggctgcagactgatcctgcctcagatgccaaaggccctgttccggaagaaagttatactggaagataaagtgaagaacttttacactcgcctgccgttccaaaaactgatggggatatccattagaaataaagtgcccatgtctgaaaaatctatttctaatgggttctttgaatgtgaacgacggtgcgatgcggacccatgctgcactggctttggatttctaaatgtttcccagttaaaaggaggagaggtgacatgtctcactctgaacagcttgggaattcagatgtgcagtgaggagaatggaggagcctggcgcattttggactgtggctctcctgacattgaagtccacacctatcccttcggatggtaccagaagcccattgctcaaaataatgctcccagtttttgccctttggttgttctgccttccctcacagagaaagtgtctctggactcgtggcagtccctggccctctcttcagtggttgttgatccatccattaggcactttgatgttgcccatgtcagcactgctgccaccagcaatttctctgctgtccgagacctctgtttgtcggaatgttcccaacatgaggcctgtctcatcaccactctgcaaacccaacctggggctgtgagatgtatgttctatgctgatactcaaagctgcacacatagtctgcagggtcagaactgccgacttctgcttcgtgaagaggccacccacatctaccggaagccaggaatctctctgctcagctatgaggcatctgtaccttctgtgcccatttccacccatggccggctgctgggcaggtcccaggccatccaggtgggtacctcatggaagcaagtggaccagttccttggagttccatatgctgccccgcccctggcagagaggcgcttccaggcaccagagcccttgaactggacaggctcctgggatgccagcaagccaagggccagctgctggcagccaggcaccagaacatccacgtctcctggagtcagtgaagattgtttgtatctcaatgtgttcatccctcagaatgtggcccctaacgcgtctgtgctggtgttcttccacaacaccatggacagggaggagagtgaaggatggccggctatcgacggctccttcttggctgctgttggcaacctcatcgtggtcactgccagctaccgagtgggtgtcttcggcttcctgagttctgggtccggagaggtgagtggcaactgggggctgctggaccaggtggcggctctgacctgggtgcagacccacatccgaggatttggcggggaccctcggcgcgtgtccctggcagcagaccgtggcggggctgatgtggccagcatccaccttctcacggccagggccaccaactcccaacttttccggagagctgtgctgatgggaggctccgcactctccccggccgccgtcatcagccatgagagggctcagcagcaggcaattgctttggcaaaggaggtcagttgccccatgtcatccagccaagaagtggtgtcctgcctccgccagaagcctgccaatgtcctcaatgatgcccagaccaagctcctggccgtgagtggccctttccactactggggtcctgtgatcgatggccacttcctccgtgagcctccagccagagcactgaagaggtctttatgggtagaggtcgatctgctcattgggagttctcaggacgacgggctcatcaacagagcaaaggctgtgaagcaatttgaggaaagtcgaggccggaccagtagcaaaacagccttttaccaggcactgcagaattctctgggtggcgaggactcagatgcccgcgtcgaggctgctgctacatggtattactctctggagcactccacggatgactatgcctccttctcccgggctctggagaatgccacccgggactactttatcatctgccctataatcgacatggccagtgcctgggcaaagagggcccgaggaaacgtcttcatgtaccatgctcctgaaaactacggccatggcagcctggagctgctggcggatgttcagtttgccttggggcttcccttctacccagcctacgaggggcagttttctctggaggagaagagcctgtcgctgaaaatcatgcagtacttttcccacttcatcagatcaggaaatcccaactacccttatgagttctcacggaaagtacccacatttgcaaccccctggcctgactttgtaccccgtgctggtggagagaactacaaggagttcagtgagctgctccccaatcgacagggcctgaagaaagccgactgctccttctggtccaagtacatctcgtctctgaagacatctgcagatggagccaagggcgggcagtcagcagagagtgaagaggaggagttgacggctggatctgggctaagagaagatctcctaagcctccaggaaccaggctctaagacctacagcaagtgaccagcccttgagctccccaaaaacctcacccgaggctgcccactatggtcatctttttctctaaaatagccacttaccttcaataaagtatctacatgcggtg

SEQ ID NO: 191198 - DNA, 185 bp, Homo sapiens
  Payload ID: 17769
  Gene Name: thyroglobulin
  ENST ID: ENST00000518058
  CDS Start-End: 1-185
attctgacatggggtctcggcctgagtctatgggatgtagaaaagacacagtgccaaggccagcatctccaacagaagcaggttgtgtgcaggagcactctttctgtcagctcgcagagataacagagagtgcatccttgtacttcacctgcaccctctacccagaggcacaggtgtgtgatgac

SEQ ID NO: 191199 - DNA, 678 bp, Homo sapiens
  Payload ID: 17769
  Gene Name: thyroglobulin
  ENST ID: ENST00000518505
  CDS Start-End: 1-678
ttggaagttgggagcctgtgcagtgccacgctgggactgggcactgctggtgtgtagatgagaaaggagggttcatccctggctcactgactgcccgctctctgcagattccacagtgcccgacaacctgcgagaaatctcgaaccagtgggctgctttccagttggaaacaggctagatcccaagaaaacccatctccaaaagacctgttcgtcccagcctgcctagaaacaggagagtatgccaggctgcaggcatcgggggctggcacctggtgtgtggaccctgcatcaggagaagagttgcggcctggctcgagcagcagtgcccagtcctgcagggcagaggatgggggcttttccccagtgcaatgtgaccaggcccagggcagctgctggtgtgtcatggacagcggagaagaggtgcctgggacgcgcgtgaccgggggccagcccgcctgtgagagcccgcggtgtccgctgccattcaacgcgtcggaggtggttggtggaacaatcctgtgtgagacaatctcgggccccacaggctctgccatgcagcagtgccaattgctgtgccgccagggctcctggagcgtgtttccaccagggccattgatatgtagcctggagagcggacgctgggagtcacagctgcctcagccccgggcctgccaac

SEQ ID NO: 191200 - DNA, 581 bp, Homo sapiens
  Payload ID: 17769
  Gene Name: thyroglobulin
  ENST ID: ENST00000518108
  CDS Start-End: 1-581
acattcagaatgccagtggagagagcactcactgaggcctctccccttcctcacccctttctcttccctttcccaacaggaatctctctgctcagctatgaggcatctgtaccttctgtgcccatttccacccatggccggctgctgggcaggtcccaggccatccagggccagctgctggcagccaggcaccagaacatccacgtctcctggagtcagtgaagattgtttgtatctcaatgtgttcatccctcagaatgtggcccctaacgcgtctgtgctggtgttcttccacaacaccatggacagggaggagagtgaaggatggccggctatcgacggctccttcttggctgctgttggcaacctcatcgtggtcactgccagctaccgagtgggtgtcttcggcttcctgagttctgggtccggagaggtgagtggcaactgggggctgctggaccaggtggcggctctgacctgggtgcagacccacatccgaggatttggcggggaccctcggcgcgtgtccctggcagcagaccgtggcggggctgatgtggccagcatccaccttctcacgg

SEQ ID NO: 191201 - DNA, 481 bp, Homo sapiens
  Payload ID: 17769
  Gene Name: thyroglobulin
  ENST ID: ENST00000522797
  CDS Start-End: 1-223
gggaattcagatgtgcagtgaggagaatggaggagcctggcgcattttggactgtggctctcctgacattgaagtccacacctatcccttcggatggtaccagaagcccattgctcaaaataatgctcccagtttttgccctttggttgttctgccttccctcacagagaaagtgtttaaagtccgggaggtgagagggacccagctgaagaggatggagtgagggcttccgtataactggagtacctggtgtcatgggaagtgtctctggactcgtggcagtccctggccctctcttcagtggttgttgatccatccattaggcactttgatgttgcccatgtcagcactgctgccaccagcaatttctctgctgtccgagacctctgtttgtcggaatgttcccaacatgaggcctgtctcatcaccactctgcaaacccaacctggggctgtgagatgtatgttctatgctgatactc

SEQ ID NO: 191202 - DNA, 616 bp, Homo sapiens
  Payload ID: 17769
  Gene Name: thyroglobulin
  ENST ID: ENST00000521107
  CDS Start-End: 1-519
tcagatgcccgcgtcgaggctgctgctacatggtattactctctggagcactccacggatgactatgcctccttctcccgggctctggagaatgccacccgggactactttatcatctgccctataatcgacatggccagtgcctgggcaaagagggcccgaggaaacgtcttcatgtaccatgctcctgaaaactacggccatggcagaaatcccaactacccttatgagttctcacggaaagtacccacatttgcaaccccctggcctgactttgtaccccgtgctggtggagagaactacaaggagttcagtgagctgctccccaatcgacagggcctgaagaaagccgactgctccttctggtccaagtacatctcgtctctgaagacatctgcagatggagccaagggcgggcagtcagcagagagtgaagaggaggagttgacggctggatctgggctaagagaagatctcctaagcctccaggaaccaggctctaagacctacagcaagtgaccagcccttgagctccccaaaaacctcacccgaggctgcccactatggtcatctttttctctaaaatagccacttaccttcaataaagtatctacat

SEQ ID NO: 191203 - DNA, 3132 bp, Homo sapiens
  Payload ID: 17769
  Gene Name: thyroglobulin
  ENST ID: ENST00000519543
  CDS Start-End: 318-3023
attgcttttaaggagggcacatagttttaagagaaataggaaatggcttaatctaatacggcacgtaaaccaggtataagatgaagtggctacagtattcattctttcatccaaccagacatttttgagcacatgtggctgtggccttggacattcacaggctagtgagaattccatgtgccagccactgcatgacagtgtggcaagggatgcaatgtggacaggtgtcggttgcagtgagaatgcaggagaaggaatgctagcagcctgcaggggccaggaaaggtttctcggaggaggccagaaggatctgccagatgctcccaggtttgacaacagaacttttctcccctgtggacctcaaccaggtcattgtcaatggaaatcaatcactatccagccagaagcactggcttttcaagcacctgttttcagcccagcaggcaaacctatggtgcctttctcgttgtgtgcaggagcactctttctgtcagctcgcagagataacagagagtgcatccttgtacttcacctgcaccctctacccagaggcacaggtgtgtgatgacatcatggagtccaatgcccagggctgcagactgatcctgcctcagatgccaaaggccctgttccggaagaaagttatactggaagataaagtgaagaacttttacactcgcctgccgttccaaaaactgatggggatatccattagaaataaagtgcccatgtctgaaaaatctatttctaatgggttctttgaatgtgaacgacggtgcgatgcggacccatgctgcactggctttggatttctaaatgtttcccagttaaaaggaggagaggtgacatgtctcactctgaacagcttgggaattcagatgtgcagtgaggagaatggaggagcctggcgcattttggactgtggctctcctgacattgaagtccacacctatcccttcggatggtaccagaagcccatgtctctggactcgtggcagtccctggccctctcttcagtggttgttgatccatccattaggcactttgatgttgcccatgtcagcactgctgccaccagcaatttctctgctgtccgagacctctgtttgtcggaatgttcccaacatgaggcctgtctcatcaccactctgcaaacccaacctggggctgtgagatgtatgttctatgctgatactcaaagctgcacacatagtctgcagggtcagaactgccgacttctgcttcgtgaagaggccacccacatctaccggaagccaggaatctctctgctcagctatgaggcatctgtaccttctgtgcccatttccacccatggccggctgctgggcaggtcccaggccatccaggtgggtacctcatggaagcaagtggaccagttccttggagttccatatgctgccccgcccctggcagagaggcgcttccaggcaccagagcccttgaactggacaggctcctgggatgccagcaagccaagggccagctgctggcagccaggcaccagaacatccacgtctcctggagtcagtgaagattgtttgtatctcaatgtgttcatccctcagaatgtggcccctaacgcgtctgtgctggtgttcttccacaacaccatggacagggaggagagtgaaggatggccggctatcgacggctccttcttggctgctgttggcaacctcatcgtggtcactgccagctaccgagtgggtgtcttcggcttcctgagttctgggtccggagaggtgagtggcaactgggggctgctggaccaggtggcggctctgacctgggtgcagacccacatccgaggatttggcggggaccctcggcgcgtgtccctggcagcagaccgtggcggggctgatgtggccagcatccaccttctcacggccagggccaccaactcccaacttttccggagagctgtgctgatgggaggctccgcactctccccggccgccgtcatcagccatgagagggctcagcagcaggcaattgctttggcaaaggaggtcagttgccccatgtcatccagccaagaagtggtgtcctgcctccgccagaagcctgccaatgtcctcaatgatgcccagaccaagctcctggccgtgagtggccctttccactactggggtcctgtgatcgatggccacttcctccgtgagcctccagccagagcactgaagaggtctttatgggtagaggtcgatctgctcattgggagttctcaggacgacgggctcatcaacagagcaaaggctgtgaagcaatttgaggaaagtcgaggccggaccagtagcaaaacagccttttaccaggcactgcagaattctctgggtggcgaggactcagatgcccgcgtcgaggctgctgctacatggtattactctctggagcactccacggatgactatgcctccttctcccgggctctggagaatgccacccgggactactttatcatctgccctataatcgacatggccagtgcctgggcaaagagggcccgaggaaacgtcttcatgtaccatgctcctgaaaactacggccatggcagcctggagctgctggcggatgttcagtttgccttggggcttcccttctacccagcctacgaggggcagttttctctggaggagaagagcctgtcgctgaaaatcatgcagtacttttcccacttcatcagatcaggaaatcccaactacccttatgagttctcacggaaagtacccacatttgcaaccccctggcctgactttgtaccccgtgctggtggagagaactacaaggagttcagtgagctgctccccaatcgacagggcctgaagaaagccgactgctccttctggtccaagtacatctcgtctctgaagacatctgcagatggagccaagggcgggcagtcagcagagagtgaagaggaggagttgacggctggatctgggctaagagaagatctcctaagcctccaggaaccaggctctaagacctacagcaagtgaccagcccttgagctccccaaaaacctcacccgaggctgcccactatggtcatctttttctctaaaatagccacttaccttcaataaagtatctacatgcggtgaagcat

SEQ ID NO: 191204 - DNA, 3706 bp, Homo sapiens
  Payload ID: 17769
  Gene Name: thyroglobulin
  ENST ID: ENST00000519178
  CDS Start-End: 1-3673
ccaagaacaggcagggagcttggcctgtgtcccatgtcctgtgggcagaacgaccatttctgctggagctttcagccagactcactgtgtcactgactgtcagaggaacgaagcaggcctgcaatgtgaccagaatggccagtatcgagccagccagaaggacaggggcagtgggaaggccttctgtgtggacggcgaggggcggaggctgccatggtgggaaacagaggcccctcttgaggactcacagtgtttgatgatgcagaagtttgagaaggttccagaatcaaaggtgatcttcgacgccaatgctcctgtggctgtcagatccaaagttcctgattctgagttccccgtgatgcagtgcttgacagattgcacagaggacgaggcctgcagcttcttcaccgtgtccacgacggagccagagatttcctgtgatttctatgcttggacaagtgacaatgttgcctgcatgacttctgaccagaaacgagatgcactggggaactcaaaggccaccagctttggaagtcttcgctgccaggtgaaagtgaggagccatggtcaagattctccagctgtgtatttgaaaaagggtgccatcatctgtgggttgctgagctcacccagtgtcctgctttgtaatgtcaaagactggatggatccctctgaagcctgggctaatgctacatgtcctggtgtgacatatgaccaggagagccaccaggtgatattgcgtcttggagaccaggagttcatcaagagtctgacacccttagaaggaactcaagacacctttaccaattttcagcaggtttatctctggaaagattctgacatggggtctcggcctgagtctatgggatgtagaaaagacacagtgccaaggccagcatctccaacagaagcaggtttgacaacagaacttttctcccctgtggacctcaaccaggtcattgtcaatggaaatcaatcactatccagccagaagcactggcttttcaagcacctgttttcagcccagcaggcaaacctatggtgcctttctcgttgtgtgcaggagcactctttctgtcagctcgcagagataacagagagtgcatccttgtacttcacctgcaccctctacccagaggcacaggtgtgtgatgacatcatggagtccaatgcccagggctgcagactgatcctgcctcagatgccaaaggccctgttccggaagaaagttatactggaagataaagtgaagaacttttacactcgcctgccgttccaaaaactgatggggatatccattagaaataaagtgcccatgtctgaaaaatctatttctaatgggttctttgaatgtgaacgacggtgcgatgcggacccatgctgcactggctttggatttctaaatgtttcccagttaaaaggaggagaggtgacatgtctcactctgaacagcttgggaattcagatgtgcagtgaggagaatggaggagcctggcgcattttggactgtggctctcctgacattgaagtccacacctatcccttcggatggtaccagaagcccattgctcaaaataatgctcccagtttttgccctttggttgttctgccttccctcacagagaaagtgtctctggactcgtggcagtccctggccctctcttcagtggttgttgatccatccattaggcactttgatgttgcccatgtcagcactgctgccaccagcaatttctctgctgtccgagacctctgtttgtcggaatgttcccaacatgaggcctgtctcatcaccactctgcaaacccaacctggggctgtgagatgtatgttctatgctgatactcaaagctgcacacatagtctgcagggtcagaactgccgacttctgcttcgtgaagaggccacccacatctaccggaagccaggaatctctctgctcagctatgaggcatctgtaccttctgtgcccatttccacccatggccggctgctgggcaggtcccaggccatccaggtgggtacctcatggaagcaagtggaccagttccttggagttccatatgctgccccgcccctggcagagaggcgcttccaggcaccagagcccttgaactggacaggctcctgggatgccagcaagccaagggccagctgctggcagccaggcaccagaacatccacgtctcctggagtcagtgaagattgtttgtatctcaatgtgttcatccctcagaatgtggcccctaacgcgtctgtgctggtgttcttccacaacaccatggacagggaggagagtgaaggatggccggctatcgacggctccttcttggctgctgttggcaacctcatcgtggtcactgccagctaccgagtgggtgtcttcggcttcctgagttctgggtccggagaggtgagtggcaactgggggctgctggaccaggtggcggctctgacctgggtgcagacccacatccgaggatttggcggggaccctcggcgcgtgtccctggcagcagaccgtggcggggctgatgtggccagcatccaccttctcacggccagggccaccaactcccaacttttccggagagctgtgctgatgggaggctccgcactctccccggccgccgtcatcagccatgagagggctcagcagcaggcaattgctttggcaaaggaggtcagttgccccatgtcatccagccaagaagtggtgtcctgcctccgccagaagcctgccaatgtcctcaatgatgcccagaccaagctcctggccgtgagtggccctttccactactggggtcctgtgatcgatggccacttcctccgtgagcctccagccagagcactgaagaggtctttatgggtagaggtcgatctgctcattgggagttctcaggacgacgggctcatcaacagagcaaaggctgtgaagcaatttgaggaaagtcgaggccggaccagtagcaaaacagccttttaccaggcactgcagaattctctgggtggcgaggactcagatgcccgcgtcgaggctgctgctacatggtattactctctggagcactccacggatgactatgcctccttctcccgggctctggagaatgccacccgggactactttatcatctgccctataatcgacatggccagtgcctgggcaaagagggcccgaggaaacgtcttcatgtaccatgctcctgaaaactacggccatggcagcctggagctgctggcggatgttcagtttgccttggggcttcccttctacccagcctacgaggggcagttttctctggaggagaagagcctgtcgctgaaaatcatgcagtacttttcccacttcatcagatcaggaaatcccaactacccttatgagttctcacggaaagtacccacatttgcaaccccctggcctgactttgtaccccgtgctggtggagagaactacaaggagttcagtgagctgctccccaatcgacagggcctgaagaaagccgactgctccttctggtccaagtacatctcgtctctgaagacatctgcagatggagccaagggcgggcagtcagcagagagtgaagaggaggagttgacggctggatctgggctaagagaagatctcctaagcctccaggaaccaggctctaagacctacagcaagtgaccagcccttgagctccccaaaaacctcacccga

SEQ ID NO: 191205 - DNA, 5900 bp, Homo sapiens
  Payload ID: 17770
  Gene Name: thyroid adenoma associated
  ENST ID: ENST00000398653
  CDS Start-End: 133-1026
agtcgaccgtggaccgcgctgcgagcctcggagacgccgtagaaggagacctgcttccgggactggaccaggcgcctgcgactcttctcagacgccgacgtgcacgagtgactactattaattctatttaaaatgggtgtaaagaagaagaaagaaatgcaagttgctgcgctgaccatttgccatcaggaccttgaaactttgaaatcttttgctgatgtggaagggaaaaatctagcttctttgctgttacattgtgtgcaactcacggatggagtgtcacaaatccattatattaaacagattgtgcctctgctggagaaagcagataaaaatggcatgtgtgatcccactattcaaagttgtttggatatcttagcaggcatttatctttctttgagtctaaagaatcccttgaagaaagtattggcaagctcactaaatagcctgcctgatttttttctacctgaggctatgcaccgttttacttctcgtcttcaggaagaattgaatactactgacttatactcttacaggaaagttactgacaatatttcttcctgtatggagaactttaacttgggtagagcaagtgttaataatctgcttaaaaatgtgcttcattttctgcagaagagtttaattgaaatcctggaagaaaatagaaaatgtgctggaaatcatattattcaaacacagttgatgaatgacttactggtaggcattagagtttcaatgatgttagtacagaaagtacaagatttccagggaaatctttggaagacttccgattctcccatatggcaaaatatgtgtggattgctgagtatttttaccaaggttttaagcgatgatgatctgttacagactgtacagagcacatctggattagctattattctttttattaagactatgtttcacccgtctgaaaagattcctcatttgtgtgctgcttcgttcagtggactgcaccagtgtccccgagtggtttatgagcagctgcaggagcctctgttgtggtgacatctctcagtcagctgtcttattcctctgtcaggggacacttgccatgttggactggcagaacggaagcatgggtcggagtggggaggccctgctcttggatactgcacatgttttgttcaccttgagttcacagattaaagagccaacgctggaaatgtttctgtctagaatcttagcatcctggactaattcagccatacaagtccttgaatcaagttccccgagcctaacggacagcctgaatgggaattcaagtatagttgggagacttttggaatatgtctatacccattgggaacatccattggatgctctgagacaccaaaccaaaatcatgttcaaaaaccttctccaaatgcaccggctcactgtggaaggtgcagatttcgtccctgatcctttctttgtggaattgactgagagtcttttacgattggaatggcatattaaaggaaagtacacgtgccttggttgtttggtagagtgcataggagttgaacatattttggctatagataaaactattccatctcaaatcttagaggtgatgggagaccagtcattggtaccttatgcaagtgacctcttggaaaccatgtttagaaatcataagagtcatttgaaatcccagactgctgagagttcttggattgaccagtggcatgagacttgggtttctcctctcctttttatattgtgtgaaggaaacttggatcaaaaatcttacgtgattgattattacttgccaaaattattaagttacagccctgaaagcttacagtacatggtaaagattcttcagacttctattgatgctaaaactggacaagagcaatctttcccatccttagggtcttgtaatagcaggggggctctgggagctttgatggcatgtctgcgaatagctagagctcatggacatcttcagtctgcaactgatacctgggagaacctcgtgtctgatgcaagaataaagcaaggcttaattcatcagcattgccaagtaaggatagatacattaggcttgctttgtgaaagtaatcggagcacagaaattgtttccatggaagaaatgcagtggattcagttctttattacatacaatcttaacagccagtctccaggagtgcggcaacagatctgttctcttcttaaaaagttgttttgtaggatacaggaaagttctcaggtactttataaattggagcagagtaaatccaaacgtgaaccagagaatgagttaaccaaacagcacccttctgtttctttacagcagtataagaatttcatgtcatccatttgtaacagtctttttgaagcattgtttcctggatcttcctactcgactagattttcagctttaaccattttaggttcaatagctgaagtttttcatgtcccagaaggcagaatttatacagtatatcagctgagtcatgatattgatgttggtcgtttccaaacactaatggaatgttttaccagcacttttgaagacgtgaaaattttagcatttgatcttctgatgaagttatcaaaaacagctgtacattttcaggattcggggaaactgcaaggcttatttcaggcagcattggagctcagcacaagcaccaaaccatacgactgtgtgacagcttcctacctgctgaacttcttaatctggcaggatgctctaccgtcatccttgtctgcctacttaactcagcaagttgcatgtgataatggagataggcctgctgctgtggtggaaaggaacacattaatggttatcaaatgcttgatggaaaatcttgaggaagaagtatctcaggctgaaaattctctgcttcaggcagcagcagcatttccaatgtatgggcgagtccactgtataacaggagctttgcagaagttatctctaaacagcctgcagttggtgagcgagtggagacctgtggtagagaagctccttttgatgtcctacaggctttccactgtggtgtctccagtcattcagagctcatcccctgaaggcctcatcccaatggacactgattcagagtcagcaagccgcttacagatgattctgaatgagattcagcctcgagatactaatgattattttaaccaagccaaaatattgaaagaacatgatagctttgatatgaaggacttgaatgctagtgtggtgaatattgatacttctacagaaatcaaaggtaaagaagtaaaaacatgtgatgtaactgcgcagatggtgctggtatgttgttggagaagtatgaaggaagttgctttacttttaggcatgttgtgccagcttctgcccatgcagcctgtgccagaatcttctgatggattattgacggtggagcaggtaaaagaaataggagattactttaaacaacaccttttgcagtccaggcacagaggagcatttgaattggcttatactggttttgtgaaactcactgaagtactaaacaggtgcccaaatgtgagtctgcaaaagctgccagaacagtggctatggagtgttttagaggaaattaaatgcagtgatccttcatctaaactctgtgctacaaggcgcagtgctggaattcctttctacatacaggcactgttggcatctgaaccaaagaaaggcagaatggatttgttgaaaataacaatgaaagagttaatctctttggctgggcctacagatgacatacagagtacagtcccccaggttcatgctttaaatatccttagagcattgttcagagatacgcgcctgggagaaaatattattccttatgttgctgatggagctaaggctgcaattctgggttttacatcaccggtctgggcatgatatgggagaaccaaatcgtcatccaagcatgtttctcttacttttggtgttggagagactctacgcttccccgatggatggtacttcttctgctctcagcatgggaccttttgttcccttcattatgaggtgtggtcactcacctgtctaccactcccgtgaaatggcagctcgtgccttggtcccatttgttatgatagatcacattcctaataccattcgaactctgttgtccacactccccagctgcactgaccagtgtttccggcaaaaccacattcatgggacacttctccaggtttttcatttgttgcaagcctactcagactccaaacacggaacgaattcagacttccagcacgagctgactgacatcactgtttgtaccaaagccaaactctggctggccaagaggcaaaatccatgtttggtgaccagagctgtatatattgatattctcttcctattgacttgctgcctcaacagatctgcaaaggacaaccagccagttctggagagtcttggcttctgggaggaagtcagagggattatctcaggatcagagctgataacgggattcccttgggccttcaaggtgccaggcctgccccagtacctccagagcctcaccagactagccattgctgcagtgtgggccgcggcagccaagagtggagagcgggagacgaatgtccccatctctttctctcagctgttagaatctgccttccctgaagtgcgctcactaacactggaagccctcttggaaaagttcttagcagcagcctctggacttggagagaagggcgtgccacccttgctgtgcaacatgggagagaagttcttattgttggccatgaaggaaaatcacccagaatgcttctgcaagatactgaaaattctccactgcatggaccctggtgagtggcttccccagacggagcactgtgtccatctgaccccaaaggagttcttgatctggacgatggatattgcttccaatgaaagatctgaaattcagagtgtagctctgagacttgcttccaaagtcatttcccaccacatgcagacatgtgtggagaacagggaattgatagctgctgagctgaagcagtgggttcagctggtcatcttgtcatgtgaagaccatcttcctacagagtctaggctggccgtcgttgaagtcctcaccagtactacaccacttttcctcaccaacccccatcctattcttgagttgcaggatacacttgctctctggaagtgtgtccttacccttctgcagagtgaggagcaagctgttagagatgcagccacggaaaccgtgacaactgccatgtcacaagaaaatacctgccagtcaacagagtttgccttctgccaggtggatgcctccatcgctctggccctggccctggccgtcctgtgtgatctgctccagcagtgggaccagttggcccctggactgcccatcctgctgggatggctgttgggagagagtgatgacctcgtggcctgtgtggagagcatgcatcaggtggaagaagactacctgtttgaaaaagcagaagtcaacttttgggccgagaccctgatctttgtgaaatacctctgcaagcacctcttctgtctcctctcaaagtccggctggcgtcccccaagccctgagatgctctgtcaccttcaaaggatggtgtcagagcagtgccacctcctgtctcagttcttcagagagcttccaccagctgctgagtttgtgaagacagtggagttcacaagactacgcattcaagaggaaaggactttggcttgcttgaggctgctggcctttttggaaggaaaggaaggggaagacaccctagttctcagtgtttgggactcttatgcagaatcgaggcagttaactcttccaagaacagaagcggcatgttgaagaaaatctgggggattgggatgggggtatgtgtggatttttcctccactaaatctgcaggaaacatgttgaacataaattcaaaaattttatccc

SEQ ID NO: 191206 - DNA, 5585 bp, Homo sapiens
  Payload ID: 17770
  Gene Name: thyroid adenoma associated
  ENST ID: ENST00000408045
  CDS Start-End: 133-1026
agtcgaccgtggaccgcgctgcgagcctcggagacgccgtagaaggagacctgcttccgggactggaccaggcgcctgcgactcttctcagacgccgacgtgcacgagtgactactattaattctatttaaaatgggtgtaaagaagaagaaagaaatgcaagttgctgcgctgaccatttgccatcaggaccttgaaactttgaaatcttttgctgatgtggaagggaaaaatctagcttctttgctgttacattgtgtgcaactcacggatggagtgtcacaaatccattatattaaacagattgtgcctctgctggagaaagcagataaaaatggcatgtgtgatcccactattcaaagttgtttggatatcttagcaggcatttatctttctttgagtctaaagaatcccttgaagaaagtattggcaagctcactaaatagcctgcctgatttttttctacctgaggctatgcaccgttttacttctcgtcttcaggaagaattgaatactactgacttatactcttacaggaaagttactgacaatatttcttcctgtatggagaactttaacttgggtagagcaagtgttaataatctgcttaaaaatgtgcttcattttctgcagaagagtttaattgaaatcctggaagaaaatagaaaatgtgctggaaatcatattattcaaacacagttgatgaatgacttactggtaggcattagagtttcaatgatgttagtacagaaagtacaagatttccagggaaatctttggaagacttccgattctcccatatggcaaaatatgtgtggattgctgagtatttttaccaaggttttaagcgatgatgatctgttacagactgtacagagcacatctggattagctattattctttttattaagactatgtttcacccgtctgaaaagattcctcatttgtgtgctgcttcgttcagtggactgcaccagtgtccccgagtggtttatgagcagctgcaggagcctctgttgtggtgacatctctcagtcagctgtcttattcctctgtcaggggacacttgccatgttggactggcagaacggaagcatgggtcggagtggggaggccctgctcttggatactgcacatgttttgttcaccttgagttcacagattaaagagccaacgctggaaatgtttctgtctagaatcttagcatcctggactaattcagccatacaagtccttgaatcaagttccccgagcctaacggacagcctgaatgggaattcaagtatagttgggagacttttggaatatgtctatacccattgggaacatccattggatgctctgagacaccaaaccaaaatcatgttcaaaaaccttctccaaatgcaccggctcactgtggaaggtgcagatttcgtccctgatcctttctttgtggaattgactgagagtcttttacgattggaatggcatattaaaggaaagtacacgtgccttggttgtttggtagagtgcataggagttgaacatattttggctatagataaaactattccatctcaaatcttagaggtgatgggagaccagtcattggtaccttatgcaagtgacctcttggaaaccatgtttagaaatcataagagtcatttgaaatcccagactgctgagagttcttggattgaccagtggcatgagacttgggtttctcctctcctttttatattgtgtgaaggaaacttggatcaaaaatcttacgtgattgattattacttgccaaaattattaagttacagccctgaaagcttacagtacatggtaaagattcttcagacttctattgatgctaaaactggacaagagcaatctttcccatccttagggtcttgtaatagcaggggggctctgggagctttgatggcatgtctgcgaatagctagagctcatggacatcttcagtctgcaactgatacctgggagaacctcgtgtctgatgcaagaataaagcaaggcttaattcatcagcattgccaagtaaggatagatacattaggcttgctttgtgaaagtaatcggagcacagaaattgtttccatggaagaaatgcagtggattcagttctttattacatacaatcttaacagccagtctccaggagtgcggcaacagatctgttctcttcttaaaaagttgttttgtaggatacaggaaagttctcaggtactttataaattggagcagagtaaatccaaacgtgaaccagagaatgagttaaccaaacagcacccttctgtttctttacagcagtataagaatttcatgtcatccatttgtaacagtctttttgaagcattgtttcctggatcttcctactcgactagattttcagctttaaccattttaggttcaatagctgaagtttttcatgtcccagaaggcagaatttatacagtatatcagctgagtcatgatattgatgttggtcgtttccaaacactaatggaatgttttaccagcacttttgaagacgtgaaaattttagcatttgatcttctgatgaagttatcaaaaacagctgtacattttcaggattcggggaaactgcaaggcttatttcaggcagcattggagctcagcacaagcaccaaaccatacgactgtgtgacagcttcctacctgctgaacttcttaatctggcaggatgctctaccgtcatccttgtctgcctacttaactcagcaagttgcatgtgataatggagataggcctgctgctgtggtggaaaggaacacattaatggttatcaaatgcttgatggaaaatcttgaggaagaagtatctcaggctgaaaattctctgcttcaggcagcagcagcatttccaatgtatgggcgagtccactgtataacaggagctttgcagaagttatctctaaacctgcagttggtgagcgagtggagacctgtggtagagaagctccttttgatgtcctacaggctttccactgtggtgtctccagtcattcagagctcatcccctgaaggcctcatcccaatggacactgattcagagtcagcaagccgcttacagatgattctgaatgagattcagcctcgagatactaatgattattttaaccaagccaaaatattgaaagaacatgatagctttgatatgaaggacttgaatgctagtgtggtgaatattgatacttctacagaaatcaaaggtaaagaagtaaaaacatgtgatgtaactgcgcagatggtgctggtatgttgttggagaagtatgaaggaagttgctttacttttaggcatgttgtgccagcttctgcccatgcagcctgtgccagaatcttctgatggattattgacggtggagcaggtaaaagaaataggagattactttaaacaacaccttttgcagtccaggcacagaggagcatttgaattggcttatactggttttgtgaaactcactgaagtactaaacaggtgcccaaatgtgagtctgcaaaagctgccagaacagtggctatggagtgttttagaggaaattaaatgcagtgatccttcatctaaactctgtgctacaaggcgcagtgctggaattcctttctacatacaggcactgttggcatctgaaccaaagaaaggcagaatggatttgttgaaaataacaatgaaagagttaatctctttggctgggcctacagatgacatacagagtacagtcccccaggttcatgctttaaatatccttagagcattgttcagagatacgcgcctgggagaaaatattattccttatgttgctgatggagctaaggctgcaattctgggttttacatcaccggtctgggcagtgcgaaattcatccacacttctctttagtgccttgatcacaagaatttttggagttaaaagggcaaaggatgaacattccaaaacaaatagaatgacagggagagagtttttctctcgtttcccagaactctatccttttcttctcaaacagttggaaactgtagccaatacagtagacagtgatatgggagaaccaaatcgtcatccaagcatgtttctcttacttttggtgttggagagactctacgcttccccgatggatggtacttcttctgctctcagcatgggaccttttgttcccttcattatgaggtgtggtcactcacctgtctaccactcccgtgaaatggcagctcgtgccttggtcccatttgttatgatagatcacattcctaataccattcgaactctgttgtccacactccccagctgcactgaccagtgtttccggcaaaaccacattcatgggacacttctccaggtttttcatttgttgcaagcctactcagactccaaacacggaacgaattcagacttccagcacgagctgactgacatcactgtttgtaccaaagccaaactctggctggccaagaggtatgttaaaatcccacatgagcaaggagttatcaggggttaggaatacatttgagaattgctgtttctagttgtggggagttttaaaagtcattggcatgagttttctaaacttattggagtatttatccttttagaactttgggttgtggtaaagaaagaaaaatattttcttgacaatttttctaaaactgctaagtgactgaggggcatgtaatatggctttttgtctgcccaccaatcagcttgtttttgttgaaacctgctgcgtgcccagtcctgtgttagatattataacaatgaaaggcagtaattgactaaatcatgtggtacagactcttaggtgccgtggcaactcagagattagagattgctgtaggcttgagcaggcactgagggacagatagggtgtgaatagcaagaggggatggaagttgcctttcttaggtgggtagtaaggtagcttgaataagcaaggcaaaaaagaatagaaacatatttttcatccttgccattgttagtttatcctggaacttagaacatttactgtgtgaaagatgaaggagtaaaaggaatttctcatgtaatatacagggagtcctctctgtaatgccatgttcaaaatctgtgttgcaggactctggtggtggtaggatagtgttaactgcaaaggccctccgtaggtcctctgtaagttccaccagagtagctccagaagaggcgcatgtgttagtgttactacctttcctgccatagtacacgcatttaattaagagtcagtttattggccgggtgtggtggttcatgtctgtaatcccagcactttgggaggctagggcagaaggattgcttgagcccaggagttcaagaacagcctggacaacataacgagaccccatctctacaaaacaacgacaacaacaaaaattagccaggtatggtggtgcatgcctgtagtcccaactacttgggaggctaaggcaggaggatggtttgggcccaggagtttaaggctctagtgagctgtgattgcaccactgcactccagactgggtgacagagtgagaccttgtttcaaaaataaataaatttctgatgcttagagtttgagaaacaaacaa

SEQ ID NO: 191207 - DNA, 3043 bp, Homo sapiens
  Payload ID: 17770
  Gene Name: thyroid adenoma associated
  Uniprot ID: Q6YHU6
  ENST ID: ENST00000404790
  CDS Start-End: 118-2802
gcgctgcgagcctcggagacgccgtagaaggagacctgcttccgggactggaccaggcgcctgcgactcttctcagacgccgacgtgcacgagtgactactattaattctatttaaaatgggtgtaaagaagaagaaagaaatgcaagttgctgcgctgaccatttgccatcaggaccttgaaactttgaaatcttttgctgatgtggaagggaaaaatctagcttctttgctgttacattgtgtgcaactcacggatggagtgtcacaaatccattatattaaacagattgtgcctctgctggagaaagcagataaaaatggcatgtgtgatcccactattcaaagttgtttggatatcttagcaggcatttatctttctttgagtctaaagaatcccttgaagaaagtattggcaagctcactaaatagcctgcctgatttttttctacctgaggctatgcaccgttttacttctcgtcttcaggaagaattgaatactactgacttatactcttacaggaaagttactgacaatatttcttcctgtatggagaactttaacttgggtagagcaagtgttaataatctgcttaaaaatgtgcttcattttctgcagaagagtttaattgaaatcctggaagaaaatagaaaatgtgctggaaatcatattattcaaacacagttgatgaatgacttactggtaggcattagagtttcaatgatgttagtacagaaagtacaagatttccagggaaatctttggaagacttccgattctcccatatggcaaaatatgtgtggattgctgagtatttttaccaaggttttaagcgatgatgatctgttacagactgtacagagcacatctggattagctattattctttttattaagactatgtttcacccgtctgaaaagattcctcatttgattagcagtgtgctgcttcgttcagtggactgcaccagtgtccccgagtggtttatgagcagctgcaggagcctctgttgtggtgacatctctcagtcagctgtcttattcctctgtcaggggacacttgccatgttggactggcagaacggaagcatgggtcggagtggggaggccctgctcttggatactgcacatgttttgttcaccttgagttcacagattaaagagccaacgctggaaatgtttctgtctagaatcttagcatcctggactaattcagccatacaagtccttgaatcaagttccccgagcctaacggacagcctgaatgggaattcaagtatagttgggagacttttggaatatgtctatacccattgggaacatccattggatgctctgagacaccaaaccaaaatcatgttcaaaaaccttctccaaatgcaccggctcactgtggaaggtgcagatttcgtccctgatcctttctttgtggaattgactgagagtcttttacgattggaatggcatattaaaggaaagtacacgtgccttggttgtttggtagagtgcataggagttgaacatattttggctatagataaaactattccatctcaaatcttagaggtgatgggagaccagtcattggtaccttatgcaagtgacctcttggaaaccatgtttagaaatcataagagtcatttgaaatcccagactgctgagagttcttggattgaccagtggcatgagacttgggtttctcctctcctttttatattgtgtgaaggaaacttggatcaaaaatcttacgtgattgattattacttgccaaaattattaagttacagccctgaaagcttacagtacatggtaaagattcttcagacttctattgatgctaaaactggacaagagcaatctttcccatccttagggtcttgtaatagcaggggggctctgggagctttgatggcatgtctgcgaatagctagagctcatggacatcttcagtctgcaactgatacctgggagaacctcgtgtctgatgcaagaataaagcaaggcttaattcatcagcattgccaagtaaggatagatacattaggcttgctttgtgaaagtaatcggagcacagaaattgtttccatggaagaaatgcagtggattcagttctttattacatacaatcttaacagccagtctccaggagtgcggcaacagatctgttctcttcttaaaaagttgttttgtaggatacaggaaagttctcaggtactttataaattggagcagagtaaatccaaacgtgaaccagagaatgagttaaccaaacagcacccttctgtttctttacagcagtataagaatttcatgtcatccatttgtaacagtctttttgaagcattgtttcctggatcttcctactcgactagattttcagctttaaccattttaggttcaatagctgaagtttttcatgtcccagaaggcagaatttatacagtatatcagctgagtcatgatattgatgttggtcgtttccaaacactaatggaatgttttaccagcacttttgaagacgtgaaaattttagcatttgatcttctgatgaagttatcaaaaacagctgtacattttcaggattcggggaaactgcaaggcttatttcaggcagcattggagctcagcacaagcaccaaaccatacgactgtgtgacagcttcctacctgctgaacttcttaatctggcaggatgctctaccgtcatccttgtctgcctacttaactcagcaagttgcatgtgataatggagataggcctgctgctgtggtggaaaggaacacattaatgggtttgtattgatgtttgctcttatcaaaacgaatagcttagtctcagtattcatttggttagaatatctaatggttaaacatatattttgtggttttttatttaaaagtttatcagcatataagagcaccatgggttctcattatgcaaatgaacattttagtcagctataatacttttttctaaacagtggatttatgttgaataagtacatatacaaatatttattaataaagctcttttgaaatgagaa

SEQ ID NO: 191208 - DNA, 2749 bp, Homo sapiens
  Payload ID: 17770
  Gene Name: thyroid adenoma associated
  ENST ID: ENST00000402796
  CDS Start-End: 1-1227
cttctccaaatgcaccggctcactgtggaaggtgcagatttcgtccctgatcctttctttgtggaattgactgagagtcttttacgattggaatggcatattaaaggaaagtacacgtgccttggttgtttggtagagtgcataggagttgaacatattttggctatagataaaactattccatctcaaatcttagaggtgatgggagaccagtcattggtaccttatgcaagtgacctcttggaaaccatgtttagaaatcataagagtcatttgaaatcccagactgctgagagttcttggattgaccagtggcatgagacttgggtttctcctctcctttttatattgtgtgaaggaaacttggatcaaaaatcttacgtgattgattattacttgccaaaattattaagttacagccctgaaagcttacagtacatggtaaagattcttcagacttctattgatgctaaaactggacaagagcaatctttcccatccttagggtcttgtaatagcaggggggctctgggagctttgatggcatgtctgcgaatagctagagctcatggacatcttcagtctgcaactgatacctgggagaacctcgtgtctgatgcaagaataaagcaaggcttaattcatcagcattgccaagtaaggatagatacattaggcttgctttgtgaaagtaatcggagcacagaaattgtttccatggaagaaatgcagtggattcagttctttattacatacaatcttaacagccagtctccaggagtgcggcaacagatctgttctcttcttaaaaagttgttttgtaggatacaggaaagttctcaggtactttataaattggagcagagtaaatccaaacgtgaaccagagaatgagttaaccaaacagcacccttctgtttctttacagcagtataagaatttcatgtcatccatttgtaacagtctttttgaagcattgtttcctggatcttcctactcgactagattttcagctttaaccattttaggttcaatagctgaagtttttcatgtcccagaaggcagaatttatacagtatatcagctgagtcatgatattgatgttggtcgtttccaaacactaatggaatgttttaccagcacttttgaagacgtgaaaattttagcatttgatcttctgatgaagttatcaaaaacagctgtacattttcagttatcaaatgcttgatggaaaatcttgaggaagaagtatctcaggctgaaaattctctgcttcaggcagcagcagcatttccaatgtatgggcgagtccactgtataacaggagctttgcagaagttatctctaaacagcctgcagttggtgagcgagtggagacctgtggtagagaagctccttttgatgtcctacaggctttccactgtggtgtctccagtcattcagagctcatcccctgaaggcctcatcccaatggacactgattcagagtcagcaagccgcttacagatgattctgaatgagattcagcctcgagatactaatgattattttaaccaagccaaaatattgaaagaacatgatagctttgatatgaaggacttgaatgctagtgtggtgaatattgatacttctacagaaatcaaaggtaaagaagtaaaaacatgtgatgtaactgcgcagatggtgctggtatgttgttggagaagtatgaaggaagttgctttacttttaggcatgttgtgccagcttctgcccatgcagcctgtgccagaatcttctgatggattattgacggtggagcaggtaaaagaaataggagattactttaaacaacaccttttgcagtccaggcacagaggagcatttgaattggcttatactggttttgtgaaactcactgaagtactaaacaggtgcccaaatgtgagtctgcaaaagctgccagaacagtggctatggagtgttttagaggaaattaaatgcagtgatccttcatctaaactctgtgctacaaggcgcagtgctggaattcctttctacatacaggcactgttggcatctgaaccaaagaaaggcagaatggatttgttgaaaataacaatgaaagagttaatctctttggctgggcctacagatgacatacagagtacagtcccccaggttcatgctttaaatatccttagagcattgttcagagatacgcgcctgggagaaaatattattccttatgttgctgatggagctaaggctgcaattctgggttttacatcaccggtctgggcagtgcgaaattcatccacacttctctttagtgccttgatcacaagaatttttggagttaaaagggcaaaggatgaacattccaaaacaaatagaatgacagggagagagtttttctctcgtttcccagaactctatccttttcttctcaaacagttggaaactgtagccaatacagtagacaggtgtggtcactcacctgtctaccactcccgtgaaatggcagctcgtgccttggtcccatttgttatgatagatcacattcctaataccattcgaactctgttgtccacactccccagctgcactgaccagtgtttccggcaaaaccacattcatgggacacttctccaggtttttcatttgttgcaagcctactcagactccaaacacggaacgaattcagacttccagcacgagctgactgacatcactgtttgtaccaaagccaaactctggctggccaagag

SEQ ID NO: 191209 - DNA, 2974 bp, Homo sapiens
  Payload ID: 17770
  Gene Name: thyroid adenoma associated
  Uniprot ID: Q6YHU6
  ENST ID: ENST00000402360
  CDS Start-End: 29-2842
gcagtgactactattaattctatttaaaatgggtgtaaagaagaagaaagaaatgcaagttgctgcgctgaccatttgccatcaggaccttgaaactttgaaatcttttgctgatgtggaagggaaaaatctagcttctttgctgttacattgtgtgcaactcacggatggagtgtcacaaatccattatattaaacagattgtgcctctgctggagaaagcagataaaaatggcatgtgtgatcccactattcaaagttgtttggatatcttagcaggcatttatctttctttgagtctaaagaatcccttgaagaaagtattggcaagctcactaaatagcctgcctgatttttttctacctgaggctatgcaccgttttacttctcgtcttcaggaagaattgaatactactgacttatactcttacaggaaagttactgacaatatttcttcctgtatggagaactttaacttgggtagagcaagtgttaataatctgcttaaaaatgtgcttcattttctgcagaagagtttaattgaaatcctggaagaaaatagaaaatgtgctggaaatcatattattcaaacacagttgatgaatgacttactggtaggcattagagtttcaatgatgttagtacagaaagtacaagatttccagggaaatctttggaagacttccgattctcccatatggcaaaatatgtgtggattgctgagtatttttaccaaggttttaagcgatgatgatctgttacagactgtacagagcacatctggattagctattattctttttattaagactatgtttcacccgtctgaaaagattcctcatttgattagcagtgtgctgcttcgttcagtggactgcaccagtgtccccgagtggtttatgagcagctgcaggagcctctgttgtggtgacatctctcagtcagctgtcttattcctctgtcaggggacacttgccatgttggactggcagaacggaagcatgggtcggagtggggaggccctgctcttggatactgcacatgttttgttcaccttgagttcacagattaaagagccaacgctggaaatgtttctgtctagaatcttagcatcctggactaattcagccatacaagtccttgaatcaagttccccgagcctaacggacagcctgaatgggaattcaagtatagttgggagacttttggaatatgtctatacccattgggaacatccattggatgctctgagacaccaaaccaaaatcatgttcaaaaaccttctccaaatgcaccggctcactgtggaaggtgcagatttcgtccctgatcctttctttgtggaattgactgagagtcttttacgattggaatggcatattaaaggaaagtacacgtgccttggttgtttggtagagtgcataggagttgaacatattttggctatagataaaactattccatctcaaatcttagaggtgatgggagaccagtcattggtaccttatgcaagtgacctcttggaaaccatgtttagaaatcataagagtcatttgaaatcccagactgctgagagttcttggattgaccagtggcatgagacttgggtttctcctctcctttttatattgtgtgaaggaaacttggatcaaaaatcttacgtgattgattattacttgccaaaattattaagttacagccctgaaagcttacagtacatggtaaagattcttcagacttctattgatgctaaaactggacaagagcaatctttcccatccttagggtcttgtaatagcaggggggctctgggagctttgatggcatgtctgcgaatagctagagctcatggacatcttcagtctgcaactgatacctgggagaacctcgtgtctgatgcaagaataaagcaaggcttaattcatcagcattgccaagtaaggatagatacattaggcttgctttgtgaaagtaatcggagcacagaaattgtttccatggaagaaatgcagtggattcagttctttattacatacaatcttaacagccagtctccaggagtgcggcaacagatctgttctcttcttaaaaagttgttttgtaggatacaggaaagttctcaggtactttataaattggagcagagtaaatccaaacgtgaaccagagaatgagttaaccaaacagcacccttctgtttctttacagcagtataagaatttcatgtcatccatttgtaacagtctttttgaagcattgtttcctggatcttcctactcgactagattttcagctttaaccattttaggttcaatagctgaagtttttcatgtcccagaaggcagaatttatacagtatatcagctgagtcatgatattgatgttggtcgtttccaaacactaatggaatgttttaccagcacttttgaagacgtgaaaattttagcatttgatcttctgatgaagttatcaaaaacagctgtacattttcaggattcggggaaactgcaaggcttatttcaggcagcattggagctcagcacaagcaccaaaccatacgactgtgtgacagcttcctacctgctgaacttcttaatctggcaggatgctctaccgtcatccttgtctgcctacttaactcagcaagttgcatgtgataatggagataggcctgctgctgtggtggaaaggaacacattaatggttatcaaatgcttgatggaaaatcttgaggaagaagtatctcaggctgaaaattctctgcttcaggcagcagcagcatttccaatgtatgggcgagtccactgtataacaggagctttgcagaagttatctctaaagtaaggatttccacagctgcctcctgtctcagaaatccattcatttctgagctttaacctctggttggaatgtgtcctgggaaaggaatgcagtctattgctttgaataaaattgaaaatcagatttaaaaacata

SEQ ID NO: 191210 - DNA, 6939 bp, Homo sapiens
  Payload ID: 17770
  Gene Name: thyroid adenoma associated
  ENST ID: ENST00000403856
  CDS Start-End: 149-2761
agacgccgtagaaggagacctgcttccgggactggaccaggcgcctgcgactcttctcagacgccgacgtgcacgagaaatcaggacacggtagtacctcctcttagtctaatgagtcactgagtgactactattaattctatttaaaatgggtgtaaagaagaagaaagaaatgcaagttgctgcgctgaccatttgccatcaggaccttgaaactttgaaatcttttgctgatgtggaagggaaaaatctagcttctttgctgttacattgtgtgcaactcacggatggagtgtcacaaatccattatattaaacagattgtgcctctgctggagaaagcagataaaaatggcatgtgtgatcccactattcaaagttgtttggatatcttagcaggcatttatctttctttgagtctaaagaatcccttgaagaaagtattggcaagctcactaaatagcctgcctgatttttttctacctgaggctatgcaccgttttacttctcgtcttcaggaagaattgaatactactgacttatactcttacaggaaagttactgacaatatttcttcctgtatggagaactttaacttgggtagagcaagtgttaataatctgcttaaaaatgtgcttcattttctgcagaagagtttaattgaaatcctggaagaaaatagaaaatgtgctggaaatcatattattcaaacacagttgatgaatgacttactggtaggcattagagtttcaatgatgttagtacagaaagtacaagatttccagggaaatctttggaagacttccgattctcccatatggcaaaatatgtgtggattgctgagtatttttaccaaggttttaagcgatgatgatctgttacagactgtacagagcacatctggattagctattattctttttattaagactatgtttcacccgtctgaaaagattcctcatttgattagcagtgtgctgcttcgttcagtggactgcaccagtgtccccgagtggtttatgagcagctgcaggagcctctgttgtggtgacatctctcagtcagctgtcttattcctctgtcaggggacacttgccatgttggactggcagaacggaagcatgggtcggagtggggaggccctgctcttggatactgcacatgttttgttcaccttgagttcacagattaaagagccaacgctggaaatgtttctgtctagaatcttagcatcctggactaattcagccatacaagtccttgaatcaagttccccgagcctaacggacagcctgaatgggaattcaagtatagttgggagacttttggaatatgtctatacccattgggaacatccattggatgctctgagacaccaaaccaaaatcatgttcaaaaaccttctccaaatgcaccggctcactgtggaaggtgcagatttcgtccctgatcctttctttgtggaattgactgagagtcttttacgattggaatggcatattaaaggaaagtacacgtgccttggttgtttggtagagtgcataggagttgaacatattttggctatagataaaactattccatctcaaatcttagaggtgatgggagaccagtcattggtaccttatgcaagtgacctcttggaaaccatgtttagaaatcataagagtcatttgaaatcccagactgctgagagttcttggattgaccagtggcatgagacttgggtttctcctctcctttttatattgtgtgaaggaaacttggatcaaaaatcttacgtgattgattattacttgccaaaattattaagttacagccctgaaagcttacagtacatggtaaagattcttcagacttctattgatgctaaaactggacaagagcaatctttcccatccttagggtcttgtaatagcaggggggctctgggagctttgatggcatgtctgcgaatagctagagctcatggacatcttcagtctgcaactgatacctgggagaacctcgtgtctgatgcaagaataaagcaaggcttaattcatcagcattgccaagtaaggatagatacattaggcttgctttgtgaaagtaatcggagcacagaaattgtttccatggaagaaatgcagtggattcagttctttattacatacaatcttaacagccagtctccaggagtgcggcaacagatctgttctcttcttaaaaagttgttttgtaggatacaggaaagttctcaggtactttataaattggagcagagtaaatccaaacgtgaaccagagaatgagttaaccaaacagcacccttctgtttctttacagcagtataagaatttcatgtcatccatttgtaacagtctttttgaagcattgtttcctggatcttcctactcgactagattttcagctttaaccattttaggttcaatagctgaagtttttcatgtcccagaaggtaagtgtttaataatgttaggggaagtaatttttgttttctttcaaaacatacttattctacattttgctttatttgaagtttcagttttgttgcctttctttgaggtttcattcttaccttataattcttgcttgtacataatgaaatttgctagtaaaggacagaagaggaagaaactatctcccttttcattgatcattatttgccaaccccaaagtataattttcatggattatgcttattatggaaagagttccagctattacctcactaatttgtttgttgctgttttaagatagtatccaatctgttctttaagttttaaaatttgaaataataatagcttctattatatttaatatttctcagtgagtctctgtggttaaaatgtggtttcctttacatgccgtctgtttcatgtgcctcagtctggtttcggaaagacaatatgaggatgtaatttccaagtattctgatttaataataccctttgtttttccttctgtgtggttctcaagagggtcaaatttcagttccctctttgaatcttttttttttgtttcattttttcctttttgacaagaaatgattcctttttttttattttgagacagagtctagctctgttgcccaggctggagtgtggtggcgtgatctcggctcactgcaacctccgcctgctgggttcaagcgattctcctgcctcagcctcccgagtagctgggacttcaggcgcatgccgctacacctggctaattttttgtatttttagtagagatggggtttcaccatgttaagtcaggatggtctcgatctcctgacctcgtgatctgcccgcctcggcctcccaaagtggtgagattacaggcgtgagccaccgtgtcctgctgaaatgattcttttttccctgtatatgtgtgtatatgtgttagaatgtgggatttcttgcttgtgctgtcttcgttgactgtggtcaaacaggaaaatatcctgctcagctgctccttcacagggaatggccaaagcatgagggagctttacactatcattggattcttttttattttaaattattgggcaaagtgtaattttttgacaggaggacagttagctaatgtaaaagaggcttgcttcatttggggaaaatcagtttttaaaagtttttattctgaaaaaatttaaatcagcagcaaagtttcaagactggttcaatgaatagctatttatgctctacctagattcatcttttttttttttttttttgagacggagtctcgctctgttgcccaggctggggtacagtggcatgatcaccgtgacctctgcctcctgggttcaagcagttctcctgtctcagcctcctgagtagctgggattacaggcacgtgccaccacgcccaggttaatttttgtatttttagtagagacggggtttcaccatgttggtcaggctggtctcgaactcctgacctcaggttgtccgccttgcttagtctcccaaagtgctgggattacaggtgtgagccaccgcacctggccaattcatcagttattaatattttgcaatatttgctatatctgtgtcctttattaattctataaccataacacaatgatcaaattcaggaaattgaatgttgatacaatgctttaattgaatacgcaatccatatttaaattttgccaattgtcccaacaaatggccttttatattatagaacaaaaagcttcctacaatctgggaagcaatcctagatcacgcattgcgttttgttattatgcctctttttagcttcctttaatctggaaagtttctaattttatgatattaacattttggaagaatatgtctcagggtttgtctcattgtttcctgatgatttgattcatgctgtacatttttgcaggaatgttgcataggtgataatggtgttcttcacagggcatcctattagagtattgatgatactggcttgttccagtttttataataggaaatatgatcaccttattcacgtggggatggcaggctgaaaaatggtctctaaaacacatccacatcaaatctttagaagctgtgaatgcaaaccttacatggaagaagggtccttgcagatattcttaagtttaggatcttgaggtgagataattctagattatcttgatggatcaaaaatgtcatcacaagtatccttacaagacagaggcagagagagatttgacaaacaaaagaaagaggaggcagtgcgacagcgtaggtagagattggcatgagatggctacaggccatggaatgcctgcagctgctagaagctggaagaggcaaggaacagattttagagcctctggagtgcatggccctactgacaccttgattttgaacttctggcttccagaactatgagagaataggtttctgtggttttaagcaccaagtatgtggtaatttgttacagcatccagtgaatgcgggagtctcccatcagttcatagaatttcaatagtacttcaacttaatttagaaaataagtttttaccttagagtgattgattacttcaaccatataacaaaaagttttctgcacatttaaagcagttgtagctgcatctaagtgtgtgggaaataaaactaggctgaagcgtacctataatttttcagtcaagagagtaatttaatacatttaaatgtactttaaaaatgaaaaccctgagtcatctttctaatgaatgagttgcatgtaattgggcagtgacttaatgccatcgtaattatgttagacaactgggaggtaatgcaaatggagcaagccatactgcaggcattacttttaaaggaggcttaagaaccttgactatgaagtacaggatgggagatgtaaattcatccttcattatcatctcaagaacttcagtggtaggactgatttgagattagtcaaatggtttctgcctttcctagaccaggaagaataagttgcatgcatctttcttatgtggaatcaaatgccacaatattgatggtaaaaaaaaatctacaattagattaaaaggatttgttcagcaaatattaatttcgtgcttattatatgtcaagcagccgaggatattcacagtcccaaacaaggtgcttcttcctttggagcttatgtttcagtgaagggagatagtaatgaacaagtaatacatagaatttgtgtatattagtacattatgtagatacaagattatgtagattatttatgtacaagatgtagataagttctgtgaaaagtatttcaagaagataagggggatatatagaagacctaggaggctggagagtgttagtggcttcatacagtggtgtcataaagggcttcacatttgaaaaaagctcttaaacaactgatggataaaagaataaatcatgaaggaagttagaaaatattttgagatgaatgaaagcaaaaatacaacgtacgaaaacttatgcattgcagcaaaagctgtgcttatagggaaagttatagctgtaaatgcctacattaaaagatcttgaattaataaccaagttaactttccacctcaagcaattagaagagaagaacaaacttaaaaggaaggaaacaaaaagattagaacagagataaatgaaatagaaaacagaaaaacaacacgaataatctacgaaaccagaagttgtgttttttaaagattaacaaatagacaaagtttgctaaactgactaagataaaagaaagacagtataaacaactaaaatcagaaatgaaagtaggaacatttctattaagtttgcagaaataaaaatgattataagacagtacagtgaacaattgtaacaccaacaagttagataacctacatgaaatggacaagtttctagaaacatgacaattagtgacttgagaagaaatagaaaatgtgagcagacctataagagattgaatcagtattcaaaaggctcacagaggaagagaaggttcagggcaagtgacttctctggtgaaatctacaaagcatttaaagaagaattacaccagtccttctgagactctttcaaaaaattggagagaagggaacacctcctacctcattttataaggccatgattaccccgataccaaaaccaaagacacttaaaagaaaaccagccgggtgtggtggctcatgcctgtaatcccaccactttgggaggccgagtcaggtggatcacctgagatcaggagtttaagaccagactggccaacatggtgaaaccccgtcgctactaaaaatacaaaaaattagccgggcgtggtggcaggtacctgtaatcccagctactcaggaggctgaggcaggagaattgcctgaacccaggaggctgaggtttcaatgggctgagattgcgccattgtactccagcctgggcgacaagagcaagacttcatcaaagaaaagagaagaaaacagaggagaagagaaggaaaagaagaaa

SEQ ID NO: 191211 - DNA, 6310 bp, Homo sapiens
  Payload ID: 17770
  Gene Name: thyroid adenoma associated
  Uniprot ID: Q6YHU6
  ENST ID: ENST00000405006
  CDS Start-End: 353-6214
ggaccaggcgcctgcgactcttctcagacgccgacgtgcacgaggtttggctcccaggtgtcctgcctgccagacccgcggtagctcggctcggccagttttgctagggctgcctggcgagccacaccaattcccatcctttggtatcgccaggattcggcggctgtgaaactgatttccggtcgctaaggtctccatggagacagcactttaaccactttctcccactgtcattcctcgactccacgtggttcagaaatcgcccagagaatgtttgtgggagtcagccaggaaggtgtagagtgaagcagcgttctaaagggaagcatgactactattaattctatttaaaatgggtgtaaagaagaagaaagaaatgcaagttgctgcgctgaccatttgccatcaggaccttgaaactttgaaatcttttgctgatgtggaagggaaaaatctagcttctttgctgttacattgtgtgcaactcacggatggagtgtcacaaatccattatattaaacagattgtgcctctgctggagaaagcagataaaaatggcatgtgtgatcccactattcaaagttgtttggatatcttagcaggcatttatctttctttgagtctaaagaatcccttgaagaaagtattggcaagctcactaaatagcctgcctgatttttttctacctgaggctatgcaccgttttacttctcgtcttcaggaagaattgaatactactgacttatactcttacaggaaagttactgacaatatttcttcctgtatggagaactttaacttgggtagagcaagtgttaataatctgcttaaaaatgtgcttcattttctgcagaagagtttaattgaaatcctggaagaaaatagaaaatgtgctggaaatcatattattcaaacacagttgatgaatgacttactggtaggcattagagtttcaatgatgttagtacagaaagtacaagatttccagggaaatctttggaagacttccgattctcccatatggcaaaatatgtgtggattgctgagtatttttaccaaggttttaagcgatgatgatctgttacagactgtacagagcacatctggattagctattattctttttattaagactatgtttcacccgtctgaaaagattcctcatttgattagcagtgtgctgcttcgttcagtggactgcaccagtgtccccgagtggtttatgagcagctgcaggagcctctgttgtggtgacatctctcagtcagctgtcttattcctctgtcaggggacacttgccatgttggactggcagaacggaagcatgggtcggagtggggaggccctgctcttggatactgcacatgttttgttcaccttgagttcacagattaaagagccaacgctggaaatgtttctgtctagaatcttagcatcctggactaattcagccatacaagtccttgaatcaagttccccgagcctaacggacagcctgaatgggaattcaagtatagttgggagacttttggaatatgtctatacccattgggaacatccattggatgctctgagacaccaaaccaaaatcatgttcaaaaaccttctccaaatgcaccggctcactgtggaaggtgcagatttcgtccctgatcctttctttgtggaattgactgagagtcttttacgattggaatggcatattaaaggaaagtacacgtgccttggttgtttggtagagtgcataggagttgaacatattttggctatagataaaactattccatctcaaatcttagaggtgatgggagaccagtcattggtaccttatgcaagtgacctcttggaaaccatgtttagaaatcataagagtcatttgaaatcccagactgctgagagttcttggattgaccagtggcatgagacttgggtttctcctctcctttttatattgtgtgaaggaaacttggatcaaaaatcttacgtgattgattattacttgccaaaattattaagttacagccctgaaagcttacagtacatggtaaagattcttcagacttctattgatgctaaaactggacaagagcaatctttcccatccttagggtcttgtaatagcaggggggctctgggagctttgatggcatgtctgcgaatagctagagctcatggacatcttcagtctgcaactgatacctgggagaacctcgtgtctgatgcaagaataaagcaaggcttaattcatcagcattgccaagtaaggatagatacattaggcttgctttgtgaaagtaatcggagcacagaaattgtttccatggaagaaatgcagtggattcagttctttattacatacaatcttaacagccagtctccaggagtgcggcaacagatctgttctcttcttaaaaagttgttttgtaggatacaggaaagttctcaggtactttataaattggagcagagtaaatccaaacgtgaaccagagaatgagttaaccaaacagcacccttctgtttctttacagcagtataagaatttcatgtcatccatttgtaacagtctttttgaagcattgtttcctggatcttcctactcgactagattttcagctttaaccattttaggttcaatagctgaagtttttcatgtcccagaaggcagaatttatacagtatatcagctgagtcatgatattgatgttggtcgtttccaaacactaatggaatgttttaccagcacttttgaagacgtgaaaattttagcatttgatcttctgatgaagttatcaaaaacagctgtacattttcaggattcggggaaactgcaaggcttatttcaggcagcattggagctcagcacaagcaccaaaccatacgactgtgtgacagcttcctacctgctgaacttcttaatctggcaggatgctctaccgtcatccttgtctgcctacttaactcagcaagttgcatgtgataatggagataggcctgctgctgtggtggaaaggaacacattaatggttatcaaatgcttgatggaaaatcttgaggaagaagtatctcaggctgaaaattctctgcttcaggcagcagcagcatttccaatgtatgggcgagtccactgtataacaggagctttgcagaagttatctctaaacagcctgcagttggtgagcgagtggagacctgtggtagagaagctccttttgatgtcctacaggctttccactgtggtgtctccagtcattcagagctcatcccctgaaggcctcatcccaatggacactgattcagagtcagcaagccgcttacagatgattctgaatgagattcagcctcgagatactaatgattattttaaccaagccaaaatattgaaagaacatgatagctttgatatgaaggacttgaatgctagtgtggtgaatattgatacttctacagaaatcaaaggtaaagaagtaaaaacatgtgatgtaactgcgcagatggtgctggtatgttgttggagaagtatgaaggaagttgctttacttttaggcatgttgtgccagcttctgcccatgcagcctgtgccagaatcttctgatggattattgacggtggagcaggtaaaagaaataggagattactttaaacaacaccttttgcagtccaggcacagaggagcatttgaattggcttatactggttttgtgaaactcactgaagtactaaacaggtgcccaaatgtgagtctgcaaaagctgccagaacagtggctatggagtgttttagaggaaattaaatgcagtgatccttcatctaaactctgtgctacaaggcgcagtgctggaattcctttctacatacaggcactgttggcatctgaaccaaagaaaggcagaatggatttgttgaaaataacaatgaaagagttaatctctttggctgggcctacagatgacatacagagtacagtcccccaggttcatgctttaaatatccttagagcattgttcagagatacgcgcctgggagaaaatattattccttatgttgctgatggagctaaggctgcaattctgggttttacatcaccggtctgggcagtgcgaaattcatccacacttctctttagtgccttgatcacaagaatttttggagttaaaagggcaaaggatgaacattccaaaacaaatagaatgacagggagagagtttttctctcgtttcccagaactctatccttttcttctcaaacagttggaaactgtagccaatacagtagacagtgatatgggagaaccaaatcgtcatccaagcatgtttctcttacttttggtgttggagagactctacgcttccccgatggatggtacttcttctgctctcagcatgggaccttttgttcccttcattatgaggtgtggtcactcacctgtctaccactcccgtgaaatggcagctcgtgccttggtcccatttgttatgatagatcacattcctaataccattcgaactctgttgtccacactccccagctgcactgaccagtgtttccggcaaaaccacattcatgggacacttctccaggtttttcatttgttgcaagcctactcagactccaaacacggaacgaattcagacttccagcacgagctgactgacatcactgtttgtaccaaagccaaactctggctggccaagaggcaaaatccatgtttggtgaccagagctgtatatattgatattctcttcctattgacttgctgcctcaacagatctgcaaaggacaaccagccagttctggagagtcttggcttctgggaggaagtcagagggattatctcaggatcagagctgataacgggattcccttgggccttcaaggtgccaggcctgccccagtacctccagagcctcaccagactagccattgctgcagtgtgggccgcggcagccaagagtggagagcgggagacgaatgtccccatctctttctctcagctgttagaatctgccttccctgaagtgcgctcactaacactggaagccctcttggaaaagttcttagcagcagcctctggacttggagagaagggcgtgccacccttgctgtgcaacatgggagagaagttcttattgttggccatgaaggaaaatcacccagaatgcttctgcaagatactgaaaattctccactgcatggaccctggtgagtggcttccccagacggagcactgtgtccatctgaccccaaaggagttcttgatctggacgatggatattgcttccaatgaaagatctgaaattcagagtgtagctctgagacttgcttccaaagtcatttcccaccacatgcagacatgtgtggagaacagggaattgatagctgctgagctgaagcagtgggttcagctggtcatcttgtcatgtgaagaccatcttcctacagagtctaggctggccgtcgttgaagtcctcaccagtactacaccacttttcctcaccaacccccatcctattcttgagttgcaggatacacttgctctctggaagtgtgtccttacccttctgcagagtgaggagcaagctgttagagatgcagccacggaaaccgtgacaactgccatgtcacaagaaaatacctgccagtcaacagagtttgccttctgccaggtggatgcctccatcgctctggccctggccctggccgtcctgtgtgatctgctccagcagtgggaccagttggcccctggactgcccatcctgctgggatggctgttgggagagagtgatgacctcgtggcctgtgtggagagcatgcatcaggtggaagaagactacctgtttgaaaaagcagaagtcaacttttgggccgagaccctgatctttgtgaaatacctctgcaagcacctcttctgtctcctctcaaagtccggctggcgtcccccaagccctgagatgctctgtcaccttcaaaggatggtgtcagagcagtgccacctcctgtctcagttcttcagagagcttccaccagctgctgagtttgtgaagacagtggagttcacaagactacgcattcaagaggaaaggactttggcttgcttgaggctgctggcctttttggaaggaaaggaaggggaagacaccctagttctcagtgtttgggactcttatgcagaatcgaggcagttaactcttccaagaacagaagcggcatgttgaagaaaatctgggggattgggatgggggtatgtgtggatttttcctccactaaatctgcaggaaacatgttgaacataaattcaaaaattttatccc

SEQ ID NO: 191212 - DNA, 6114 bp, Homo sapiens
  Payload ID: 17770
  Gene Name: thyroid adenoma associated
  Uniprot ID: Q6YHU6
  ENST ID: ENST00000405975
  CDS Start-End: 141-6002
gacccggtagtcgaccgtggaccgcgctgcgagcctcggagacgccgtagaaggagacctgcttccgggactggaccaggcgcctgcgactcttctcagacgccgacgtgcacgagtgactactattaattctatttaaaatgggtgtaaagaagaagaaagaaatgcaagttgctgcgctgaccatttgccatcaggaccttgaaactttgaaatcttttgctgatgtggaagggaaaaatctagcttctttgctgttacattgtgtgcaactcacggatggagtgtcacaaatccattatattaaacagattgtgcctctgctggagaaagcagataaaaatggcatgtgtgatcccactattcaaagttgtttggatatcttagcaggcatttatctttctttgagtctaaagaatcccttgaagaaagtattggcaagctcactaaatagcctgcctgatttttttctacctgaggctatgcaccgttttacttctcgtcttcaggaagaattgaatactactgacttatactcttacaggaaagttactgacaatatttcttcctgtatggagaactttaacttgggtagagcaagtgttaataatctgcttaaaaatgtgcttcattttctgcagaagagtttaattgaaatcctggaagaaaatagaaaatgtgctggaaatcatattattcaaacacagttgatgaatgacttactggtaggcattagagtttcaatgatgttagtacagaaagtacaagatttccagggaaatctttggaagacttccgattctcccatatggcaaaatatgtgtggattgctgagtatttttaccaaggttttaagcgatgatgatctgttacagactgtacagagcacatctggattagctattattctttttattaagactatgtttcacccgtctgaaaagattcctcatttgattagcagtgtgctgcttcgttcagtggactgcaccagtgtccccgagtggtttatgagcagctgcaggagcctctgttgtggtgacatctctcagtcagctgtcttattcctctgtcaggggacacttgccatgttggactggcagaacggaagcatgggtcggagtggggaggccctgctcttggatactgcacatgttttgttcaccttgagttcacagattaaagagccaacgctggaaatgtttctgtctagaatcttagcatcctggactaattcagccatacaagtccttgaatcaagttccccgagcctaacggacagcctgaatgggaattcaagtatagttgggagacttttggaatatgtctatacccattgggaacatccattggatgctctgagacaccaaaccaaaatcatgttcaaaaaccttctccaaatgcaccggctcactgtggaaggtgcagatttcgtccctgatcctttctttgtggaattgactgagagtcttttacgattggaatggcatattaaaggaaagtacacgtgccttggttgtttggtagagtgcataggagttgaacatattttggctatagataaaactattccatctcaaatcttagaggtgatgggagaccagtcattggtaccttatgcaagtgacctcttggaaaccatgtttagaaatcataagagtcatttgaaatcccagactgctgagagttcttggattgaccagtggcatgagacttgggtttctcctctcctttttatattgtgtgaaggaaacttggatcaaaaatcttacgtgattgattattacttgccaaaattattaagttacagccctgaaagcttacagtacatggtaaagattcttcagacttctattgatgctaaaactggacaagagcaatctttcccatccttagggtcttgtaatagcaggggggctctgggagctttgatggcatgtctgcgaatagctagagctcatggacatcttcagtctgcaactgatacctgggagaacctcgtgtctgatgcaagaataaagcaaggcttaattcatcagcattgccaagtaaggatagatacattaggcttgctttgtgaaagtaatcggagcacagaaattgtttccatggaagaaatgcagtggattcagttctttattacatacaatcttaacagccagtctccaggagtgcggcaacagatctgttctcttcttaaaaagttgttttgtaggatacaggaaagttctcaggtactttataaattggagcagagtaaatccaaacgtgaaccagagaatgagttaaccaaacagcacccttctgtttctttacagcagtataagaatttcatgtcatccatttgtaacagtctttttgaagcattgtttcctggatcttcctactcgactagattttcagctttaaccattttaggttcaatagctgaagtttttcatgtcccagaaggcagaatttatacagtatatcagctgagtcatgatattgatgttggtcgtttccaaacactaatggaatgttttaccagcacttttgaagacgtgaaaattttagcatttgatcttctgatgaagttatcaaaaacagctgtacattttcaggattcggggaaactgcaaggcttatttcaggcagcattggagctcagcacaagcaccaaaccatacgactgtgtgacagcttcctacctgctgaacttcttaatctggcaggatgctctaccgtcatccttgtctgcctacttaactcagcaagttgcatgtgataatggagataggcctgctgctgtggtggaaaggaacacattaatggttatcaaatgcttgatggaaaatcttgaggaagaagtatctcaggctgaaaattctctgcttcaggcagcagcagcatttccaatgtatgggcgagtccactgtataacaggagctttgcagaagttatctctaaacagcctgcagttggtgagcgagtggagacctgtggtagagaagctccttttgatgtcctacaggctttccactgtggtgtctccagtcattcagagctcatcccctgaaggcctcatcccaatggacactgattcagagtcagcaagccgcttacagatgattctgaatgagattcagcctcgagatactaatgattattttaaccaagccaaaatattgaaagaacatgatagctttgatatgaaggacttgaatgctagtgtggtgaatattgatacttctacagaaatcaaaggtaaagaagtaaaaacatgtgatgtaactgcgcagatggtgctggtatgttgttggagaagtatgaaggaagttgctttacttttaggcatgttgtgccagcttctgcccatgcagcctgtgccagaatcttctgatggattattgacggtggagcaggtaaaagaaataggagattactttaaacaacaccttttgcagtccaggcacagaggagcatttgaattggcttatactggttttgtgaaactcactgaagtactaaacaggtgcccaaatgtgagtctgcaaaagctgccagaacagtggctatggagtgttttagaggaaattaaatgcagtgatccttcatctaaactctgtgctacaaggcgcagtgctggaattcctttctacatacaggcactgttggcatctgaaccaaagaaaggcagaatggatttgttgaaaataacaatgaaagagttaatctctttggctgggcctacagatgacatacagagtacagtcccccaggttcatgctttaaatatccttagagcattgttcagagatacgcgcctgggagaaaatattattccttatgttgctgatggagctaaggctgcaattctgggttttacatcaccggtctgggcagtgcgaaattcatccacacttctctttagtgccttgatcacaagaatttttggagttaaaagggcaaaggatgaacattccaaaacaaatagaatgacagggagagagtttttctctcgtttcccagaactctatccttttcttctcaaacagttggaaactgtagccaatacagtagacagtgatatgggagaaccaaatcgtcatccaagcatgtttctcttacttttggtgttggagagactctacgcttccccgatggatggtacttcttctgctctcagcatgggaccttttgttcccttcattatgaggtgtggtcactcacctgtctaccactcccgtgaaatggcagctcgtgccttggtcccatttgttatgatagatcacattcctaataccattcgaactctgttgtccacactccccagctgcactgaccagtgtttccggcaaaaccacattcatgggacacttctccaggtttttcatttgttgcaagcctactcagactccaaacacggaacgaattcagacttccagcacgagctgactgacatcactgtttgtaccaaagccaaactctggctggccaagaggcaaaatccatgtttggtgaccagagctgtatatattgatattctcttcctattgacttgctgcctcaacagatctgcaaaggacaaccagccagttctggagagtcttggcttctgggaggaagtcagagggattatctcaggatcagagctgataacgggattcccttgggccttcaaggtgccaggcctgccccagtacctccagagcctcaccagactagccattgctgcagtgtgggccgcggcagccaagagtggagagcgggagacgaatgtccccatctctttctctcagctgttagaatctgccttccctgaagtgcgctcactaacactggaagccctcttggaaaagttcttagcagcagcctctggacttggagagaagggcgtgccacccttgctgtgcaacatgggagagaagttcttattgttggccatgaaggaaaatcacccagaatgcttctgcaagatactgaaaattctccactgcatggaccctggtgagtggcttccccagacggagcactgtgtccatctgaccccaaaggagttcttgatctggacgatggatattgcttccaatgaaagatctgaaattcagagtgtagctctgagacttgcttccaaagtcatttcccaccacatgcagacatgtgtggagaacagggaattgatagctgctgagctgaagcagtgggttcagctggtcatcttgtcatgtgaagaccatcttcctacagagtctaggctggccgtcgttgaagtcctcaccagtactacaccacttttcctcaccaacccccatcctattcttgagttgcaggatacacttgctctctggaagtgtgtccttacccttctgcagagtgaggagcaagctgttagagatgcagccacggaaaccgtgacaactgccatgtcacaagaaaatacctgccagtcaacagagtttgccttctgccaggtggatgcctccatcgctctggccctggccctggccgtcctgtgtgatctgctccagcagtgggaccagttggcccctggactgcccatcctgctgggatggctgttgggagagagtgatgacctcgtggcctgtgtggagagcatgcatcaggtggaagaagactacctgtttgaaaaagcagaagtcaacttttgggccgagaccctgatctttgtgaaatacctctgcaagcacctcttctgtctcctctcaaagtccggctggcgtcccccaagccctgagatgctctgtcaccttcaaaggatggtgtcagagcagtgccacctcctgtctcagttcttcagagagcttccaccagctgctgagtttgtgaagacagtggagttcacaagactacgcattcaagaggaaaggactttggcttgcttgaggctgctggcctttttggaaggaaaggaaggggaagacaccctagttctcagtgtttgggactcttatgcagaatcgaggcagttaactcttccaagaacagaagcggcatgttgaagaaaatctgggggattgggatgggggtatgtgtggatttttcctccactaaatctgcaggaaacatgttgaacataaattcaaaaattttatcccattcatgcctccccta

SEQ ID NO: 191213 - DNA, 3678 bp, Homo sapiens
  Payload ID: 17770
  Gene Name: thyroid adenoma associated
  ENST ID: ENST00000407351
  CDS Start-End: 1-3581
aaaagttgttttgtaggatacaggaaagttctcaggtactttataaattggagcagagtaaatccaaacgtgaaccagagaatgagttaaccaaacagcacccttctgtttctttacagcagtataagaatttcatgtcatccatttgtaacagtctttttgaagcattgtttcctggatcttcctactcgactagattttcagctttaaccattttaggttcaatagctgaagtttttcatgtcccagaaggcagaatttatacagtatatcagctgagtcatgatattgatgttggtcgtttccaaacactaatggaatgttttaccagcacttttgaagacgtgaaaattttagcatttgatcttctgatgaagttatcaaaaacagctgtacattttcaggattcggggaaactgcaaggcttatttcaggcagcattggagctcagcacaagcaccaaaccatacgactgtgtgacagcttcctacctgctgaacttcttaatctggcaggatgctctaccgtcatccttgtctgcctacttaactcagcaagttgcatgtgataatggagataggcctgctgctgtggtggaaaggaacacattaatggttatcaaatgcttgatggaaaatcttgaggaagaagtatctcaggctgaaaattctctgcttcaggcagcagcagcatttccaatgtatgggcgagtccactgtataacaggagctttgcagaagttatctctaaacagcctgcagttggtgagcgagtggagacctgtggtagagaagctccttttgatgtcctacaggctttccactgtggtgtctccagtcattcagagctcatcccctgaaggcctcatcccaatggacactgattcagagtcagcaagccgcttacagatgattctgaatgagattcagcctcgagatactaatgattattttaaccaagccaaaatattgaaagaacatgatagctttgatatgaaggacttgaatgctagtgtggtgaatattgatacttctacagaaatcaaaggtaaagaagtaaaaacatgtgatgtaactgcgcagatggtgctggtatgttgttggagaagtatgaaggaagttgctttacttttaggcatgttgtgccagcttctgcccatgcagcctgtgccagaatcttctgatggattattgacggtggagcaggtaaaagaaataggagattactttaaacaacaccttttgcagtccaggcacagaggagcatttgaattggcttatactggttttgtgaaactcactgaagtactaaacaggtgcccaaatgtgagtctgcaaaagctgccagaacagtggctatggagtgttttagaggaaattaaatgcagtgatccttcatctaaactctgtgctacaaggcgcagtgctggaattcctttctacatacaggcactgttggcatctgaaccaaagaaaggcagaatggatttgttgaaaataacaatgaaagagttaatctctttggctgggcctacagatgacatacagagtacagtcccccaggttcatgctttaaatatccttagagcattgttcagagatacgcgcctgggagaaaatattattccttatgttgctgatggagctaaggctgcaattctgggttttacatcaccggtctgggcagtgcgaaattcatccacacttctctttagtgccttgatcacaagaatttttggagttaaaagggcaaaggatgaacattccaaaacaaataggtgtggtcactcacctgtctaccactcccgtgaaatggcagctcgtgccttggtcccatttgttatgatagatcacattcctaataccattcgaactctgttgtccacactccccagctgcactgaccagtgtttccggcaaaaccacattcatgggacacttctccaggtttttcatttgttgcaagcctactcagactccaaacacggaacgaattcagacttccagcacgagctgactgacatcactgtttgtaccaaagccaaactctggctggccaagaggcaaaatccatgtttggtgaccagagctgtatatattgatattctcttcctattgacttgctgcctcaacagatctgcaaaggacaaccagccagttctggagagtcttggcttctgggaggaagtcagagggattatctcaggatcagagctgataacgggattcccttgggccttcaaggtgccaggcctgccccagtacctccagagcctcaccagactagccattgctgcagtgtgggccgcggcagccaagagtggagagcgggagacgaatgtccccatctctttctctcagctgttagaatctgccttccctgaagtgcgctcactaacactggaagccctcttggaaaagttcttagcagcagcctctggacttggagagaagggcgtgccacccttgctgtgcaacatgggagagaagttcttattgttggccatgaaggaaaatcacccagaatgcttctgcaagatactgaaaattctccactgcatggaccctggtgagtggcttccccagacggagcactgtgtccatctgaccccaaaggagttcttgatctggacgatggatattgcttccaatgaaagatctgaaattcagagtgtagctctgagacttgcttccaaagtcatttcccaccacatgcagacatgtgtggagaacagggaattgatagctgctgagctgaagcagtgggttcagctggtcatcttgtcatgtgaagaccatcttcctacagagtctaggctggccgtcgttgaagtcctcaccagtactacaccacttttcctcaccaacccccatcctattcttgagttgcaggatacacttgctctctggaagtgtgtccttacccttctgcagagtgaggagcaagctgttagagatgcagccacggaaaccgtgacaactgccatgtcacaagaaaatacctgccagtcaacagagtttgccttctgccaggtggatgcctccatcgctctggccctggccctggccgtcctgtgtgatctgctccagcagtgggaccagttggcccctggactgcccatcctgctgggatggctgttgggagagagtgatgacctcgtggcctgtgtggagagcatgcatcaggtggaagaagactacctgtttgaaaaagcagaagtcaacttttgggccgagaccctgatctttgtgaaatacctctgcaagcacctcttctgtctcctctcaaagtccggctggcgtcccccaagccctgagatgctctgtcaccttcaaaggatggtgtcagagcagtgccacctcctgtctcagttcttcagagagcttccaccagctgctgagtttgtgaagacagtggagttcacaagactacgcattcaagaggaaaggactttggcttgcttgaggctgctggcctttttggaaggaaaggaaggggaagacaccctagttctcagtgtttgggactcttatgcagaatcgaggcagttaactcttccaagaacagaagcggcatgttgaagaaaatctgggggattgggatgggggtatgtgtggatttttcctccactaaatctgcaggaaacatgttgaacataaattcaaaaattttatccca

SEQ ID NO: 191214 - DNA, 1975 bp, Homo sapiens
  Payload ID: 17770
  Gene Name: thyroid adenoma associated
  ENST ID: ENST00000474159
  CDS Start-End: 25-1071
tgactactattaattctatttaaaatgggtgtaaagaagaagaaagaaatgcaagttgctgcgctgaccatttgccatcaggaccttgaaactttgaaatcttttgctgatgtggaagggaaaaatctagcttctttgctgttacattgtgtgcaactcacggatggagtgtcacaaatccattatattaaacagattgtgcctctgctggagaaagcagataaaaatggcatgtgtgatcccactattcaaagttgtttggatatcttagcaggcatttatctttctttgagtctaaagaatcccttgaagaaagtattggcaagctcactaaatagcctgcctgatttttttctacctgaggctatgcaccgttttacttctcgtcttcaggaagaattgaatactactgacttatactcttacaggaaagttactgacaatatttcttcctgtatggagaactttaacttgggtagagcaagtgttaataatctgcttaaaaatgtgcttcattttctgcagaagagtttaattgaaatcctggaagaaaatagaaaatgtgctggaaatcatattattcaaacacagttgatgaatgacttactggtaggcattagagtttcaatgatgttagtacagaaagtacaagatttccagggaaatctttggaagacttccgattctcccatatggcaaaatatgtgtggattgctgagtatttttaccaaggttttaagcgatgatgatctgttacagactgtacagagcacatctggattagctattattctttttattaagactatgtttcacccgtctgaaaagattcctcatttgattagcagtgtgctgcttcgttcagtggactgcaccagtgtccccgagtggtttatgagcagctgcaggagcctctgttgtggtgacatctctcagtcagctgtcttattcctctgtcaggggacacttgccatgttggactggcagaacggaagcatgggtcggagtggggaggccctgctcttggatactgcacatgttttgttcaccttgagttcacaggtcttgtaatagcaggggggctctgggagctttgatggcatgtctgcgaatagctagagctcatggacatcttcagtctgcaactgatacctgggagaacctcgtgtctgatgcaagaataaagcaaggcttaattcatcagcattgccaagtaaggatagatacattaggcttgctttgtgaaagtaatcggagcacagaaattgtttccatggaagaaatgcagtggattcagttctttattacatacaatcttaacagccagtctccaggagtgcggcaacagatctgttctcttcttaaaaagttgttttgtaggatacaggaaagttctcaggtactttataaattggagcagagtaaatccaaacgtgaaccagagaatgagttaaccaaacagcacccttctgtttctttacagcagtataagaatttcatgtcatccatttgtaacagtctttttgaagcattgtttcctggatcttcctactcgactagattttcagctttaaccattttaggttcaatagctgaagtttttcatgtcccagaaggtaaaatttatacagtatatcagctgagtcatgatattgatgttggtcgtttccaaacactaatggaatgttttaccagcacttttgaagacgtgaaaattttagcatttgatcttctgatgaagttatcaaaaacagctgtacattttcaggattcggggaaactgcaaggcttatttcaggcagcattggagctcagcacaagcaccaaaccatacgactgtgtgacagcttcctacctgctgaacttcttaatctggcaggatgctctaccgtcatccttgtctgcctacttaactcagcaagttgcatgtgataatggagataggcctgctgctgtggtggaaaggaacacatta

SEQ ID NO: 191215 - DNA, 4432 bp, Homo sapiens
  Payload ID: 17771
  Gene Name: thyroid hormone receptor associated protein 3
  Uniprot ID: Q9Y2W1
  ENST ID: ENST00000354618
  CDS Start-End: 225-3092
ggagacgctgggcgcgctgtggggcgggggcgaggttcgggctggttgttccgttgcgagctgcagctgcgatctctgtggtaggcccagaagtgtatgctgacttgtaaagtgaagaagccagtggtgctgcgggtgttcttttggggtagtgtctgggatccagtacgagttgaatcattgttcaaataaggtgtaattgaaaagtgatcctctcttcagagatgtcaaaaacaaacaaatccaagtctggatctcgctcttctcgctcaagatctgcatcaagatctcgttctcgttcattttcgaagtctcggtcccgaagccgatctctctctcgttcaaggaagcgcaggctgagttctaggtctcgttccagatcatattctccagctcataacagagaaagaaaccacccaagagtatatcagaatcgggatttccgaggtcacaacagaggctatagaaggccctattatttccgtgggcgtaacagaggcttttatccatggggccaatataaccgaggaggctatggaaactaccgctcaaattggcagaattaccggcaagcatacagtcctcgtcgaggccgttcaagatcccggtccccaaagagaaggtccccttcaccaaggtccaggagccattctagaaactctgataagtcgtcttctgaccggtcaaggcgctcctcatcctcccgttcttcctccaaccatagccgagttgaatcttctaagcgcaagtctgcaaaggagaaaaagtcctcttctaaggatagccggccatctcaggctgccggggataaccagggagatgaggccaaggagcagacattctctggaggcacctctcaagatacaaaagcatctgagagctcgaagccatggccagatgccacctacggcactggttctgcatcacgggcctcagcagtttctgagctgagtcctcgggagcgaagcccagctctcaaaagccccctccagtctgtggtggtgaggcggcggtcaccccgtcctagccccgtgccaaaacctagtcctccactttccagcacatcccagatgggctcaactctgccgagtggtgccgggtatcagtctgggacacaccaaggtcagttcgaccatggttctgggtccctgagtccatccaaaaagagccctgtgggtaagagtccaccatccactggctccacatatggctcatctcagaaggaggagagtgctgcttcaggaggagcagcctatacaaagaggtatctagaagagcagaagacagagaatggaaaagataaggaacagaaacaaacaaataccgataaagaaaaaataaaagagaaagggagcttctctgacacaggcttgggtgatggaaaaatgaaatctgattcttttgctcccaaaactgattctgagaagccttttcggggcagtcagtctcccaaaaggtataagctccgagatgactttgagaagaagatggctgacttccacaaggaggagatggatgatcaagataaggacaaagctaagggaagaaaggaatctgagtttgatgatgaacccaaatttatgtctaaagtcataggtgcaaacaaaaaccaggaggaggagaagtcaggcaaatgggagggcctggtatatgcacctccagggaaggaaaagcagagaaaaacagaggagctggaggaggagtctttcccagagagatccaaaaaggaagatcggggcaagagaagcgaaggtgggcacaggggctttgtgcctgagaagaatttccgagtgactgcttataaagcagtccaggagaaaagctcatcacctcccccaagaaagacctctgagagccgagacaagctgggagcgaaaggagattttcccacaggaaagtcttccttttccattactcgagaggcacaggtcaatgtccggatggactcttttgatgaggacctcgcacgacccagtggcttattggctcaggaacgcaagctttgccgagatctagtccatagcaacaaaaaggaacaggagtttcgttccattttccagcacatacaatcagctcagtctcagcgtagcccctcagaactgtttgcccaacatatagtgaccattgttcaccatgttaaagagcatcactttgggtcctcaggaatgacattacatgaacgctttactaaatacctaaagagaggaactgagcaggaggcagccaaaaacaagaaaagcccagagatacacaggagaatagacatttcccccagtacattcagaaaacatggtttggctcatgatgaaatgaaaagtccccgggaacctggctacaaggctgagggaaaatacaaagatgatcctgttgatctccgccttgatattgaacgtcgtaaaaaacataaggagagagatcttaaacgaggtaaatcgagagaatcagtggattcccgagactccagtcactcaagggaaaggtcagctgaaaaaacagagaaaactcataaaggatcaaagaaacagaagaagcatcggagagcaagagacaggtccagatcctcctcctcttcctcccagtcatctcactcctacaaagcagaagagtacactgaagagacagaggaaagagaggagagcaccacgggctttgacaaatcaagactggggaccaaagactttgtgggtccaagtgaaagaggaggtggcagagctcgaggaacctttcagtttcgagccagaggaagaggctggggcagaggcaactactctgggaacaataacaacaacagcaacaacgattttcaaaaaagaaaccgggaagaggagtgggacccagagtacacacccaaaagcaagaagtattacttgcatgatgaccgtgaaggcgaaggcagtgacaagtgggtgagccggggccggggccgaggagcctttcctcggggtcggggccggttcatgttccggaaatcaagtaccagccccaagtgggcccatgacaagttcagtggggaggaaggggagattgaagacgacgagagtgggacagagaaccgagaagagaaggacaatatacagcccacaaccgagtaggggccacccttgacgggattcctgcccaggggagagaggcgctgggaagatggctggtgaggagcttaacagaggaacctcaagaagattctgaaaatcctacccccaccccccaccagccgcacagattgtactaccgcgagaggcatccctggcgctgtctcccactggacagaggaggctggccatggggcccaggggtcaggcccagcttttgagcagaatacaacgcattgggctttagctgtttttctcatttgttggtgtgtggggtgggggcaggggtagggcgggagagcgatgcttggatttttgtttcctattagaaaccaacagttttgttctaatttcatttcatttggagctaagatgactaatttgatgattttcgatctcttttcccctgtcctgattttaaaagccccctcctttttttttttttttttctttttttaggcatatgtagtaatattagaaacatttaatttgggaaactttgattcttgaaagagaaaacaaaagcatgtgaataaactttgaagtgttcacctcagtttgggaccaaactgcttggatctttgtaaaaaccggttttgtatgtcaaggaggagtttaaggcctttccgaccaccttgtgttccccttttctgcgcagccatgtatcacgtggagttgctccttaccacacctcacgtgcccctgagccctatttcctgatttcttctgggctggacttccccgttctccaccagcagctccagtatcccaaactttctagtcctgctgatcctcccagcaacggggtggaaactggagggcagtgtctggtctgttttctaagaaacttatgaattctattatctttacaaatatgagaaaattttttcaatattttttattaatctttttataaaatgaaaagaaactcctatgatcgattaaggaaggtggttatggctgggtggttcaggggtttttttgggtttctttttttttttctttgtctttttaaccttaagctgtttaagttgaagcattctcagatgtttggggggaaacatcctcttaaaatgggtccttgtgcttgccttctggggaggcggtcctgagcaggtgaatcataaggcatttatgcatatgttatatgcggactgcacccacctctcccccccagcctttgcctcttgcgttgttgtgctgctttccccttactttgctacatttctatagttaagttggttttacttgaatgattcatgtttagggggaaaatgaaaatctcccttaaaatttgtttcaactcctcctgcaaataaaataaatgaagtggcagatgtaaa

SEQ ID NO: 191216 - DNA, 380 bp, Homo sapiens
  Payload ID: 17771
  Gene Name: thyroid hormone receptor associated protein 3
  ENST ID: ENST00000478853
  CDS Start-End: 260-380
tgtggggcgggggcgaggttcgggctggttgttccgttgcgagctgcagctgcgatctctgtggtaggcccaggtcaagagtcttcatctccagctgcctcagttttcttatcactaaaacagcaaagtgtatgctgacttgtaaagtgaagaagccagtggtgctgcgggtgttcttttggggtagtgtctgggatccagtacgagttgaatcattgttcaaataaggtgtaattgaaaagtgatcctctcttcagagatgtcaaaaacaaacaaatccaagtctggatctcgctcttctcgctcaagatctgcatcaagatctcgttctcgttcattttcgaagtctcggtcccgaagccgatctctctctcgttcaa

SEQ ID NO: 191217 - DNA, 3339 bp, Homo sapiens
  Payload ID: 17771
  Gene Name: thyroid hormone receptor associated protein 3
  Uniprot ID: Q9Y2W1
  ENST ID: ENST00000469141
  CDS Start-End: 341-3208
ctgtggggcgggggcgaggttcgggctggttgttccgttgcgagctgcagctgcgatctctgtggtaggcccagcctggtggccaaaaacgggatagtccaaatttgtctcctacgggaatattagagttctcacttttttcttgggctggagctgaggccggcttgcattccagtggcaatcggcgtgagttctgcttatatgagaagtgtatgctgacttgtaaagtgaagaagccagtggtgctgcgggtgttcttttggggtagtgtctgggatccagtacgagttgaatcattgttcaaataaggtgtaattgaaaagtgatcctctcttcagagatgtcaaaaacaaacaaatccaagtctggatctcgctcttctcgctcaagatctgcatcaagatctcgttctcgttcattttcgaagtctcggtcccgaagccgatctctctctcgttcaaggaagcgcaggctgagttctaggtctcgttccagatcatattctccagctcataacagagaaagaaaccacccaagagtatatcagaatcgggatttccgaggtcacaacagaggctatagaaggccctattatttccgtgggcgtaacagaggcttttatccatggggccaatataaccgaggaggctatggaaactaccgctcaaattggcagaattaccggcaagcatacagtcctcgtcgaggccgttcaagatcccggtccccaaagagaaggtccccttcaccaaggtccaggagccattctagaaactctgataagtcgtcttctgaccggtcaaggcgctcctcatcctcccgttcttcctccaaccatagccgagttgaatcttctaagcgcaagtctgcaaaggagaaaaagtcctcttctaaggatagccggccatctcaggctgccggggataaccagggagatgaggccaaggagcagacattctctggaggcacctctcaagatacaaaagcatctgagagctcgaagccatggccagatgccacctacggcactggttctgcatcacgggcctcagcagtttctgagctgagtcctcgggagcgaagcccagctctcaaaagccccctccagtctgtggtggtgaggcggcggtcaccccgtcctagccccgtgccaaaacctagtcctccactttccagcacatcccagatgggctcaactctgccgagtggtgccgggtatcagtctgggacacaccaaggtcagttcgaccatggttctgggtccctgagtccatccaaaaagagccctgtgggtaagagtccaccatccactggctccacatatggctcatctcagaaggaggagagtgctgcttcaggaggagcagcctatacaaagaggtatctagaagagcagaagacagagaatggaaaagataaggaacagaaacaaacaaataccgataaagaaaaaataaaagagaaagggagcttctctgacacaggcttgggtgatggaaaaatgaaatctgattcttttgctcccaaaactgattctgagaagccttttcggggcagtcagtctcccaaaaggtataagctccgagatgactttgagaagaagatggctgacttccacaaggaggagatggatgatcaagataaggacaaagctaagggaagaaaggaatctgagtttgatgatgaacccaaatttatgtctaaagtcataggtgcaaacaaaaaccaggaggaggagaagtcaggcaaatgggagggcctggtatatgcacctccagggaaggaaaagcagagaaaaacagaggagctggaggaggagtctttcccagagagatccaaaaaggaagatcggggcaagagaagcgaaggtgggcacaggggctttgtgcctgagaagaatttccgagtgactgcttataaagcagtccaggagaaaagctcatcacctcccccaagaaagacctctgagagccgagacaagctgggagcgaaaggagattttcccacaggaaagtcttccttttccattactcgagaggcacaggtcaatgtccggatggactcttttgatgaggacctcgcacgacccagtggcttattggctcaggaacgcaagctttgccgagatctagtccatagcaacaaaaaggaacaggagtttcgttccattttccagcacatacaatcagctcagtctcagcgtagcccctcagaactgtttgcccaacatatagtgaccattgttcaccatgttaaagagcatcactttgggtcctcaggaatgacattacatgaacgctttactaaatacctaaagagaggaactgagcaggaggcagccaaaaacaagaaaagcccagagatacacaggagaatagacatttcccccagtacattcagaaaacatggtttggctcatgatgaaatgaaaagtccccgggaacctggctacaaggctgagggaaaatacaaagatgatcctgttgatctccgccttgatattgaacgtcgtaaaaaacataaggagagagatcttaaacgaggtaaatcgagagaatcagtggattcccgagactccagtcactcaagggaaaggtcagctgaaaaaacagagaaaactcataaaggatcaaagaaacagaagaagcatcggagagcaagagacaggtccagatcctcctcctcttcctcccagtcatctcactcctacaaagcagaagagtacactgaagagacagaggaaagagaggagagcaccacgggctttgacaaatcaagactggggaccaaagactttgtgggtccaagtgaaagaggaggtggcagagctcgaggaacctttcagtttcgagccagaggaagaggctggggcagaggcaactactctgggaacaataacaacaacagcaacaacgattttcaaaaaagaaaccgggaagaggagtgggacccagagtacacacccaaaagcaagaagtattacttgcatgatgaccgtgaaggcgaaggcagtgacaagtgggtgagccggggccggggccgaggagcctttcctcggggtcggggccggttcatgttccggaaatcaagtaccagccccaagtgggcccatgacaagttcagtggggaggaaggggagattgaagacgacgagagtgggacagagaaccgagaagagaaggacaatatacagcccacaaccgagtaggggccacccttgacgggattcctgcccaggggagagaggcgctgggaagatggctggtgaggagcttaacagaggaacctcaagaagattctgaaaatcctacccccaccccccaccagccgcacagattg

SEQ ID NO: 191218 - DNA, 2153 bp, Homo sapiens
  Payload ID: 17772
  Gene Name: thyroid hormone receptor interactor 10
  Uniprot ID: Q15642
  ENST ID: ENST00000313244
  CDS Start-End: 36-1841
gcggtggtggctgcggcggcggcggcgggagcagcatggattggggcactgagctgtgggatcagttcgaggtgctcgagcgccacacgcagtgggggctggacctgttggacagatatgtaaagttcgtgaaagaacgcaccgaagtggaacaggcttacgccaaacaactgcggagcctggtgaaaaaatatctgcccaagagacctgccaaggatgatcctgagtccaaattcagccagcaacagtccttcgtacagattctccaggaggtgaatgactttgcaggccagcgggagctggtggctgagaacctcagtgtccgtgtatgtcttgagctgaccaagtactcacaagagatgaaacaggagaggaagatgcacttccaagaagggcggcgggcccagcagcagctggaaaatggctttaaacagctggagaatagtaagcgtaaatttgagcgggactgccgggaggcagagaaggcagcccagactgctgaacggctagaccaggatatcaacgccaccaaggctgatgtggagaaggccaagcagcaagcccaccttcggagtcacatggccgaagaaagcaaaaacgaatatgcggctcaactgcagcgcttcaaccgagaccaagcccacttctatttttcacagatgccccagatattcgataagctccaagacatggatgaacgcagggccacccgcctgggtgccgggtatgggctcctgtcggaggccgagctggaggtggtgcccataatagccaagtgcttggagggcatgaaggtggctgcaaatgctgtggatcccaagaacgactcccacgtccttatagagctgcacaagtcaggttttgcccgcccgggcgacgtggaattcgaggacttcagccagcccatgaaccgtgcaccctccgacagcagtctgggcaccccctcggatggacggcctgaactccgaggcccgggtcgcagccgcaccaagcgctggccttttggcaagaagaacaagcctcgccccccacccctctcccccctggggggccccgtaccctcggcattgcctaacggacccccgtccccccgctccggccgtgaccccttggccatactgagcgagatcagtaagtcggtcaaaccgaggctagcatccttccgcagccttcgaggcagccgtgggacagtggtgaccgaggattttagccacttgcccccagagcagcagcgaaaacggcttcaacagcagttggaagaacgcagtcgtgaacttcagaaggaggttgaccagagggaagccctaaagaaaatgaaggatgtctatgagaagacacctcagatgggggaccccgccagcttggagccccagatcgctgaaaccctgagcaacattgaacggctgaaattggaagtgcagaagtatgaggcgtggctggcagaagctgaaagtcgagtccttagcaaccggggagacagcctgagccggcacgcccggcctcccgacccccccgctagcgccccgccagacagcagcagcaacagcgcatcacaggacaccaaggagagctctgaagagcctccctcagaagagagccaggacacccccatttacacggagtttgatgaggatttcgaggaggaacccacatcccccataggtcactgtgtggccatctaccactttgaagggtccagcgagggcactatctctatggccgagggtgaagacctcagtcttatggaagaagacaaaggggacggctggacccgggtcaggcggaaagagggaggcgagggctacgtgcccacctcctacctccgagtcacgctcaattgaaccctgccagagacgggaagaggggggctgtcggctgctgcttctgggccacggggagccccaggacctatgcactttatttctgaccccgtggcttcggctgagacctgtgtaacctgctgccccctccacccccaacccagtcctacctgtcacaccggacggacccgctgtgccttctaccatcgttccaccattgatgtacatactcatgttttacatcttttctttctgccgctcggctccggccattttgttttatacaaaaatgggaaaaaaaaaaaagaaattatataaagttcctagagtcgg

SEQ ID NO: 191219 - DNA, 2035 bp, Homo sapiens
  Payload ID: 17772
  Gene Name: thyroid hormone receptor interactor 10
  Uniprot ID: Q15642
  ENST ID: ENST00000313285
  CDS Start-End: 83-1720
gagtctccccggggagggcggcgggcggcgggcggcggggaccgggtgcggtggtggctgcggcggcggcggcgggagcagcatggattggggcactgagctgtgggatcagttcgaggtgctcgagcgccacacgcagtgggggctggacctgttggacagatatgtaaagttcgtgaaagaacgcaccgaagtggaacaggcttacgccaaacaactgcggagcctggtgaaaaaatatctgcccaagagacctgccaaggatgatcctgagtccaaattcagccagcaacagtccttcgtacagattctccaggaggtgaatgactttgcaggccagcgggagctggtggctgagaacctcagtgtccgtgtatgtcttgagctgaccaagtactcacaagagatgaaacaggagaggaagatgcacttccaagaagggcggcgggcccagcagcagctggaaaatggctttaaacagctggagaatagtaagcgtaaatttgagcgggactgccgggaggcagagaaggcagcccagactgctgaacggctagaccaggatatcaacgccaccaaggctgatgtggagaaggccaagcagcaagcccaccttcggagtcacatggccgaagaaagcaaaaacgaatatgcggctcaactgcagcgcttcaaccgagaccaagcccacttctatttttcacagatgccccagatattcgataagctccaagacatggatgaacgcagggccacccgcctgggtgccgggtatgggctcctgtcggaggccgagctggaggtggtgcccataatagccaagtgcttggagggcatgaaggtggctgcaaatgctgtggatcccaagaacgactcccacgtccttatagagctgcacaagtcaggttttgcccgcccgggcgacgtggaattcgaggacttcagccagcccatgaaccgtgcaccctccgacagcagtctgggcaccccctcggatggacggcctgaactccgaggcccgggtcgcagccgcaccaagcgctggccttttggcaagaagaacaagacagtggtgaccgaggattttagccacttgcccccagagcagcagcgaaaacggcttcaacagcagttggaagaacgcagtcgtgaacttcagaaggaggttgaccagagggaagccctaaagaaaatgaaggatgtctatgagaagacacctcagatgggggaccccgccagcttggagccccagatcgctgaaaccctgagcaacattgaacggctgaaattggaagtgcagaagtatgaggcgtggctggcagaagctgaaagtcgagtccttagcaaccggggagacagcctgagccggcacgcccggcctcccgacccccccgctagcgccccgccagacagcagcagcaacagcgcatcacaggacaccaaggagagctctgaagagcctccctcagaagagagccaggacacccccatttacacggagtttgatgaggatttcgaggaggaacccacatcccccataggtcactgtgtggccatctaccactttgaagggtccagcgagggcactatctctatggccgagggtgaagacctcagtcttatggaagaagacaaaggggacggctggacccgggtcaggcggaaagagggaggcgagggctacgtgcccacctcctacctccgagtcacgctcaattgaaccctgccagagacgggaagaggggggctgtcggctgctgcttctgggccacggggagccccaggacctatgcactttatttctgaccccgtggcttcggctgagacctgtgtaacctgctgccccctccacccccaacccagtcctacctgtcacaccggacggacccgctgtgccttctaccatcgttccaccattgatgtacatactcatgttttacatcttttctttctgccgctcggctccggccattttgttttatacaaaaatgggaaaaaaaaaaaagaaattatataaagttcctagagtcggtgt

SEQ ID NO: 191220 - DNA, 1920 bp, Homo sapiens
  Payload ID: 17772
  Gene Name: thyroid hormone receptor interactor 10
  ENST ID: ENST00000596758
  CDS Start-End: 1-1782
atggattggggcactgagctgtgggatcagttcgaggtgctcgagcgccacacgcagtgggggctggacctgttggacagatatgtaaagttcgtgaaagaacgcaccgaagtggaacaggcttacgccaaacaactgcggagcctggtgaaaaaatatctgcccaagagacctgccaaggatgatcctgagtccaaattcagccagcaacagtccttcgtacagattctccaggaggtgaatgactttgcaggccagcgggagctggtggctgagaacctcagtgtccgtgtatgtcttgagctgaccaagtactcacaagagatgaaacaggagaggaagatgcacttccaagaagggcggcgggcccagcagcagctggaaaatggctttaaacagctggagaatagtaagcgtaaatttgagcgggactgccgggaggcagagaaggcagcccagactgctgaacggctagaccaggatatcaacgccaccaaggctgatgtggagaaggccaagcagcaagcccaccttcggagtcacatggccgaagaaagcaaaaacgaatatgcggctcaactgcagcgcttcaaccgagaccaagcccacttctatttttcacagatgccccagatattcgataagctccaagacatggatgaacgcagggccacccgcctgggtgccgggtatgggctcctgtcggaggccgagctggaggtggtgcccataatagccaagtgcttggagggcatgaaggtggctgcaaatgctgtggatcccaagaacgactcccacgtccttatagagctgcacaagtcaggttttgcccgcccgggcgacgtggaattcgaggacttcagccagcccatgaaccgtgcaccctccgacagcagtctgggcaccccctcggatggacggcctgaactccgaggcccgggtcgcagccgcaccaagcgctggccttttggcaagaagaacaagacagtggtgaccgaggattttagccacttgcccccagagcagcagcgaaaacggcttcaacagcagttggaagaacgcagtcgtgaacttcagaaggaggttgaccagagggaagccctaaagaaaatgaaggatgtctatgagaagacacctcagatgggggaccccgccagcttggagccccagatcgctgaaaccctgagcaacattgaacggctgaaattggaagtgcagaagtatgaggcgtggctggcagaagctgaaagtcgagtccttagcaaccggggagacagcctgagccggcacgcccggcctcccgacccccccgctagcgccccgccagacagcagcagcaacagcgcatcacaggacaccaaggagagctctgaagagcctccctcagaagagagccaggacacccccatttacacggagtttgatgaggatttcgaggaggaacccacatcccccataggtcactgtgtggccatctaccactttgaagatctgggcccacccccacccccatcacagggtccagcgagggcactatctctatggccgagggtgaagacctcagtcttatggaagaagacaaaggggacggctggacccgggtcaggcggaaagagggaggcgagggctacgtgcccacctcctacctccgagtcacgctcaattgaaccctgccagagacgggaagaggggggctgtcggctgctgcttctgggccacggggagccccaggacctatgcactttatttctgaccccgtggcttcggctgagacctgtgtaacctgctgccccctccacccccaacccagtcctacctgtcacaccggacggacccgctgtgccttctaccatcgttccaccattgatgtacatactcatgttttacatcttttctttctgccgctcggctccggccatt

SEQ ID NO: 191221 - DNA, 586 bp, Homo sapiens
  Payload ID: 17772
  Gene Name: thyroid hormone receptor interactor 10
  ENST ID: ENST00000596673
  CDS Start-End: 336-586
gccctccctgggagtctggtcggcgggctgtggggtcccaaaatcgtgaccccggcccctctcccctcctcccccaccatgtcccatgtcaggatcagttcgaggtgctcgagcgccacacgcagtgggggctggacctgttggacagatatgtaaagttcgtgaaagaacgcaccgaagtggaacaggcttacgccaaacaactgcgattcagccagcaacagtccttcgtacagattctccaggaggtgaatgactttgcaggccagcgggagctggtggctgagaacctcagtgtccgtgtatgtcttgagctgaccaagtactcacaagagatgaaacaggagaggaagatgcacttccaagaagggcggcgggcccagcagcagctggaaaatggctttaaacagctggagaatagtaagcgtaaatttgagcgggactgccgggaggcagagaaggcagcccagactgctgaacggctagaccaggatatcaacgccaccaaggctgatgtggagaaggccaagcagcaagcccaccttcggagtcacatggccgaagaaagcaaaaacgaatatgcggc

SEQ ID NO: 191222 - DNA, 2249 bp, Homo sapiens
  Payload ID: 17772
  Gene Name: thyroid hormone receptor interactor 10
  ENST ID: ENST00000600428
  CDS Start-End: 647-1960
aatgcagcgggagcagacaagggccacaaagcattaaataaactacctttcccagtatccccaaggacggacttcctcttcttgagccagggatgtggctcccagccagagctgaggcttttggtaaacacacgcatctgttcaggcctgacctgttttcctaatcttcctggtccacagagaggcctaaagctggcctcaggttaaagtttgaccctaggatgacctatgaccccaggctgagaccccagccttaggctaagccttttattccagagtgaggcaattggagccccacccccagattccaggctagaccggactccgggctgaactctgaccccaggatcagttcgaggtgctcgagcgccacacgcagtgggggctggacctgttggacagatatgtaaagttcgtgaaagaacgcaccgaagtggaacaggcttacgccaaacaactgcggagcctggtgaaaaaatatctgcccaagagacctgccaaggatgatcctgagtccaaattcagccagcaacagtccttcgtacagattctccaggaggtgaatgactttgcaggccagcgggagctggtggctgagaacctcagtgtccgtgtatgtcttgagctgaccaagtactcacaagagatgaaacaggagaggaagatgcacttccaagaagggcggcgggcccagcagcagctggaaaatggctttaaacagctggagaatagtaagcgtaaatttgagcgggactgccgggaggcagagaaggcagcccagactgctgaacggctagaccaggatatcaacgccaccaaggctgatgtggagaaggccaagcagcaagcccaccttcggagtcacatggccgaagaaagcaaaaacgaatatgcggctcaactgcagcgcttcaaccgagaccaagcccacttctatttttcacagatgccccagatattcgataagctccaagacatggatgaacgcagggccacccgcctgggtgccgggtatgggctcctgtcggaggccgagctggaggtggtgcccataatagccaagtgcttggagggcatgaaggtggctgcaaatgctgtggatcccaagaacgactcccacgtccttatagagctgcacaagtcaggttttgcccgcccgggcgacgtggaattcgaggacttcagccagcccatgaaccgtgcaccctccgacagcagtctgggcaccccctcggatggacggcctgaactccgaggcccgggtcgcagccgcaccaagcgctggccttttggcaagaagaacaagacagtggtgaccgaggattttagccacttgcccccagagcagcagcgaaaacggcttcaacagcagttggaagaacgcagtcgtgaacttcagaaggaggttgaccagagggaagccctaaagaaaatgaaggatgtctatgagaagacacctcagatgggggaccccgccagcttggagccccagatcgctgaaaccctgagcaacattgaacggctgaaattggaagtgcagaagtatgaggcgtggctggcagaagctgaaagtcgagtccttagcaaccggggagacagcctgagccggcacgcccggcctcccgacccccccgctagcgccccgccagacagcagcagcaacagcgcatcacaggacaccaaggagagctctgaagagcctccctcagaagagagccaggacacccccatttacacggagtttgatgaggatttcgaggaggaacccacatcccccataggtcactgtgtggccatctaccactttgaagggtccagcgagggcactatctctatggccgagggtgaagacctcagtcttatggaagaagacaaaggggacggctggacccgggtcaggcggaaagagggaggcgagggctacgtgcccacctcctacctccgagtcacgctcaattgaaccctgccagagacgggaagaggggggctgtcggctgctgcttctgggccacggggagccccaggacctatgcactttatttctgaccccgtggcttcggctgagacctgtgtaacctgctgccccctccacccccaacccagtcctacctgtcacaccggacggacccgctgtgccttctaccatcgttccaccattgatgtacatactcatgttttacatcttttctttctgccgctcggctccggccattttgttttatacaaaaatgggaaaaaaaaaaaagaaa

SEQ ID NO: 191223 - DNA, 2022 bp, Homo sapiens
  Payload ID: 17772
  Gene Name: thyroid hormone receptor interactor 10
  ENST ID: ENST00000600677
  CDS Start-End: 49-1080
gcggggaccgggtgcggtggtggctgcggcggcggcggcgggagcagcatggattggggcactgagctgtgggatcagttcgaggtgctcgagcgccacacgcagtgggggctggacctgttggacagatatgtaaagttcgtgaaagaacgcaccgaagtggaacaggcttacgccaaacaactgcggagcctggtgaaaaaatatctgcccaagagacctgccaaggatgatcctgagtccaaattcagccagcaacagtccttcgtacagattctccaggaggtgaatgactttgcaggccagcgggagctggtggctgagaacctcagtgtccgtgtatgtcttgagctgaccaagtactcacaagagatgaaacaggagaggaagatgcacttccaagaagggcggcgggcccagcagcagctggaaaatggctttaaacagctggagaatagtaagcgtaaatttgagcgggactgccgggaggcagagaaggcagcccagactgctgaacggctagaccaggatatcaacgccaccaaggctgatgtggagaaggccaagcagcaagcccaccttcggagtcacatggccgaagaaagcaaaaacgaatatgcggctcaactgcagcgcttcaaccgagaccaagcccacttctatttttcacagatgccccagatattcgataagctccaagacatggatgaacgcagggccacccgcctgggtgccgggtatgggctcctgtcggaggccgagctggaggtggtgcccataatagccaagtgcttggagggcatgaaggtggctgcaaatgctgtggatcccaagaacgactcccacgtccttatagagctgcacaagtcaggttttgcccgcccgggcgacgtggaattcgaggacttcagccagcccatgaaccgtgcaccctccgacagcagtctgggcaccccctcggatggacggcctgaactccgaggcccgggtcgcagccgcaccaagcgctggccttttggcaagaagaacaagccttcgaggcagccgtgggccctctacccaccttgcagacagtggtgaccgaggattttagccacttgcccccagagcagcagcgaaaacggcttcaacagcagttggaagaacgcagtcgtgaacttcagaaggaggttgaccagagggaagccctaaagaaaatgaaggatgtctatgagaagacacctcagatgggggaccccgccagcttggagccccagatcgctgaaaccctgagcaacattgaacggctgaaattggaagtgcagaagtatgaggcgtggctggcagaagctgaaagtcgagtccttagcaaccggggagacagcctgagccggcacgcccggcctcccgacccccccgctagcgccccgccagacagcagcagcaacagcgcatcacaggacaccaaggagagctctgaagagcctccctcagaagagagccaggacacccccatttacacggagtttgatgaggatttcgaggaggaacccacatcccccataggtcactgtgtggccatctaccactttgaagggtccagcgagggcactatctctatggccgagggtgaagacctcagtcttatggaagaagacaaaggggacggctggacccgggtcaggcggaaagagggaggcgagggctacgtgcccacctcctacctccgagtcacgctcaattgaaccctgccagagacgggaagaggggggctgtcggctgctgcttctgggccacggggagccccaggacctatgcactttatttctgaccccgtggcttcggctgagacctgtgtaacctgctgccccctccacccccaacccagtcctacctgtcacaccggacggacccgctgtgccttctaccatcgttccaccattgatgtacatactcatgttttacatcttttctttctgccgctcggctccggccattttgttttatacaaaaatgggaaaaaaaaaaaagaaattatataaa

SEQ ID NO: 191224 - DNA, 9996 bp, Homo sapiens
  Payload ID: 17773
  Gene Name: thyroid hormone receptor interactor 11
  Uniprot ID: Q15643
  ENST ID: ENST00000267622
  CDS Start-End: 375-6314
gatccgctgccgctttccgagcgagtgtcatggcggccggcgtcgagttggcaggagtaacccacggaactgaggaaagtcattagagctgagaaagaagtggcccaatctggacggtgggaattcgtgggaatgagcagaaggccctccgtaggtgactgtgtcactagaggcgggcccctggtaaaattccaggccaggcctctgcgtttctaggcagaacctggagtcggccttgcctgagaacccagctttgtgttatcgtatcctgtctcgcgaaggcaggcgttcaaggatatttggtcggatcgcccggcggcgctaaacgttttcttttttccgagcggaccgggtcgttctctaaactcgccgcgatgtcgtcctggcttgggggcctcggctccggattgggccagtctctgggtcaagtcgggggcagcctggcttccctcactggccagatatcaaactttacaaaggatatgctgatggagggcacggaggaagtggaagcagaattacctgattctaggacaaaggaaattgaagccattcatgcaatcttgagatcagagaatgaaaggcttaagaaactttgtactgatctagaagagaaacatgaagcatcagagattcaaataaagcagcaatctacaagttaccgaaatcaacttcaacaaaaagaggtagaaatcagccatcttaaagccagacagattgcactccaggatcagttgctgaaactgcagtcagctgctcagtcagtaccttcaggagctggtgtaccagcaaccactgcatcatcttcattcgcttatgggattagtcatcatccttcagctttccatgacgatgacatggactttggtgatataatttcatcccaacaagaaataaaccgactctcaaatgaagtttcaagacttgagtctgaagttggccattggaggcatattgctcagacttccaaagcacaaggaacagataactctgatcaaagtgaaatatgtaaactacaaaatatcattaaggaactaaaacagaaccgaagtcaggaaattgatgaccatcaacatgaaatgtcagtactgcagaatgcacaccaacagaaattgacagaaataagtcgacgacatcgagaagaattaagtgactatgaagaacgaattgaagaacttgaaaatctgttacaacaaggtggctctggagttatagaaactgatctctctaaaatctatgagatgcaaaaaactattcaagttctacaaatagaaaaagtggagtctaccaaaaaaatggaacaacttgaggataaaataaaagatataaataaaaaattatcttctgcagaaaatgacagagatattttgaggagagaacaagaacagctaaatgtggaaaagagacaaataatggaagaatgtgaaaacttgaaattggaatgtagtaaattgcagccttctgctgtgaagcaaagtgatactatgacagaaaaggaaagaattcttgcccagagtgcatcagtggaagaagtgttcagactacaacaagcactgtctgatgccgaaaatgaaataatgagattgagtagtttaaaccaggataacagtcttgctgaagacaatctgaaacttaaaatgcgtatcgaagttttagaaaaagagaagtcattactgagtcaagaaaaggaagaacttcagatgtcacttttaaaattgaacaatgaatatgaagtaattaaaagtacagctacaagagacataagtttggattcagaattacatgacttaagacttaatttggaggcaaaggaacaagaactcaatcagagtattagtgaaaaggaaacactgatagctgagatagaagaattggacagacagaatcaagaagctacaaagcacatgattttgataaaagatcagctatcaaaacaacaaaatgaaggagatagcatcatcagtaaactgaaacaagatctaaatgatgaaaaaaagagagttcatcaacttgaagatgataaaatggacattactaaagagttagatgtacagaaagaaaagctaattcaaagtgaagtggccctaaatgatttacatttaaccaagcagaaacttgaggacaaagtagaaaatttagtagatcagctaaataaatcacaagaaagtaatgtaagcatccagaaggagaatttagaacttaaggagcatattagacaaaatgaggaggagctttctagaataaggaatgagttaatgcagtctctaaatcaagactctaatagtaattttaaggataccttacttaaagaaagagaagctgaagttagaaacttaaagcaaaatctttcagaattagaacagctcaatgaaaatttaaagaaagttgcttttgatgtcaaaatggaaaatgaaaagttagttttagcatgtgaagatgtgaggcatcagttagaagaatgtcttgctggtaacaatcagctttctctggaaaaaaacactattgtggagactctaaaaatggaaaaaggagagatagaggcagaattgtgttgggctaaaaagaggctgttggaagaagcaaacaagtatgagaaaaccattgaagaactgtcaaatgcacgtaatttgaatacctctgccttacagctggaacatgagcatttaattaaactcaatcaaaagaaagacatggaaatagcagaactcaaaaagaatattgaacaaatggatactgaccataaagaaactaaggacgttttgtcatctagtttagaagagcagaagcagttgacacaacttataaacaagaaagaaatttttattgaaaagcttaaagaaagaagttcaaagctgcaggaggaattggataaatattctcaggccttaagaaaaaatgaaattttaagacagaccatagaggaaaaagaccgaagtcttggatccatgaaagaggaaaataatcatctgcaagaagaattggaacgactcagggaagagcagagtcgaaccgcacctgtggctgaccctaaaacccttgatagtgttactgaactagcatctgaggtatctcaactgaacacgatcaaggaacatcttgaagaggaaattaaacatcatcaaaagataattgaagatcaaaaccagagtaagatgcaactacttcagtctttacaagagcaaaagaaggaaatggatgagtttagataccagcatgagcaaatgaacgccacacacacccagctctttttagagaaggatgaggaaattaagagtttgcaaaaaacaattgaacaaatcaaaacccagttgcatgaagaaagacaggacattcaaacagataactctgatatttttcaagaaacaaaagttcagagccttaatatagaaaatggaagtgaaaagcatgatttatctaaagctgaaacggaaagattagtgaaaggaataaaagagcgagaactggagattaaacttctaaatgaaaagaatatatctttaactaaacagattgatcagttgtccaaagatgaagttggtaaactaactcagattattcagcagaaagatttggagatacaagctcttcatgctagaatttcttcaacttcccatactcaagatgttgtttaccttcaacagcaactgcaggcttatgctatggaaagagaaaaggtatttgctgttttgaatgagaagactagggaaaatagccatctaaaaacagaatatcacaaaatgatggatattgttgctgccaaggaagcagctcttatcaaactgcaagatgaaaataaaaaattgtccactagatttgaaagtagtggccaagatatgtttagagaaactattcagaatttatcacgtatcattcgagaaaaagacatcgaaatagatgcactaagtcagaaatgtcagactttattggcagttttacaaacatccagcactggtaatgaggctggaggtgttaatagtaatcaatttgaggagcttctacaggaacgtgacaagttaaaacagcaagtaaagaaaatggaagagtggaagcagcaggtgatgaccacagtacaaaatatgcaacacgagtcagcccagcttcaggaagagcttcaccaacttcaagcacaggttttggttgacagtgataataattctaaattacaagtggactatactggcctgatccaaagttatgagcagaatgaaaccaaactcaaaaattttgggcaggaattagcacaagttcagcacagcattgggcagctttgcaataccaaggatcttcttttaggaaaacttgatattatttcaccccagctgtcttctgcatcattgcttactccccagtctgcagagtgtcttagagcaagtaagtctgaagtattgagtgaatcttctgaattgcttcagcaagagttagaagagctaagaaaatcactacaggaaaaagatgcaacaattagaactctccaggaaaataaccacagattgtctgattcgattgctgccacctcagagctagaaagaaaagaacacgaacaaaccgattcagaaatcaagcagctaaaggagaaacaagatgttttgcaaaagttacttaaggaaaaagacctcttaatcaaagccaaaagtgatcaactactttcttccaatgaaaatttcactaacaaagtaaatgaaaacgaacttttgaggcaggcagtaacaaacctgaaggagagaatattaattctagagatggacattggcaaactaaaaggagaaaatgaaaaaatagtggaaacatacaggggaaaggaaacagaatatcaagcgttacaagagactaacatgaagttttctatgatgctgcgagaaaaagagtttgagtgccactcaatgaaggagaaggctcttgcttttgaacagctattgaaagagaaagaacagggcaagactggagagttaaatcagcttttaaatgcagttaaatcaatgcaggagaagacagttgtgtttcaacaggagagagaccaagtcatgttggccctgaaacaaaaacaaatggaaaatactgccctacagaatgaggttcaacgtttacgtgacaaagaatttcgttcaaaccaagagctagagagattgcgtaatcatcttttagaatcagaagattcttatacccgtgaagctttggctgcagaagatagagaggctaaactaagaaagaaagtcacagtattggaggaaaagctagtttcatcctctaatgcaatggaaaatgcaagccatcaagccagtgtgcaggtagagtcattgcaagaacagttgaatgtagtttccaagcaaagggatgaaactgcgctgcagctttctgtctctcaggaacaagtaaagcagtatgctctgtcactggccaacctgcagatggtactagagcatttccaacaagaggaaaaagctatgtattctgctgaactcgaaaagcaaaaacagcttatagctgaatggaagaaaaacgcagaaaatctggaaggaaaagtgatatcattacaggaatgtttggatgaagcaaatgctgcattggattcagcatcaagacttacagaacagttagatgtaaaagaagaacaaattgaagaacttaaaagacaaaatgagctccgacaagaaatgctggatgatgtacaaaagaaattgatgagcttagcaaacagctcagaaggaaaagtagacaaagtcctaatgagaaacctcttcattggtcatttccacacaccgaaaaatcagcgtcatgaagtgttacggttaatggggagcatcctgggcgtcagaagggaggagatggagcagttgtttcatgacgatcagggcggtgttaccaggtggatgactgggtggcttggaggaggatcaaaaagtgttcccaacacacctttgagaccaaatcagcaatctgtggttaatagttctttttcagaactttttgttaaatttctagaaacagaatctcatccatccattccaccaccaaagctttctgttcatgatatgaaacctctggattcaccaggaagaagaaaaagagatacaaatgcaccagaaagttttaaagatacagcagaatccaggtctggtagaagaacagatgtaaatccgtttttggctcctcgctcggcagctgtacctcttattaacccagctggacttggacctggtgggcccgggcatcttcttctgaaacccatctcagatgttttgcccacatttacacctttgccagcgttacctgacaacagtgctggggttgtgctgaaagaccttttaaagcaatagatgattctcaagccagagacaatctagcactttaaagaaaccatgaacactatatgtatgtactttatcacaaagtggcctttggggagaaagtcatgtatttgttcgcaattatgctttctctgaatttaataaaaatattcctaatgcttttagaaactgcaggtgtcaggagcaagtgtttgctatataatctgctttattccttctgatttgacctaatttaagctaggaacatttaatttatcttttaccttaatttacaaaaatacagacagacaaaaatactagtagctatatggcagctttttatttccttttgtgatttccaagctcatttaagctagagattgtggtttatcaagagagtgttttttttttttaaacgaagaataaaaaaatactagtagtggcttctctgcatagtgcagaaagttgatttgaagcatatattgatcatctttagaggactttgtggagacaggccaacaagattgttgctggaaggtcataggttccctgaggtgaagtatgtatttggtcctgtgcaatattatcatgtgtgtagattctttttttgtttgttttaaatagagatggggtctcactatgttgccaggctggcctcaaactcctgggctcaagtgatcctcccacctcagcctcccaaagtgctgggattaaggcatgagccactgcgcctggccctgtgtgtaaattcatgtgactaccaccacaggcaagacacggaagacttccattacaagcatccccctgtgttgccctctcataatcattgccacctctctccctggccctctccttaatccctgacaaccacttactgttctccatctcagtcattttgttattttgagaatgttatataaatggaatcaatatataccctcttgagactggctttttttcactcagcataattcccttgagatccatccaaggctttggatgtatcactagtttgttcctttttattgttgagcatatagtgcagatatatcacttagttttaacagctaaggtatctatttaaagataccatcttaaaactaaatgttacacaaattcatgcaactttcatataagcattaaaccatacagctgcatctacgtaagtataattagcaaaatcactgaacatgccacttcctgcctccgtctgcggtgttgacatatgaggtacagcaatccgagagtcaactgttatcacggtggccactgagggcagtgaaatcactttgatagcaccagtacccagatgtttgaaacttaagaaagtatttctttaatttttcataaacccatcataaaaaaaaaatcccgacttgaaacttaactgtatctggatgttcatatttttattagttgttgaagttgtacatttaaaaagatatttcttgcaaattttgtaaatttctatatgcttttaaaatagaaacatttgtataacaaggaaggatgaaaataaaacaaattcaaatatgtgaatagtcctggctgaggccagaactaaatttggttatttgcaagttttactgtgattaactgtactttctaatgtatttggaagactggaagtcttaattccatgttgatgggtgaaacttgtttttctgaaaaatgaagtaactgaaaatgctgcttcagaatgtcttgtatctccttagataactaatttatattgccattctttatttactatactttaaaggaagttgtcatgcaagttctatattagaactgtcaaactgcctcttggtttttgcctattattatttctctgtgagttgttactccttggtttttatatgctcctaacaaagatactttcactgactatcctacattatttgctgcttgccattgaaatttcatttcagtgtggagaaatgaaatactagtttctaagttaaaaaagacacatggtcctttatttttaagaaatagaatatgtaaaaagttttctcttttaatttgaaaaagagatgcatggttggtatttaagtagtatgtcatcatatttgaaatgccttttgtgacatttttgagtatttccttctctgaccaaaacaacttgtccgcctctcatcccatggtttaacgtaagtttaaaagctgttgtgggtggattgcatagctaaacatcacagagcatgatattaaatggctgctatttaaataaatatgtgaccttgtcctaaagctataatactggccgggcacagtggctcacgcctgtaatcccagaactttgggagggtgaggtgggtggatcacctgaggtcaggagttcaagaccagcctggccaacatggtgaaaccccatctctactaaaaatacaaaaattagctgggcatggtggcaggcgcctataatcccagctactcaggaggctgaggcaggagaattgcttgaccccgggaagtggaggttgcagttagcaaccactccactgcactccagcctgagcgacagagcgagactctgtctcaaaaaaaaaaaaaaaaaaaaaaaagctatagtacctaatgttttcattgtgtcattgaaactatagctgactggtatgtatactaagtgttcgttgatctaaaccagatataagtcattgacttttctgaaacttagttgtgtcagagatgaaccacctgctcactgaaccgtcttagtaaccagtgatgaagcatataattctaatgttggcaataggacattgctaacagtgcgtttaactgcaatattttaactacagtaatttttctgtttatttctctatccactcagtagaatttgtggttgaattccaccttcgctgccatagttttttaccacattcctaatggttttcaacctctatactgtagtagaaaattcatctaactactgaatttaattttagcataatactggatcaaattgtttgaattttcattcctgtcatttttgatttttaaaaaatgaaacaaaactaaacaacaaaaccctaggaaaagaatggcttctttccaactagtcaattaaaacgtccagtatctccccaaataaagccttaggtttcttttaacctcttaatggttaattgaaaagagtacagaaactatcaaaatacttatccaatcaatggggggaaaagctatgtcttcagggacagtagagtgatgagaattttttagaaaacactattatccatcaaacttaaaagcatttggacctgatatttaaagataatgaagttttccacatattgaagtattcaagacatcttccatccacaaaaatttatctttaagttttgtaaatatcaagtaagtatagatgatatttattttatatattcctatggaaaaaatgctactttaatgttctgacatttgtgattatttgccagtctttactttttaacttattaaaaagttaaatacttattaaggtttctctatgtaaaacaatttaaattgtcttttgatttttagggaaatatctaaacgtgggaaatttccaacgcaaccttaatattaggttgtgttatttatagagctaaagttaatgcatttttgaatttctcaggagcactgcaaggcaaaaaaatactccaaataaaaatgatatatgtaagttggcaatgtcttcagtcacaataaaaaaaatttttagcaaaca

SEQ ID NO: 191225 - DNA, 5246 bp, Homo sapiens
  Payload ID: 17773
  Gene Name: thyroid hormone receptor interactor 11
  ENST ID: ENST00000554357
  CDS Start-End: 1-5086
agaattaagtgactatgaagaacgaattgaagaacttgaaaatctgttacaacaaggtggctctggagttatagaaactgatctctctaaaatctatgagatgcaaaaaactattcaagttctacaaatagaaaaagtggagtctaccaaaaaaatggaacaacttgaggataaaataaaagatataaataaaaaattatcttctgcagaaaatgacagagatattttgaggagagaacaagaacagctaaatgtggaaaagagacaaataatggaagaatgtgaaaacttgaaattggaatgtagtaaattgcagccttctgctgtgaagcaaagtgatactatgacagaaaaggaaagaattcttgcccagagtgcatcagtggaagaagtgttcagactacaacaagcactgtctgatgccgaaaatgaaataatgagattgagtagtttaaaccaggaagaacttcagatgtcacttttaaaattgaacaatgaatatgaagtaattaaaagtacagctacaagagacataagtttggattcagaattacatgacttaagacttaatttggaggcaaaggaacaagaactcaatcagagtattagtgaaaaggaaacactgatagctgagatagaagaattggacagacagaatcaagaagctacaaagcacatgattttgataaaagatcagctatcaaaacaacaaaatgaaggagatagcatcatcagtaaactgaaacaagatctaaatgatgaaaaaaagagagttcatcaacttgaagatgataaaatggacattactaaagagttagatgtacagaaagaaaagctaattcaaagtgaagtggccctaaatgatttacatttaaccaagcagaaacttgaggacaaagtagaaaatttagtagatcagctaaataaatcacaagaaagtaatgtaagcatccagaaggagaatttagaacttaaggagcatattagacaaaatgaggaggagctttctagaataaggaatgagttaatgcagtctctaaatcaagactctaatagtaattttaaggataccttacttaaagaaagagaagctgaagttagaaacttaaagcaaaatctttcagaattagaacagctcaatgaaaatttaaagaaagttgcttttgatgtcaaaatggaaaatgaaaagttagttttagcatgtgaagatgtgaggcatcagttagaagaatgtcttgctggtaacaatcagctttctctggaaaaaaacactattgtggagactctaaaaatggaaaaaggagagatagaggcagaattgtgttgggctaaaaagaggctgttggaagaagcaaacaagtatgagaaaaccattgaagaactgtcaaatgcacgtaatttgaatacctctgccttacagctggaacatgagcatttaattaaactcaatcaaaagaaagacatggaaatagcagaactcaaaaagaatattgaacaaatggatactgaccataaagaaactaaggacgttttgtcatctagtttagaagagcagaagcagttgacacaacttataaacaagaaagaaatttttattgaaaagcttaaagaaagaagttcaaagctgcaggaggaattggataaatattctcaggccttaagaaaaaatgaaattttaagacagaccatagaggaaaaagaccgaagtcttggatccatgaaagaggaaaataatcatctgcaagaagaattggaacgactcagggaagagcagagtcgaaccgcacctgtggctgaccctaaaacccttgatagtgttactgaactagcatctgaggtatctcaactgaacacgatcaaggaacatcttgaagaggaaattaaacatcatcaaaagataattgaagatcaaaaccagagtaagatgcaactacttcagtctttacaagagcaaaagaaggaaatggatgagtttagataccagcatgagcaaatgaacgccacacacacccagctctttttagagaaggatgaggaaattaagagtttgcaaaaaacaattgaacaaatcaaaacccagttgcatgaagaaagacaggacattcaaacagataactctgatatttttcaagaaacaaaagttcagagccttaatatagaaaatggaagtgaaaagcatgatttatctaaagctgaaacggaaagattagtgaaaggaataaaagagcgagaactggagattaaacttctaaatgaaaagaatatatctttaactaaacagattgatcagttgtccaaagatgaagttggtaaactaactcagattattcagcagaaagatttggagatacaagctcttcatgctagaatttcttcaacttcccatactcaagatgttgtttaccttcaacagcaactgcaggcttatgctatggaaagagaaaaggtatttgctgttttgaatgagaagactagggaaaatagccatctaaaaacagaatatcacaaaatgatggatattgttgctgccaaggaagcagctcttatcaaactgcaagatgaaaataaaaaattgtccactagatttgaaagtagtggccaagatatgtttagagaaactattcagaatttatcacgtatcattcgagaaaaagacatcgaaatagatgcactaagtcagaaatgtcagactttattggcagttttacaaacatccagcactggtaatgaggctggaggtgttaatagtaatcaatttgaggagcttctacaggaacgtgacaagttaaaacagcaagtaaagaaaatggaagagtggaagcagcaggtgatgaccacagtacaaaatatgcaacacgagtcagcccagcttcaggaagagcttcaccaacttcaagcacaggttttggttgacagtgataataattctaaattacaagtggactatactggcctgatccaaagttatgagcagaatgaaaccaaactcaaaaattttgggcaggaattagcacaagttcagcacagcattgggcagctttgcaataccaaggatcttcttttaggaaaacttgatattatttcaccccagctgtcttctgcatcattgcttactccccagtctgcagagtgtcttagagcaagtaagtctgaagtattgagtgaatcttctgaattgcttcagcaagagttagaagagctaagaaaatcactacaggaaaaagatgcaacaattagaactctccaggaaaataaccacagattgtctgattcgattgctgccacctcagagctagaaagaaaagaacacgaacaaaccgattcagaaatcaagcagctaaaggagaaacaagatgttttgcaaaagttacttaaggaaaaagacctcttaatcaaagccaaaagtgatcaactactttcttccaatgaaaatttcactaacaaagtaaatgaaaacgaacttttgaggcaggcagtaacaaacctgaaggagagaatattaattctagagatggacattggcaaactaaaaggagaaaatgaaaaaatagtggaaacatacaggggaaaggaaacagaatatcaagcgttacaagagactaacatgaagttttctatgatgctgcgagaaaaagagtttgagtgccactcaatgaaggagaaggctcttgcttttgaacagctattgaaagagaaagaacagggcaagactggagagttaaatcagcttttaaatgcagttaaatcaatgcaggagaagacagttgtgtttcaacaggagagagaccaagtcatgttggccctgaaacaaaaacaaatggaaaatactgccctacagaatgaggttcaacgtttacgtgacaaagaatttcgttcaaaccaagagctagagagattgcgtaatcatcttttagaatcagaagattcttatacccgtgaagctttggctgcagaagatagagaggctaaactaagaaagaaagtcacagtattggaggaaaagctagtttcatcctctaatgcaatggaaaatgcaagccatcaagccagtgtgcaggtagagtcattgcaagaacagttgaatgtagtttccaagcaaagggatgaaactgcgctgcagctttctgtctctcaggaacaagtaaagcagtatgctctgtcactggccaacctgcagatggtactagagcatttccaacaagaggaaaaagctatgtattctgctgaactcgaaaagcaaaaacagcttatagctgaatggaagaaaaacgcagaaaatctggaaggaaaagtgatatcattacaggaatgtttggatgaagcaaatgctgcattggattcagcatcaagacttacagaacagttagatgtaaaagaagaacaaattgaagaacttaaaagacaaaatgagctccgacaagaaatgctggatgatgtacaaaagaaattgatgagcttagcaaacagctcagaaggaaaagtagacaaagtcctaatgagaaacctcttcattggtcatttccacacaccgaaaaatcagcgtcatgaagtgttacggttaatggggagcatcctgggcgtcagaagggaggagatggagcagttgtttcatgacgatcagggcggtgttaccaggtggatgactgggtggcttggaggaggatcaaaaagtgttcccaacacacctttgagaccaaatcagcaatctgtggttaatagttctttttcagaactttttgttaaatttctagaaacagaatctcatccatccattccaccaccaaagctttctgttcatgatatgaaacctctggattcaccaggaagaagaaaaagagatacaaatgcaccagaaagttttaaagatacagcagaatccaggtctggtagaagaacagatgtaaatccgtttttggctcctcgctcggcagctgtacctcttattaacccagctggacttggacctggtgggcccgggcatcttcttctgaaacccatctcagatgttttgcccacatttacacctttgccagcgttacctgacaacagtgctggggttgtgctgaaagaccttttaaagcaatagatgattctcaagccagagacaatctagcactttaaagaaaccatgaacactatatgtatgtactttatcacaaagtggcctttggggagaaagtcatgtatttgttcgcaattatgctttctctgaatttaataaaaatattcctaatgcttttagaaac

SEQ ID NO: 191226 - DNA, 828 bp, Homo sapiens
  Payload ID: 17773
  Gene Name: thyroid hormone receptor interactor 11
  ENST ID: ENST00000557017
  CDS Start-End: 1-531
cgtaatcatcttttagaatcagaagattcttatacccgtgaagctttggctgcagaagatagagaggctaaactaagaaagaaagtcacagtattggaggaaaagctagtttcatcctctaatgcaatggaaaatgcaagccatcaagccagtgtgcaggtagagtcattgcaagaacagttgaatgtagtttccaagcaaagggatgaaactgcgctgcagctttctgtctctcaggaacaagtaaagcagtatgctctgtcactggccaacctgcagatggtactagagcatttccaacaagaggaaaaagctatgtattctgctgaactcgaaaagcaaaaacagcttatagctgaatggaagaaaaacgcagaaaatctggaaggaaaagtgatatcattacaggaatgtttggatgaagcaaatgctgcattggattcagcatcaagacttacagaacagttagatgtaaaagaagaacaaattgaagaacttaaaagacaaaatatcatcaagaaagtgagatgacaactcacagaatggggaaaacatgtttgtaaatcatatctgataacggaacttgtatccagctactactaggaaaatgcagcataattcaaaggaaaagatgagctccgacaagaaatgctggatgatgtacaaaagaaattgatgagcttagcaaacagctcagaaggaaaagtagacaaagtcctaatgagaaacctcttcattggtcatttccacacaccgaaaaatcagcgtcatgaagtgttacggttaatggggagcatcctgggcgtcagaagggaggagatggagcag

SEQ ID NO: 191227 - DNA, 564 bp, Homo sapiens
  Payload ID: 17773
  Gene Name: thyroid hormone receptor interactor 11
  ENST ID: ENST00000555516
  CDS Start-End: 362-564
ggaaggaagcaagcaagcagaattacctgattctaggacaaaggaaattgaagccattcatgcaatcttgagatcagagaatgaaaggcttaagaaactttgtactgatctagaagagaaacatgaagcatcagagattcaaataaagcagcaatctacaagttaccgaaatcaacttcaacaaaaagaggtagaaatcagccatcttaaagccagacagattgcactccaggatcagttgctgaaactgcagtcagctgctcagtcagtaccttcaggagctggtgtaccagcaaccactgcatcatcttcattcgcttatgggattagtcatcatccttcagctttccatgacgatgacatggactttggtgatataatttcatcccaacaagaaataaaccgactctcaaatgaagtttcaagacttgagtctgaagttggccattggaggcatattgctcagacttccaaagcacaaggaacagataactctgatcaaagtgaaatatgtaaactacaaaatatcattaaggaactaaaacagaaccgaagtcaggaaat

SEQ ID NO: 191228 - DNA, 9874 bp, Homo sapiens
  Payload ID: 17774
  Gene Name: thyroid hormone receptor interactor 12
  Uniprot ID: Q14669
  ENST ID: ENST00000283943
  CDS Start-End: 180-6158
gctgcggctcagctgataattgaaggaacccggagccgccgccgccgcgccgctggggggggtggggggagctagtggaagttactgccgcgccaccgagtccggaccggagactttggggcctaactagtgaatggtagtgtctagaaagggtatgtcccttcaagagagaggtgccaatgtccaaccggcctaataacaatccaggggggtcactgcgacgttcacagaggaacactgccggggcccaaccacaagacgactcaataggaggaagaagctgcagttcatcatctgctgtgatagttccacaaccagaggatccagacagagccaatacttcagaaagacaaaaaacggggcaggtgcctaagaaagacaattctcgaggagtgaagcgcagtgctagtccagactacaacaggaccaattctcctagctctgcaaaaaaaccaaaagcacttcagcatactgaatctccctcagaaacaaataagccacatagtaagtcaaagaagagacatttagaccaggagcaacaactgaaatctgcacaatcaccatcaacaagcaaggctcataccaggaagagtggggccactggcggttcacggagtcagaaaagaaaaaggacagagagttcttgtgtaaagagtggctccgggtctgaatcaactggtgcagaagagagatctgcgaaacctaccaagctggcttcaaaatcagccacctcagccaaagctgggtgtagcaccatcactgattcttcttctgctgcctctacttcctcctcgtcttctgctgtagcctcggcctcctccactgtaccaccaggtgccagagtgaaacaaggaaaagatcagaacaaggccaggcgttcccgttcagcgtccagtcccagccccagaagaagtagcagggaaaaggaacagagtaaaactggtggctcttcaaaatttgattgggctgctcgtttcagccctaaagttagccttcctaaaacaaaactgtctcttccagggtcttctaagtcagagacatcaaaacctggaccttctggattacaggccaaattagcaagtttaagaaaatctacgaagaaacgcagtgagtctccacctgctgagctccccagtttgaggcggagcacacgccaaaagaccacgggctcctgtgctagtaccagtcggcgaggctctggcctgggcaaaagaggagcagctgaagctcgtcgacaggagaaaatggcagaccctgaaagcaaccaggaggcagtaaattcttcagctgctcggacagatgaagctccccaaggagctgcaggggctgttggcatgaccacctctggggagagtgaatcagatgattccgagatgggacgtttgcaagctttgttagaggcaaggggtcttccccctcacctatttggtcctcttggtcctcggatgtcacagcttttccatagaacaattggaagtggagctagttctaaggcccagcagctactacaaggattgcaagccagtgatgaaagtcaacagcttcaggcagttattgagatgtgtcagttactggtcatgggaaatgaggagacactgggagggtttcctgtcaagagtgttgttccagctttgattacgttacttcagatggagcacaattttgatattatgaaccatgcttgtcgagccttaacatacatgatggaagcacttcctcgatcttctgctgttgtagtagatgctattcctgtctttttagaaaagctgcaagttattcagtgtattgatgtggcagagcaggccttgactgccttggagatgttgtcacggagacatagtaaagccattctacaggcgggtggtttggcagactgcttgctgtacctagaattcttcagcataaatgcccaaagaaatgcattagcaattgcagctaattgctgccagagtatcacgccagatgaatttcattttgtggcagattcactcccattgctaacccaaaggctaacacatcaggataaaaagtcagtagaaagcacttgcctttgttttgcacgcctagtggacaacttccagcatgaggagaatttactccagcaggttgcttccaaagatctgcttacaaatgttcaacagctgttggtagtgactccacccattttaagttctgggatgtttataatggtggttcgcatgttttctctgatgtgttccaactgtccaactttagctgttcaacttatgaaacaaaacattgcagaaacgcttcactttctcctgtgtggtgcctccaatggaagttgtcaggaacagattgatcttgttccacgaagccctcaagagttgtatgaactgacatctctgatttgtgaacttatgccatgtttaccaaaagaaggcatttttgcagttgataccatgttgaagaagggaaatgcacagaacacagatggtgcgatatggcagtggcgtgatgatcggggcctctggcatccatataacaggattgacagccggatcattgagcaaatcaatgaggacacgggaacagcacgtgccattcagagaaaacctaacccgttagccaatagtaacactagtggatattcagagtcaaagaaggatgatgctcgagcacagcttatgaaagaggatccggaactggctaagtcttttattaagacattatttggtgttctttatgaagtgtatagttcctcagcaggacctgcggtcagacataagtgccttagagcaattcttaggataatttattttgcggatgctgaacttctgaaggatgttctgaaaaatcatgctgtttcaagtcacattgcttccatgctgtcaagccaagacctgaagatagtagtgggagcacttcagatggcagaaattttaatgcagaagttacctgatatttttagtgtttacttcagaagagaaggtgtaatgcatcaagtaaaacacttagcagaatcagagtctttgttgacaagtccaccaaaggcatgtacgaatggatcgggatccatgggatccacaacttcagtcagcagtgggacagccacagctgccactcatgctgcagctgacttgggatcacccagcttgcagcacagcagggatgattctttagatctcagccctcaaggtcgattaagtgatgttctaaagagaaaacgactgccaaaacgagggccaagaaggccaaagtactcacctccaagagatgatgacaaagtagacaatcaagctaaaagccccaccactactcagtcacctaaatcttctttcctggcaagcttgaatccaaaaacatggggaaggttaagtacacagtccaacagcaacaacattgagccagcacggactgcgggaggtagtggccttgccagggctgcctcaaaggataccatctccaataatagagaaaaaattaaaggttggattaaggagcaggcacataaatttgtagaacgttatttcagttctgagaatatggatggaagcaaccctgcattgaatgtccttcagagactttgtgctgcaaccgaacaactcaacctccaggtggatggtggagctgagtgccttgtagaaatccgtagcatagtctcagagtcagatgtttcatcatttgaaatccaacatagtggatttgtgaagcagctgttgctttatttgacatctaaaagtgaaaaggatgctgtgagcagagagatcagattaaagcgatttcttcatgtatttttttcttctccacttcctggagaagagcccattggaagagtggaaccagtgggtaatgcacctttgttggcattagttcacaagatgaacaactgcctcagccagatggaacaatttccagtcaaagtacatgatttccctagtggaaatgggacaggaggcagcttttctctcaacagaggatcacaggctttaaaatttttcaacacacatcaattaaaatgccagttacaaaggcatccagactgtgcaaatgtgaagcagtggaagggtggacctgtcaagattgaccctctggctttggtacaagccatcgagagataccttgtagttagagggtatggaagagtaagagaagatgatgaagacagcgatgacgatggatcagatgaggaaatagatgagtctctggctgctcagttcctaaattcaggaaatgtaagacacaggctgcagttttatattggagaacatttgctgccgtataacatgactgtgtatcaggcagtacggcagtttagtatacaggctgaagatgaaagagaatccacagatgatgagagcaatcctctaggcagagctggtatttggacaaagactcatacaatatggtataaacctgtgagagaggatgaagaaagtaataaagattgtgttggtggtaaaagaggaagagcccaaacagctccaacgaaaacttcccctagaaatgcaaaaaagcatgatgagttatggcacgatggagtgtgcccatcagtatcaaatcctttagaagtttacctcattcccacaccacctgaaaatataacatttgaagacccgtcattagatgtgatccttcttttaagagttttacatgctatcagtcgatactggtattacttgtatgataatgcaatgtgcaaggaaattattccaactagtgaatttattaacagtaagttaacagcaaaagcaaataggcaacttcaagatcctttagtaatcatgacaggaaacatcccaacatggcttactgagctaggaaaaacctgcccatttttctttccttttgatacccggcaaatgcttttttatgtaactgcatttgatcgggaccgagcaatgcaaagattacttgataccaacccagaaatcaaccagtctgattctcaagatagcagagttgcacctagattggatagaaaaaaacgtactgtgaaccgagaggagctgctgaaacaggcggagtctgtgatgcaggacctcggcagctcacgggccatgttagaaatccagtatgaaaatgaggttggtacaggtcttgggcctacactggagttttatgcgcttgtatctcaggaactacagagagctgacttgggtctttggagaggtgaagaagtaactcttagcaatccaaaagggagccaagaagggaccaagtatattcaaaacctccagggcctgtttgcgcttccctttggtaggacagcaaagccagctcatatcgcaaaggttaagatgaagtttcgcttcttaggaaaattaatggccaaggctatcatggatttcagattggtggaccttccccttggcttacccttttataaatggatgctacggcaagaaacttcactgacatcacacgatttgtttgacatcgacccagttgtagccagatcagtttatcacctagaagacattgtcagacagaagaaaagacttgaacaagataaatcccagaccaaagagagtctacagtatgcattagaaaccttgactatgaatggctgctcagttgaagatctaggactggatttcactctgccagggtttcccaatatcgaactgaagaaaggagggaaggatataccagtcactatccacaatttagaggagtatctaagactggttatattctgggcactaaatgaaggcgtttctaggcaatttgattcgttcagagatggatttgaatcagtcttcccactcagtcatcttcagtacttctacccggaggaactggatcagctcctttgtggcagtaaagcagacacttgggatgcaaagacactgatggaatgctgtaggcctgatcatggttatactcatgacagtcgggctgtgaagtttttgtttgagattctcagtagttttgataatgagcagcagaggttatttctccagtttgtgactggtagcccaagattgcctgttggaggattccggagtttgaatccacctttgacaattgtccgaaagacgtttgaatcaacagaaaacccagatgacttcttgccctctgtaatgacttgtgtgaactatcttaagttgccggactattcaagcattgagataatgcgtgaaaaactgttgatagcagcaagagaagggcagcagtcgttccatctttcctgatcatagcaagaaatgcagtgtctgcctgttacagcaaaagaaacaaatcatgatttcttttctaatgttatcacctgagtcaaggaaacatgttacgccttcttgttgtaggaaaaacggcttgcagattataaagagacatttggttgatattcattaatggccccatggacttaaagtgatcaggccctaaaacgttgttgtgatgaggtttctttagcaagttcttgtttaaattatcatttatttgatgagtgaagtttttaacatgctttgctgtgtgaaatttaaaaaagggatgtttttccaggctggaacaataaatgtggctgtgcagtttaattctgggctgtgtgtatccatctagctaagtctgcagttttctttcctccaaagacaactcttgtacataagtacagaaatttaagctcacatgtatttgacaaatatagtttagtagactagctctatgtgcttttcactttcctctgattttctctccctgattcattattatctgtgcagctcacagttttttttttgtatacaactcacagttctcaaattttcgttacccatgggcttctgttgtcccatgttctctccagttaagatctaatttaaaattcattggattgaaatttattgaatataattcagcttttgtaactaggtagacttttcttatagtttagttttaatatagtttagggtattactggctttttcccaggtgacacactaaggactgtttacatggcaattccagcagcaacagcctctggaatgagacaaggaaagctcatttgtttcttttatgaaggttaagaagtctacagcttgggctggccggtatttattattctgtggccagaggattttaaattaatgtaaattttttaaacaaaataagcagttttccttccctgttggagtaaaaaaatttttttccctttgttgttttacgtttttgttcatagtcttctttattccacgctcctcttccccttctcccagtgctgacttgggacaaaacagttcagcctttgtctcgacgcagataaaagcacctgtaagcaatgctgtccagtcattttatgtgctgatttctcaaatctgcaataatccatcaggttaatgtttttacctgaaaataaagaaagtttgcttcacctttttgtttatagttttgtgctgtatgcataactttcaattgtatagatgtatttcaatgcaaggaaatccacatatctccatgattcgggtcatggctgattttgctattcaaacaatttataatagcaacttgaagaaactaaaatgtgaagagaaaatgggaggagattccttcctaaggtccaaaactaggcctgtggcataaatttgaaggaattttccataattcatctccttgaaaataagagatgagctagtttttttttttaattgaactttgagaaatcaatttttttgactgttctgtaagttttaattaattgacacaaaagcccttttccctatcccaccacccaaaagaaactcagtggcttgtttgacatagattgctgtgtcaatttacacttaaatggccttatatggaaatgtcccctcctgagagttcacttgggcagtgaccccattaagtggaagggaactgtcagaggagttgggggcagagaattctctccctgtctctgcagagactgacaagtgaatggcttttccctgaaatccaagaagggaattgtgtttctgcagttttcaccactaacagcacagttgctgagcagcttcatcaagtgaagttaaagactgaaacaatttgttttcaactgttctgatatcttcctgcaaattaagcacaaggatttttgtgtgaacatagcattttgttcctgatttttaaagggttctgttaaaatttagacatgtataaacaaaataatgtttcatctgtacttgacattttatccatgttgcagccctggcaaatttggcctcattgattccagcatctaataagtatatatgatgattttgactcaaactctaaagtcttgagtgtttcaaagtcagtcgttacctgtttaaaagcctcagcctttagcttattcctccttcaatacacgggacctttggttaatttggggcaggaaaactcttaaagtaatctctcttggcagaggccttattgcaccagagggaaaaagtatatacttcatttgctgttactccagttatgccttaaattcatttgcttggtaatcctatcaacgagcactaacttcttagtatactttaaacacttagttgggtaacaactgagattttgttgtcctttattttttgctgagatggagtcagtcagatgttagtcatagctaacaccgaatttgtgttgtcatttagacagttactgattcgatctgctttatatatgagaacgtatttttaactattccaagaaggaagaggtagctaaatgtaatcccctcttcctatccccccagaaaactgaactgtaagttctaggtagactaattgggagcagacacggagttttagatgccttagccaaacccagcagaaacctttcacacagccactcatcgtaagaaacgcagatttttctcttctcatgcttgtctctggttccctgcatttgtagtgacagaactttcactagcaggatataaagaaagtaattatgcttggagtccctctttactgggtttgagttaggtgcataacatggaaaggagtggtgccttcaaatgaatgtgaccactccgtattgtggagtgacttccctagggcatcctatacatcctaccacagaaggccaagggacagagcaccaacttcagtatccaagaaattagatccacaactcttgattttccacactgaggactgtcgcgagtaagttgtaagtttgccgtcttccttctggcttagcaggtgctgcagctgtactctcgactcctgtctgtgagcgtgagctcaggaaatgagagtggagtctattccaaaaaaaaaatgtgatgaagtttttcataaaagtgcattcatatgccaaatcctttttggaggattctggatgctattgttcatttctctactagtaaaatgatcaagccttcatttattttaggctttgttttttgatccattttgttttccctgctgtaatgagaataattgtttggaaatgtcatattctgtatttatgattctctgagaaatgcttttgtataagtcttaggtttgacattgcagtagttgacatacacggtaaaggataacctagtgacaaatcactgaagatgcttcctttgttacctcaaaaaaaaaaatccagacaaaatagcatttataaatatagaaaacaggattggctgttttccaagaacttcaagttaacaattcttatgcaaggaaaagttcttaatgctaaagacttgttctgcatgaaggagacattctttaataatggaagaggtggttttatttttactacaagccgactcatatttccaaacctataaccaattgctgatctcctgtgtaaagcatttttttccttttatctgaaacagtgatttatatgaactgttggaataatggaacctcaaactacagatgtgtatgtaaaattgcataaatgcactgacttccttctccctgactatatttttaataaacagcattatcct

SEQ ID NO: 191229 - DNA, 583 bp, Homo sapiens
  Payload ID: 17774
  Gene Name: thyroid hormone receptor interactor 12
  ENST ID: ENST00000343290
  CDS Start-End: 287-583
ataattgaaggaacccggagccgccgccgccgcgccgctggggggggtggggggagctagtggaagttactgccgcgccaccgagtccggaccggagactttggggcctaactagacagagtctccctctgttgcccaggctggagtgcagtggcgcggtctcagctcactgcaacctctgcctcccgggttcaagcgattcccctgccgcagcctccagagcagctgggactacagtgaatggtagtgtctagaaagggtatgtcccttcaagagagaggtgccaatgtccaaccggcctaataacaatccaggggggtcactgcgacgttcacagaggaacactgccggggcccaaccacaagacgactcaataggaggaagaagctgcagttcatcatctgctgtgatagttccacaaccagaggatccagacagagccaatacttcagaaagacaaaaaacggggcaggtgcctaagaaagacaattctcgaggagtgaagcgcagtgctagtccagactacaacaggaccaattctcctagctctgcaaaaaaaccaaaagcacttcagcatactgaa

SEQ ID NO: 191230 - DNA, 6405 bp, Homo sapiens
  Payload ID: 17774
  Gene Name: thyroid hormone receptor interactor 12
  Uniprot ID: Q14669
  ENST ID: ENST00000389044
  CDS Start-End: 170-6292
agctgataattgaaggaacccggagccgccgccgccgcgccgctggggggggtggggggagctagtggaagttactgccgcgccaccgagtccggaccggagactttggggcctaactagtgaatggtagtgtctagaaagggtatgtcccttcaagagagaggtgccaatgtccaaccggcctaataacaatccaggggggtcactgcgacgttcacagaggaacactgccggggcccaaccacaagacgactcaataggaggaaggtcacatttagggcaggcaaaacataagggatatagccctcctgagagtagaaaatctaattctaaggcacccaaagtgcagtctaatactacttctgaactgtcaaggggacacctttctaaaagaagctgcagttcatcatctgctgtgatagttccacaaccagaggatccagacagagccaatacttcagaaagacaaaaaacggggcaggtgcctaagaaagacaattctcgaggagtgaagcgcagtgctagtccagactacaacaggaccaattctcctagctctgcaaaaaaaccaaaagcacttcagcatactgaatctccctcagaaacaaataagccacatagtaagtcaaagaagagacatttagaccaggagcaacaactgaaatctgcacaatcaccatcaacaagcaaggctcataccaggaagagtggggccactggcggttcacggagtcagaaaagaaaaaggacagagagttcttgtgtaaagagtggctccgggtctgaatcaactggtgcagaagagagatctgcgaaacctaccaagctggcttcaaaatcagccacctcagccaaagctgggtgtagcaccatcactgattcttcttctgctgcctctacttcctcctcgtcttctgctgtagcctcggcctcctccactgtaccaccaggtgccagagtgaaacaaggaaaagatcagaacaaggccaggcgttcccgttcagcgtccagtcccagccccagaagaagtagcagggaaaaggaacagagtaaaactggtggctcttcaaaatttgattgggctgctcgtttcagccctaaagttagccttcctaaaacaaaactgtctcttccagggtcttctaagtcagagacatcaaaacctggaccttctggattacaggccaaattagcaagtttaagaaaatctacgaagaaacgcagtgagtctccacctgctgagctccccagtttgaggcggagcacacgccaaaagaccacgggctcctgtgctagtaccagtcggcgaggctctggcctgggcaaaagaggagcagctgaagctcgtcgacaggagaaaatggcagaccctgaaagcaaccaggaggcagtaaattcttcagctgctcggacagatgaagctccccaaggagctgcagcctctagttctgttgcaggggctgttggcatgaccacctctggggagagtgaatcagatgattccgagatgggacgtttgcaagctttgttagaggcaaggggtcttccccctcacctatttggtcctcttggtcctcggatgtcacagcttttccatagaacaattggaagtggagctagttctaaggcccagcagctactacaaggattgcaagccagtgatgaaagtcaacagcttcaggcagttattgagatgtgtcagttactggtcatgggaaatgaggagacactgggagggtttcctgtcaagagtgttgttccagctttgattacgttacttcagatggagcacaattttgatattatgaaccatgcttgtcgagccttaacatacatgatggaagcacttcctcgatcttctgctgttgtagtagatgctattcctgtctttttagaaaagctgcaagttattcagtgtattgatgtggcagagcaggccttgactgccttggagatgttgtcacggagacatagtaaagccattctacaggcgggtggtttggcagactgcttgctgtacctagaattcttcagcataaatgcccaaagaaatgcattagcaattgcagctaattgctgccagagtatcacgccagatgaatttcattttgtggcagattcactcccattgctaacccaaaggctaacacatcaggataaaaagtcagtagaaagcacttgcctttgttttgcacgcctagtggacaacttccagcatgaggagaatttactccagcaggttgcttccaaagatctgcttacaaatgttcaacagctgttggtagtgactccacccattttaagttctgggatgtttataatggtggttcgcatgttttctctgatgtgttccaactgtccaactttagctgttcaacttatgaaacaaaacattgcagaaacgcttcactttctcctgtgtggtgcctccaatggaagttgtcaggaacagattgatcttgttccacgaagccctcaagagttgtatgaactgacatctctgatttgtgaacttatgccatgtttaccaaaagaaggcatttttgcagttgataccatgttgaagaagggaaatgcacagaacacagatggtgcgatatggcagtggcgtgatgatcggggcctctggcatccatataacaggattgacagccggatcattgagcaaatcaatgaggacacgggaacagcacgtgccattcagagaaaacctaacccgttagccaatagtaacactagtggatattcagagtcaaagaaggatgatgctcgagcacagcttatgaaagaggatccggaactggctaagtcttttattaagacattatttggtgttctttatgaagtgtatagttcctcagcaggacctgcggtcagacataagtgccttagagcaattcttaggataatttattttgcggatgctgaacttctgaaggatgttctgaaaaatcatgctgtttcaagtcacattgcttccatgctgtcaagccaagacctgaagatagtagtgggagcacttcagatggcagaaattttaatgcagaagttacctgatatttttagtgtttacttcagaagagaaggtgtaatgcatcaagtaaaacacttagcagaatcagagtctttgttgacaagtccaccaaaggcatgtacgaatggatcgggatccatgggatccacaacttcagtcagcagtgggacagccacagctgccactcatgctgcagctgacttgggatcacccagcttgcagcacagcagggatgattctttagatctcagccctcaaggtcgattaagtgatgttctaaagagaaaacgactgccaaaacgagggccaagaaggccaaagtactcacctccaagagatgatgacaaagtagacaatcaagctaaaagccccaccactactcagtcacctaaatcttctttcctggcaagcttgaatccaaaaacatggggaaggttaagtacacagtccaacagcaacaacattgagccagcacggactgcgggaggtagtggccttgccagggctgcctcaaaggataccatctccaataatagagaaaaaattaaaggttggattaaggagcaggcacataaatttgtagaacgttatttcagttctgagaatatggatggaagcaaccctgcattgaatgtccttcagagactttgtgctgcaaccgaacaactcaacctccaggtggatggtggagctgagtgccttgtagaaatccgtagcatagtctcagagtcagatgtttcatcatttgaaatccaacatagtggatttgtgaagcagctgttgctttatttgacatctaaaagtgaaaaggatgctgtgagcagagagatcagattaaagcgatttcttcatgtatttttttcttctccacttcctggagaagagcccattggaagagtggaaccagtgggtaatgcacctttgttggcattagttcacaagatgaacaactgcctcagccagatggaacaatttccagtcaaagtacatgatttccctagtggaaatgggacaggaggcagcttttctctcaacagaggatcacaggctttaaaatttttcaacacacatcaattaaaatgccagttacaaaggcatccagactgtgcaaatgtgaagcagtggaagggtggacctgtcaagattgaccctctggctttggtacaagccatcgagagataccttgtagttagagggtatggaagagtaagagaagatgatgaagacagcgatgacgatggatcagatgaggaaatagatgagtctctggctgctcagttcctaaattcaggaaatgtaagacacaggctgcagttttatattggagaacatttgctgccgtataacatgactgtgtatcaggcagtacggcagtttagtatacaggctgaagatgaaagagaatccacagatgatgagagcaatcctctaggcagagctggtatttggacaaagactcatacaatatggtataaacctgtgagagaggatgaagaaagtaataaagattgtgttggtggtaaaagaggaagagcccaaacagctccaacgaaaacttcccctagaaatgcaaaaaagcatgatgagttatggcacgatggagtgtgcccatcagtatcaaatcctttagaagtttacctcattcccacaccacctgaaaatataacatttgaagacccgtcattagatgtgatccttcttttaagagttttacatgctatcagtcgatactggtattacttgtatgataatgcaatgtgcaaggaaattattccaactagtgaatttattaacagtaagttaacagcaaaagcaaataggcaacttcaagatcctttagtaatcatgacaggaaacatcccaacatggcttactgagctaggaaaaacctgcccatttttctttccttttgatacccggcaaatgcttttttatgtaactgcatttgatcgggaccgagcaatgcaaagattacttgataccaacccagaaatcaaccagtctgattctcaagatagcagagttgcacctagattggatagaaaaaaacgtactgtgaaccgagaggagctgctgaaacaggcggagtctgtgatgcaggacctcggcagctcacgggccatgttagaaatccagtatgaaaatgaggttggtacaggtcttgggcctacactggagttttatgcgcttgtatctcaggaactacagagagctgacttgggtctttggagaggtgaagaagtaactcttagcaatccaaaagggagccaagaagggaccaagtatattcaaaacctccagggcctgtttgcgcttccctttggtaggacagcaaagccagctcatatcgcaaaggttaagatgaagtttcgcttcttaggaaaattaatggccaaggctatcatggatttcagattggtggaccttccccttggcttacccttttataaatggatgctacggcaagaaacttcactgacatcacacgatttgtttgacatcgacccagttgtagccagatcagtttatcacctagaagacattgtcagacagaagaaaagacttgaacaagataaatcccagaccaaagagagtctacagtatgcattagaaaccttgactatgaatggctgctcagttgaagatctaggactggatttcactctgccagggtttcccaatatcgaactgaagaaaggagggaaggatataccagtcactatccacaatttagaggagtatctaagactggttatattctgggcactaaatgaaggcgtttctaggcaatttgattcgttcagagatggatttgaatcagtcttcccactcagtcatcttcagtacttctacccggaggaactggatcagctcctttgtggcagtaaagcagacacttgggatgcaaagacactgatggaatgctgtaggcctgatcatggttatactcatgacagtcgggctgtgaagtttttgtttgagattctcagtagttttgataatgagcagcagaggttatttctccagtttgtgactggtagcccaagattgcctgttggaggattccggagtttgaatccacctttgacaattgtccgaaagacgtttgaatcaacagaaaacccagatgacttcttgccctctgtaatgacttgtgtgaactatcttaagttgccggactattcaagcattgagataatgcgtgaaaaactgttgatagcagcaagagaagggcagcagtcgttccatctttcctgatcatagcaagaaatgcagtgtctgcctgttacagcaaaagaaacaaatcatgatttcttttctaatgttatcacctgagtcaaggaaacatgttacgccttcttgttgtagga

SEQ ID NO: 191231 - DNA, 5355 bp, Homo sapiens
  Payload ID: 17774
  Gene Name: thyroid hormone receptor interactor 12
  Uniprot ID: Q14669
  ENST ID: ENST00000389045
  CDS Start-End: 74-5242
ccggagactttggggcctaactagtgaatggtagtgtctagaaagggtatgtcccttcaagagagaggtgccaatgtccaaccggcctaataacaatccaggggggtcactgcgacgttcacagaggaacactgccggggcccaaccacaagacgactcaataggaggaagtcggcgaggctctggcctgggcaaaagaggagcagctgaagctcgtcgacaggagaaaatggcagaccctgaaagcaaccaggaggcagtaaattcttcagctgctcggacagatgaagctccccaaggagctgcagcctctagttctgttgcaggggctgttggcatgaccacctctggggagagtgaatcagatgattccgagatgggacgtttgcaagctttgttagaggcaaggggtcttccccctcacctatttggtcctcttggtcctcggatgtcacagcttttccatagaacaattggaagtggagctagttctaaggcccagcagctactacaaggattgcaagccagtgatgaaagtcaacagcttcaggcagttattgagatgtgtcagttactggtcatgggaaatgaggagacactgggagggtttcctgtcaagagtgttgttccagctttgattacgttacttcagatggagcacaattttgatattatgaaccatgcttgtcgagccttaacatacatgatggaagcacttcctcgatcttctgctgttgtagtagatgctattcctgtctttttagaaaagctgcaagttattcagtgtattgatgtggcagagcaggccttgactgccttggagatgttgtcacggagacatagtaaagccattctacaggcgggtggtttggcagactgcttgctgtacctagaattcttcagcataaatgcccaaagaaatgcattagcaattgcagctaattgctgccagagtatcacgccagatgaatttcattttgtggcagattcactcccattgctaacccaaaggctaacacatcaggataaaaagtcagtagaaagcacttgcctttgttttgcacgcctagtggacaacttccagcatgaggagaatttactccagcaggttgcttccaaagatctgcttacaaatgttcaacagctgttggtagtgactccacccattttaagttctgggatgtttataatggtggttcgcatgttttctctgatgtgttccaactgtccaactttagctgttcaacttatgaaacaaaacattgcagaaacgcttcactttctcctgtgtggtgcctccaatggaagttgtcaggaacagattgatcttgttccacgaagccctcaagagttgtatgaactgacatctctgatttgtgaacttatgccatgtttaccaaaagaaggcatttttgcagttgataccatgttgaagaagggaaatgcacagaacacagatggtgcgatatggcagtggcgtgatgatcggggcctctggcatccatataacaggattgacagccggatcattgaggcagcccatcaggtcggtgaggatgagataagcttgtccactctgggacgagtttatactattgattttaattctatgcagcaaatcaatgaggacacgggaacagcacgtgccattcagagaaaacctaacccgttagccaatagtaacactagtggatattcagagtcaaagaaggatgatgctcgagcacagcttatgaaagaggatccggaactggctaagtcttttattaagacattatttggtgttctttatgaagtgtatagttcctcagcaggacctgcggtcagacataagtgccttagagcaattcttaggataatttattttgcggatgctgaacttctgaaggatgttctgaaaaatcatgctgtttcaagtcacattgcttccatgctgtcaagccaagacctgaagatagtagtgggagcacttcagatggcagaaattttaatgcagaagttacctgatatttttagtgtttacttcagaagagaaggtgtaatgcatcaagtaaaacacttagcagaatcagagtctttgttgacaagtccaccaaaggcatgtacgaatggatcgggatccatgggatccacaacttcagtcagcagtgggacagccacagctgccactcatgctgcagctgacttgggatcacccagcttgcagcacagcagggatgattctttagatctcagccctcaaggtcgattaagtgatgttctaaagagaaaacgactgccaaaacgagggccaagaaggccaaagtactcacctccaagagatgatgacaaagtagacaatcaagctaaaagccccaccactactcagtcacctaaatcttctttcctggcaagcttgaatccaaaaacatggggaaggttaagtacacagtccaacagcaacaacattgagccagcacggactgcgggaggtagtggccttgccagggctgcctcaaaggataccatctccaataatagagaaaaaattaaaggttggattaaggagcaggcacataaatttgtagaacgttatttcagttctgagaatatggatggaagcaaccctgcattgaatgtccttcagagactttgtgctgcaaccgaacaactcaacctccaggtggatggtggagctgagtgccttgtagaaatccgtagcatagtctcagagtcagatgtttcatcatttgaaatccaacatagtggatttgtgaagcagctgttgctttatttgacatctaaaagtgaaaaggatgctgtgagcagagagatcagattaaagcgatttcttcatgtatttttttcttctccacttcctggagaagagcccattggaagagtggaaccagtgggtaatgcacctttgttggcattagttcacaagatgaacaactgcctcagccagatggaacaatttccagtcaaagtacatgatttccctagtggaaatgggacaggaggcagcttttctctcaacagaggatcacaggctttaaaatttttcaacacacatcaattaaaatgccagttacaaaggcatccagactgtgcaaatgtgaagcagtggaagggtggacctgtcaagattgaccctctggctttggtacaagccatcgagagataccttgtagttagagggtatggaagagtaagagaagatgatgaagacagcgatgacgatggatcagatgaggaaatagatgagtctctggctgctcagttcctaaattcaggaaatgtaagacacaggctgcagttttatattggagaacatttgctgccgtataacatgactgtgtatcaggcagtacggcagtttagtatacaggctgaagatgaaagagaatccacagatgatgagagcaatcctctaggcagagctggtatttggacaaagactcatacaatatggtataaacctgtgagagaggatgaagaaagtaataaagattgtgttggtggtaaaagaggaagagcccaaacagctccaacgaaaacttcccctagaaatgcaaaaaagcatgatgagttatggcacgatggagtgtgcccatcagtatcaaatcctttagaagtttacctcattcccacaccacctgaaaatataacatttgaagacccgtcattagatgtgatccttcttttaagagttttacatgctatcagtcgatactggtattacttgtatgataatgcaatgtgcaaggaaattattccaactagtgaatttattaacagtaagttaacagcaaaagcaaataggcaacttcaagatcctttagtaatcatgacaggaaacatcccaacatggcttactgagctaggaaaaacctgcccatttttctttccttttgatacccggcaaatgcttttttatgtaactgcatttgatcgggaccgagcaatgcaaagattacttgataccaacccagaaatcaaccagtctgattctcaagatagcagagttgcacctagattggatagaaaaaaacgtactgtgaaccgagaggagctgctgaaacaggcggagtctgtgatgcaggacctcggcagctcacgggccatgttagaaatccagtatgaaaatgaggttggtacaggtcttgggcctacactggagttttatgcgcttgtatctcaggaactacagagagctgacttgggtctttggagaggtgaagaagtaactcttagcaatccaaaagggagccaagaagggaccaagtatattcaaaacctccagggcctgtttgcgcttccctttggtaggacagcaaagccagctcatatcgcaaaggttaagatgaagtttcgcttcttaggaaaattaatggccaaggctatcatggatttcagattggtggaccttccccttggcttacccttttataaatggatgctacggcaagaaacttcactgacatcacacgatttgtttgacatcgacccagttgtagccagatcagtttatcacctagaagacattgtcagacagaagaaaagacttgaacaagataaatcccagaccaaagagagtctacagtatgcattagaaaccttgactatgaatggctgctcagttgaagatctaggactggatttcactctgccagggtttcccaatatcgaactgaagaaaggagggaaggatataccagtcactatccacaatttagaggagtatctaagactggttatattctgggcactaaatgaaggcgtttctaggcaatttgattcgttcagagatggatttgaatcagtcttcccactcagtcatcttcagtacttctacccggaggaactggatcagctcctttgtggcagtaaagcagacacttgggatgcaaagacactgatggaatgctgtaggcctgatcatggttatactcatgacagtcgggctgtgaagtttttgtttgagattctcagtagttttgataatgagcagcagaggttatttctccagtttgtgactggtagcccaagattgcctgttggaggattccggagtttgaatccacctttgacaattgtccgaaagacgtttgaatcaacagaaaacccagatgacttcttgccctctgtaatgacttgtgtgaactatcttaagttgccggactattcaagcattgagataatgcgtgaaaaactgttgatagcagcaagagaagggcagcagtcgttccatctttcctgatcatagcaagaaatgcagtgtctgcctgttacagcaaaagaaacaaatcatgatttcttttctaatgttatcacctgagtcaaggaaacatgttacgccttcttgttgtagga

SEQ ID NO: 191232 - DNA, 1507 bp, Homo sapiens
  Payload ID: 17774
  Gene Name: thyroid hormone receptor interactor 12
  ENST ID: ENST00000409677
  CDS Start-End: 123-1415
gggggtggggggagctagtggaagttactgccgcgccaccgagtccggaccggagactttggggcctaactagtgaatggtagtgtctagaaagggtatgtcccttcaagagagaggtgccaatgtccaaccggcctaataacaatccaggggggtcactgcgacgttcacagaggaacactgccggggcccaaccacaagacgactcaataggaggaaggtcacatttagggcaggcaaaacataagggatatagccctcctgagagtagaaaatctaattctaaggcacccaaagtgcagtctaatactacttctgaactgtcaaggggacacctttctaaaagaagctgcagttcatcatctgctgtgatagttccacaaccagaggatccagacagagccaatacttcagaaagacaaaaaacggggcaggtgcctaagaaagacaattctcgaggagtgaagcgcagtgctagtccagactacaacaggaccaattctcctagctctgcaaaaaaaccaaaagcacttcagcatactgaatctccctcagaaacaaataagccacatagtaagtcaaagaagagacatttagaccaggagcaacaactgaaatctgcacaatcaccatcaacaagcaaggctcataccaggaagagtggggccactggcggttcacggagtcagaaaagaaaaaggacagagagttcttgtgtaaagagtggctccgggtctgaatcaactggtgcagaagagagatctgcgaaacctaccaagctggcttcaaaatcagccacctcagccaaagctgggtgtagcaccatcactgattcttcttctgctgcctctacttcctcctcgtcttctgctgtagcctcggcctcctccactgtaccaccaggtgccagagtgaaacaaggaaaagatcagaacaaggccaggcgttcccgttcagcgtccagtcccagccccagaagaagtagcagggaaaaggaacagagtaaaactggtggctcttcaaaatttgattgggctgctcgtttcagccctaaagttagccttcctaaaacaaaactgtctcttccagggtcttctaagtcagagacatcaaaacctggaccttctggattacaggccaaattagcaagtttaagaaaatctacgaagaaacgcagtgagtctccacctgctgagctccccagtttgaggcggagcacacgccaaaagaccacgggctcctgtgctagtaccagtcggcgaggctctggcctgggcaaaagaggagcagctgaagctcgtcgacaggagaaaatggcagaccctgaaagcaaccaggaggcagtaaattcttcagctgctcggacagatgaagctccccaaggagctgcagaagagggattcaggacatcttaattaaagaacagtttcaacggcacaagaaatttgtcaaaagccacatataaatgaaaaacaagcataaaaatacaacctttttaatactaaaa

SEQ ID NO: 191233 - DNA, 719 bp, Homo sapiens
  Payload ID: 17774
  Gene Name: thyroid hormone receptor interactor 12
  ENST ID: ENST00000430954
  CDS Start-End: 149-719
gcggccgcggccggagggaccggggcctggcgggaggtaggggtcgctgggtccctcctccggcttcccgcaatgaggagggcccttcacagaaccgggtgaatggtagtgtctagaaagggtatgtcccttcaagagagaggtgccaatgtccaaccggcctaataacaatccaggggggtcactgcgacgttcacagaggaacactgccggggcccaaccacaagacgactcaataggaggaaggtcacatttagggcaggcaaaacataagggatatagccctcctgagagtagaaaatctaattctaaggcacccaaagtgcagtctaatactacttctgaactgtcaaggggacacctttctaaaagaagctgcagttcatcatctgctgtgatagttccacaaccagaggatccagacagagccaatacttcagaaagacaaaaaacggggcaggtgcctaagaaagacaattctcgaggagtgaagcgcagtgctagtccagactacaacaggaccaattctcctagctctgcaaaaaaaccaaaagcacttcagcatactgaatctccctcagaaacaaataagccacatagtaagtcaaagaagagacatttagaccaggagcaacaactgaaatctgcacaatcaccatcaacaagcaaggctcataccaggaagagtggggccactggcggttcacggagtcagaaaa

SEQ ID NO: 191234 - DNA, 652 bp, Homo sapiens
  Payload ID: 17774
  Gene Name: thyroid hormone receptor interactor 12
  ENST ID: ENST00000453485
  CDS Start-End: 1-652
agcaaggctcataccaggaagagtggggccactggcggttcacggagtcagaaaagaaaaaggacagagagttcttgtgtaaagagtggctccgggtctgaatcaactggtgcagaagagagatctgcgaaacctaccaagctggcttcaaaatcagccacctcagccaaagctgggtgtagcaccatcactgattcttcttctgctgcctctacttcctcctcgtcttctgctgtagcctcggcctcctccactgtaccaccaggtgccagagtgaaacaaggaaaagatcagaacaaggccaggcgttcccgttcagcgtccagtcccagccccagaagaagtagcagggaaaaggaacagaggtcttctaagtcagagacatcaaaacctggaccttctggattacaggccaaattagcaagtttaagaaaatctacgaagaaacgcagtgagtctccacctgctgagctccccagtttgaggcggagcacacgccaaaagaccacgggctcctgtgctagtaccagtcggcgaggctctggcctgggcaaaagaggagcagctgaagctcgtcgacaggagaaaatggcagaccctgaaagcaaccaggaggcagtaaattcttcagctgctcggacagatgaagctc

SEQ ID NO: 191235 - DNA, 562 bp, Homo sapiens
  Payload ID: 17774
  Gene Name: thyroid hormone receptor interactor 12
  ENST ID: ENST00000418123
  CDS Start-End: 1-562
ttaatggccaaggctatcatggatttcagattggtggaccttccccttggcttacccttttataaatggatgctacggcaagaaacttcactgacatcacacgatttgtttgacatcgacccagttgtagccagatcagtttatcacctagaagacattgtcagacagaagaaaagacttgaacaagataaatcccagaccaaagagagtctacagtatgcattagaaaccttgactatgaatggctgctcagttgaagatctaggactggatttcactctgccagggtttcccaatatcgaactgaagaaaggagggaaggatataccagtcactatccacaatttagaggagtatctaagactggatcagctcctttgtggcagtaaagcagacacttgggatgcaaagacactgatggaatgctgtaggcctgatcatggttatactcatgacagtcgggctgtgaagtttttgtttgagattctcagtagttttgataatgagcagcagaggttatttctccagtttgtgactggtagcccaagattgcctgttggag

SEQ ID NO: 191236 - DNA, 603 bp, Homo sapiens
  Payload ID: 17774
  Gene Name: thyroid hormone receptor interactor 12
  ENST ID: ENST00000435716
  CDS Start-End: 142-603
gtcattatgggtggggctgaagcgcagagcagctgaaacatttttataccaccacccgcacactttcaatgggatagaagggactccaaaagtgaatggtagtgtctagaaagggtatgtcccttcaagagagaggtgccaatgtccaaccggcctaataacaatccaggggggtcactgcgacgttcacagaggaacactgccggggcccaaccacaagacgactcaataggaggaagaagctgcagttcatcatctgctgtgatagttccacaaccagaggatccagacagagccaatacttcagaaagacaaaaaacggggcaggtgcctaagaaagacaattctcgaggagtgaagcgcagtgctagtccagactacaacaggaccaattctcctagctctgcaaaaaaaccaaaagcacttcagcatactgaatctccctcagaaacaaataagccacatagtaagtcaaagaagagacatttagaccaggagcaacaactgaaatctgcacaatcaccatcaacaagcaaggctcataccaggaagagtggggccactggcggttcacggagtcagaaaagaaaaaggacagagagt

SEQ ID NO: 191237 - DNA, 584 bp, Homo sapiens
  Payload ID: 17774
  Gene Name: thyroid hormone receptor interactor 12
  ENST ID: ENST00000428959
  CDS Start-End: 138-584
aaatggaaactaggaagcagctccagtgacaacagttgtgggaagcgagggtcagagaagggagaggccagagagactttagaccgcatgaatggtagtgtctagaaagggtatgtcccttcaagagagaggtgccaatgtccaaccggcctaataacaatccaggggggtcactgcgacgttcacagaggaacactgccggggcccaaccacaagacgactcaataggaggaagaagctgcagttcatcatctgctgtgatagttccacaaccagaggatccagacagagccaatacttcagaaagacaaaaaacggggcaggtgcctaagaaagacaattctcgaggagtgaagcgcagtgctagtccagactacaacaggaccaattctcctagctctgcaaaaaaaccaaaagcacttcagcatactgaatctccctcagaaacaaataagccacatagtaagtcaaagaagagacatttagaccaggagcaacaactgaaatctgcacaatcaccatcaacaagcaaggctcataccaggaagagtggggccactggcggttcacggagtcagaaaaga

SEQ ID NO: 191238 - DNA, 2672 bp, Homo sapiens
  Payload ID: 17775
  Gene Name: thyroid hormone receptor interactor 13
  Uniprot ID: Q15645
  ENST ID: ENST00000166345
  CDS Start-End: 357-1655
gtgcttcttgcccatggcggcgccggcggcgggcccgaggcgggggctgggaacagctggcacccggtcggaccttggccgccaccgccccctggccctggctggccgcccgcgctcgctgcgccgaggttgccgagctcgctgggccgcgccggaaacggggcgaggcggggccgcggcaggaagtggccctgccgggcccgagcgcttccgggtcaggaggtggtgcgcctcgcgcggcagattcgaagctagggcggggcccgcgggctgaggcagcggctgtggcggcgacgctgggcgtgaggtggcggcggccgcgccctggttgggtccccactgctctcgggggcgccatggacgaggccgtgggcgacctgaagcaggcgcttccctgtgtggccgagtcgccaacggtccacgtggaggtgcatcagcgcggcagcagcactgcaaagaaagaagacataaacctgagtgttagaaagctactcaacagacataatattgtgtttggtgattacacatggactgagtttgatgaaccttttttgaccagaaatgtgcagtctgtgtctattattgacacagaattaaaggttaaagactcacagcccatcgatttgagtgcatgcactgttgcacttcacattttccagctgaatgaagatggccccagcagtgaaaatctggaggaagagacagaaaacataattgcagcaaatcactgggttctacctgcagctgaattccatgggctttgggacagcttggtatacgatgtggaagtcaaatcccatctcctcgattatgtgatgacaactttactgttttcagacaagaacgtcaacagcaacctcatcacctggaaccgggtggtgctgctccacggtcctcctggcactggaaaaacatccctgtgtaaagcgttagcccagaaattgacaattagactttcaagcaggtaccgatatggccaattaattgaaataaacagccacagcctcttttctaagtggttttcggaaagtggcaagctggtaaccaagatgtttcagaagattcaggatttgattgatgataaagacgccctggtgttcgtgctgattgatgaggtggagagtctcacagccgcccgaaatgcctgcagggcgggcaccgagccatcagatgccatccgcgtggtcaatgctgtcttgacccaaattgatcagattaaaaggcattccaatgttgtgattctgaccacttctaacatcaccgagaagatcgacgtggccttcgtggacagggctgacatcaagcagtacattgggccaccctctgcagcagccatcttcaaaatctacctctcttgtttggaagaactgatgaagtgtcagatcatataccctcgccagcagctgctgaccctccgagagctagagatgattggcttcattgaaaacaacgtgtcaaaattgagccttcttttgaatgacatttcaaggaagagcgagggcctcagcggccgggtcctgagaaaactcccctttctggctcatgcgctgtatgtccaggcccccaccgtcaccatagaggggttcctccaggccctgtctctggcagtggacaagcagtttgaagagagaaagaagcttgcagcttacatctgatcctgggcttccccatctggtgcttttcccatggagaacacacaaccagtaagtgaggttgccccacacagccgtctcccagggaatcccttctgcaaaccaaacgttacttagactgcaagctagaaagccaccaaggccaggctttgttaaaagaagtgtattctatttatgttgttttaaaatgcatactgagagacaaacatcttgtcattttcactgtttgtaaaagataattcagattgtttgtctccttgtgaagaaccatcgaaacctgtttgttcccagcccacccccagtggatgggatgcataatgccagcaagttttgtttaacagcaaaaaaggaagattaatgcaggtgttatagaagccagaagagaaactgtgtcaccctaaagaagcatataatcatagcattaaaaatgcacacattactccaggtggaaggtggcaattgctttctgatatcagctcgtttgatttagtgcaaaaatgttttcaagactatttaatggatgtaaaaaagcctatttctacattataccaactgagaaaaaaatggtcggtaaagtgttctttcataataaataatcagacatggtcccatttgcaggaaaagtgcagactctgagtgttccagggaaacacatgctggacatcccttgtaacccggtatgggcgcccctgcattgctgggatgtttctgcccacggttttgtttgtgcaataacgttatcacatttctaatgaggattcacattaatataatataaaataaataggtcagttactggtctctttctccgaatgttatgttttgcttttatctcacagtaaaataaatataattaatggtttgcatgtgaaattcacttttgaaagaacatgttaccttaccttttgttttagaagttttcaagtattaaaatattttttagaattttcttgttttgattctaagtatctcttccaagtgcttttaattttactaaaaattactcacatgattacttaa

SEQ ID NO: 191239 - DNA, 746 bp, Homo sapiens
  Payload ID: 17775
  Gene Name: thyroid hormone receptor interactor 13
  ENST ID: ENST00000513435
  CDS Start-End: 1-746
ctggagtggggggaactcagcggcggggccagaccttcacagaccctccttatgtccacggagggtggattgaggtcagcactgcaaagaaagaagacataaacctgagtgttagaaagctactcaacagacataatattgtgtttggtgattacacatggactgagtttgatgaaccttttttgaccagaaatgtgcagtctgtgtctattattgacacagaattaaaggttaaagactcacagcccatcgatttgagtgcatgcactgttgcacttcacattttccagctgaatgaagatggccccagcagtgaaaatctggaggaagagacagaaaacataattgcagcaaatcactgggttctacctgcagctgaattccatgggctttgggacagcttggtatacgatgtggaagtcaaatcccatctcctcgattatgtgatgacaactttactgttttcagacaagaacgtcaacagcaacctcatcacctggaaccgggtggtgctgctccacggtcctcctggcactggaaaaacatccctgtgtaaagcgttagcccagaaattgacaattagactttcaagcaggtaccgatatggccaattaattgaaataaacagccacagcctcttttctaagtggttttcggaaagtggcaagctggtaaccaagatgtttcagaagattcaggatttgattgatgataaagacgccctggtgttcgtgctgattgatgag

SEQ ID NO: 191240 - DNA, 2045 bp, Homo sapiens
  Payload ID: 17776
  Gene Name: thyroid hormone receptor interactor 4
  Uniprot ID: Q15650
  ENST ID: ENST00000261884
  CDS Start-End: 61-1806
ggaactagtccggtgcaggacgtggggcttttgcagctcagctggttccggctggggaagatggcggtggctggggcggtgtccggggagccgctggtgcactggtgcacccagcagttgcggaagactttcggcctggatgtcagcgaggagatcattcagtacgttttgtcaattgagagtgctgaagagatacgagaatatgttactgatctcctccagggaaatgaaggcaaaaaaggtcaattcatagaagaacttataaccaaatggcaaaagaatgatcaggagttgatttcggatcctttgcagcagtgcttcaaaaaagatgaaattttagatgggcagaaatcaggcgaccatctaaagcggggtaggaagaaagggagaaacagacaggaagttcctgcatttactgaacctgacacgactgcagaggttaaaacaccttttgatttggccaaggcacaagagaacagcaactccgtaaagaagaagacaaagtttgtcaatttatacacaagagagggacaggacaggcttgcagtcctgctccctggtcgtcacccttgtgattgcctgggccagaagcacaagctcatcaataactgtctgatctgtgggcgcattgtctgtgaacaagaaggctcaggcccttgcttattctgtggcactctggtgtgtactcatgaggaacaagatattttacagcgtgactcaaacaagagccagaaactgctaaagaaactcatgtcaggagtggagaattctggaaaggtggacatctctaccaaggaccttcttcctcatcaagaattgcgaattaagtctggtctggagaaggctatcaagcataaagacaaactgttagagtttgacagaactagtattcgaaggacccaagtcattgatgatgagtcagattactttgccagtgattctaaccaatggttgtccaaacttgagcgggaaaccttgcagaagcgagaggaggagctgagagaacttcgacacgcctctcgactttctaagaaggtcaccattgactttgcaggaaggaagatcctggaagaagaaaattcactagcagagtatcatagcagactagatgagacaatacaggccattgccaatggaaccttgaaccagccactgaccaaattggatagatcttctgaagagcctttgggagttctggtaaatcccaacatgtaccagtcccctccccagtgggttgaccacacaggtgcagcctcacagaagaaggctttccgttcttcaggatttggactagagttcaactcatttcagcaccagttgcgaatccaggatcaagaatttcaggaaggctttgatggtggctggtgcctctctgtacatcagccctgggcttctctgcttgtcagagggattaaaagggtggagggcagatcctggtacaccccccacagaggacgactttggatagcagccacagctaaaaaaccctcccctcaagaagtctcagaactccaggctacatatcgtcttcttcgtgggaaagatgtggaatttcctaatgactatccgtcaggttgtcttctgggctgtgtggacctaattgactgcttgtcccagaagcaatttaaggagcagtttccagacatcagtcaagagtctgattctccatttgttttcatctgcaaaaatcctcaggaaatggttgtgaagtttcctattaaaggaaatccaaaaatctggaaattggattccaagatccatcaaggagcaaagaaggggttaatgaagcagaataaagctgtctgacccaggagaaaaggaactatacagcatagtggagttttgtgtactaaaattgctatctactggtcctttggaattgaagtagtagaaacctaaaggcttggcgtcaggcttgaatatctcagaacttaaactcttaccaaaatctgtatatttttcttaaggagtgggattcctactttatgtaatggggtcgaaatctttgaacacattatttataaaaacctgtttaaaaattctaa

SEQ ID NO: 191241 - DNA, 847 bp, Homo sapiens
  Payload ID: 17776
  Gene Name: thyroid hormone receptor interactor 4
  ENST ID: ENST00000558820
  CDS Start-End: 10-141
ctggggaagatggcggtggctggggcggtgtccggggagccgctggtgcactggtgcacccagcagttgcggaagactttcggcctggatgtcagcgaggagatcattcaggaaatgaaggcaaaaaaggtcaattcatagaagaacttataaccaaatggcaaaagaatgatcaggagttgatttcggatcctttgcagcagtgcttcaaaaaagatgaaattttagatgggcagaaatcaggcgaccatctaaagcggggtaggaagaaagggagaaacagacaggaagttcctgcatttactgaacctgacacgactgcagaggttaaaacaccttttgatttggccaaggcacaagagaacagcaactccgtaaagaagaagacaaagtttgtcaatttatacacaagagagggacaggacaggcttgcagtcctgctccctggtcgtcacccttgtgattgcctgggccagaagcacaagctcatcaataactgtctgatctgtgggcgcattgtctgtgaacaagaaggctcaggcccttgcttattctgtggcactctggtgtgtactcatgaggaacaagatattttacagcgtgactcaaacaagagccagaaactgctaaagaaactcatgtcaggagtggagaattctggaaaggtggacatctctaccaaggaccttcttcctcatcaagaattgcgaattaagtctggtctggagaaggctatcaagcataaagacaaactgttagagtttgacagaactagtattcgaaggacccaagtcattgatgatgagtcagattactttgccagtgattctaaccaatggttgtccaa

SEQ ID NO: 191242 - DNA, 558 bp, Homo sapiens
  Payload ID: 17776
  Gene Name: thyroid hormone receptor interactor 4
  ENST ID: ENST00000558162
  CDS Start-End: 1-334
ctcagaactccaggctacatatcgtcttcttcgtgggaaagatgtggaatttcctaatgactatccgtcaggttgtcttctgggctgtgtggacctaattgactgcttgtcccagaagcaatttaaggagcagtttccagacatcagtcaagagtctgattctccatttgttttcatctgcaaaaatcctcaggaaatggttgtgaagtttcctattaaaggaaatccaaaaatctgcagcctagaggatgaaagaacgtctgaattcctgggaatatcctggaaatccttgttcctcttgtatcttgtttctcctattagctttccattttagacatcatcattgaagccagagattagtctgcctacaattgagtgttttattctgatgggttgatcttacctgagctggtctcacttgagggctttcataatcatactggagtttcctgaaacgtaaaataggaatgttctcattcagtaaagctttaagaatgtgaagaaaatgatatgtctttttttcttatgaagaatctgaaataaataataattaaaaga

SEQ ID NO: 191243 - DNA, 1536 bp, Homo sapiens
  Payload ID: 17776
  Gene Name: thyroid hormone receptor interactor 4
  ENST ID: ENST00000560567
  CDS Start-End: 6-1112
ggaagatggcggtggctggggcggtgtccggggagccgctggtgcactggtgcacccagcagttgcggaagactttcggcctggatgtcagcgaggagatcattcagtacgttttgtcaattgagagtgctgaagagatacgagaatatgttactgatctcctccagggaaatgaaggcaaaaaaggtcaattcatagaagaacttataaccaaatggcaaaagaatgatcaggagttgatttcggatcctttgcagcagtgcttcaaaaaagatgaaattttagatgggcagaaatcaggcgaccatctaaagcggggtaggaagaaagggagaaacagacaggaagttcctgcatttactgaacctgacacgactgcagaggttaaaacaccttttgatttggccaaggcacaagagaacagcaactccgtaaagaagaagacaaagtttgtcaatttatacacaagagagggacaggacaggcttgcagtcctgctccctggtcgtcacccttgtgattgcctgggccagaagcacaagctcatcaataactgtctgatctgtgggcgcattgtctgtgaacaagaaggctcaggcccttgcttattctgtggcactctggtgtgtactcatgaggaacaagatattttacagcgtgactcaaacaagagccagaaactgctaaagaaactcatgtcaggagtggagaattctggaaaggtggacatctctaccaaggaccttcttcctcatcaagaattgcgaattaagtctggtctggagaaggctatcaagcataaagacaaactgttagagtttgacagaactagtattcgaaggacccaagtcattgatgatgagtcagattactttgccagtgattctaaccaatggttgtccaaacttgagcgggaaaccttgcagaagcgagaggaggagctgagagaacttcgacacgcctctcgactttctaagaaggtcaccattgactttgcaggaaggaagatcctggaagaagaaaattcactagcagagtatcatagcagtgggttgaccacacaggtgcagcctcacagaagaaggctttccgttcttcaggatttggactagagttcaactcatttcagcaccagttgcgaatccaggatcaagaatttcaggaaggctttgatggtggctggtgcctctctgtacatcagccctgggcttctctgcttgtcagagggattaaaagggtggagggcagatcctggtacaccccccacagaggacgactttggatagcagccacagctaaaaaaccctcccctcaagaagtctcagaactccaggctacatatcgtcttcttcgtgggaaaggtaacagccgcatattctcctttcaattttactttatggagagaagtcattgacgttcatcttctttcacttccttctttctttggctttttctttgttaaaagagacttttaatctttgtatatgtttgtttgtttagtggtaaatcattgacagcgttcaaagcattaatctg

SEQ ID NO: 191244 - DNA, 565 bp, Homo sapiens
  Payload ID: 17776
  Gene Name: thyroid hormone receptor interactor 4
  ENST ID: ENST00000560920
  CDS Start-End: 3-383
agatggcggtggctggggcggtgtccggggagccgctggtgcactggtgcacccagcagttgcggaagactttcggcctggatgtcagcgaggagatcattcagtacgttttgtcaattgagagtgctgaagagatacgagaatatgttactgatctcctccagggaaatgaaggcaaaaaaggtcaattcatagaagaacttataaccaaatggcaaaagaatgatcaggagttgatttcggatcctttgcagcagtgcttcaaaaaagatggcacaagagaacagcaactccgtaaagaagaagacaaagtttgtcaatttatacacaagagagggacaggacaggcttgcagtcctgctccctggtcgtcacccttgtgattgcctgggccagaagcacaagctcatcaataactgtctgatctgtgggcgcattgtctgtgaacaagaaggctcaggcccttgcttattctgtggcactctggtgtgtactcatgaggaacaagatattttacagcgtgactcaaacaagagccagaaactgctaaagaaactcatgtcag

SEQ ID NO: 191245 - DNA, 521 bp, Homo sapiens
  Payload ID: 17776
  Gene Name: thyroid hormone receptor interactor 4
  ENST ID: ENST00000560475
  CDS Start-End: 1-184
ggagctgagagaacttcgacacgcctctcgactttctaagaaggtcaccattgactttgcaggaaggaagatcctggaagaagaaaattcactagcagagtatcatagcagtttccagacatcagtcaagagtctgattctccatttgttttcatctgcaaaaatcctcaggaaatggttgtgaagtttcctattaaaggaaatccaaaaatctggaaattggattccaagatccatcaaggagcaaagaaggggttaatgaagcagaataaagctgtctgacccaggagaaaaggaactatacagcatagtggagttttgtgtactaaaattgctatctactggtcctttggaattgaagtagtagaaacctaaaggcttggcgtcaggcttgaatatctcagaacttaaactcttaccaaaatctgtatatttttcttaaggagtgggattcctactttatgtaatggggtcgaaatctttgaacacattatttataaaaacctgtttaaaaattctaa

SEQ ID NO: 191246 - DNA, 1942 bp, Homo sapiens
  Payload ID: 17777
  Gene Name: thyroid hormone receptor interactor 6
  Uniprot ID: Q15654
  ENST ID: ENST00000200457
  CDS Start-End: 361-1791
cggggcccggacgcatccgtggacttggaggctggctcgggcccgcacctcccatccccagctgcccgcaacccccagtgactcgggatcccccggagagccctcccctctcggcaggagggggctgactcagggagaaatggcagtttagggcctagggggccacgtgaccctcccccaggaatgtggtgacgtcatcggaggcgtggtcgtccccaaaattagggaggaagaggaaaaaaaaaagccagaaaaagttttcttttctggagtcccaaacgaggtgcgggacggaagagggggtgaaggccagaggctcggggcttcaagaccgctgtctggagtccccctttccaggccatgtcggggcccacctggctgcccccgaagcagccggagcccgccagagcccctcaggggagggcgatcccccgcggcaccccggggccaccaccggcccacggagcagcactccagccccaccccagggtcaatttttgcccccttccatctgagcagtgttaccaggccccagggggaccggaggatcgggggccggcgtgggtggggtcccatggagtactccagcacacgcaggggctccctgcagacagggggggccttcgccctggaagcctggacgccgagatagacttgctgagcagcacgctggccgagctgaatgggggtcggggtcatgcgtcacggcgaccagaccgacaggcatatgagcccccgccacctcctgcctaccgcacgggctccctgaagccaaatccagcctcgccgctcccagcgtctccctatgggggccccactccagcctcttacactaccgccagcaccccggctggcccagccttccccgtgcaagtgaaggtggcacagccagtgaggggctgcggcccacccaggcggggagcctctcaggcctctgggcccctcccgggcccccactttcctctcccaggccgaggtgaagtctgggggcctggctataggagccagagagagccagggccaggggccaaagaggaagctgctggggtctctggccctgcaggaagaggaagaggaggcgagcacgggccccaggtgcccctgagccagcctccagaggatgagctggataggctgacgaagaagctggttcacgacatgaaccacccgcccagcggggagtactttggccagtgtggtggctgcggagaagatgtggttggggatggggctggggttgtggcccttgatcgcgtctttcacgtgggctgctttgtatgttctacatgccgggcccagcttcgcggccagcatttctacgccgtggagaggagggcatattgcgagggctgctacgtggccaccctggagaaatgtgccacgtgctcccagcccatcctggaccggatcctgcgggctatggggaaggcctaccaccctggctgcttcacctgcgtggtgtgtcaccgcggcctcgacggcatccccttcacagtggatgctacgagccagatccactgcattgaggactttcacaggaagtttgccccaagatgctcagtgtgcggtggggccataatgcctgagccaggtcaggaggagactgtgagaattgttgctctggatcgaagttttcacattggctgttacaagtgcgaggagtgtgggctgctgctctcctctgagggcgagtgtcagggctgctacccgctggatgggcacatcttgtgcaaggcctgcagcgcctggcgcatccaggagctctcagccaccgtcaccactgactgctgagtcttcctagaagtacctgctgggttctcagttccagttcccatcctttgattgatcactctccctgacatccacctgtatgactttgtcaccaaatgctgtcttctctttctccaatcaagaaataataatccctcgagtttacaaaaca

SEQ ID NO: 191247 - DNA, 646 bp, Homo sapiens
  Payload ID: 17777
  Gene Name: thyroid hormone receptor interactor 6
  ENST ID: ENST00000429658
  CDS Start-End: 1-646
ctgctggggtctctggccctgcaggaagaggaagaggaggcgagcacgggccccaggtgcccctgagccagcctccagaggatgagctggataggctgacgaagaagctggttcacgacatgaaccacccgcccagcggggagtactttggccagtgtggtggctgcggagaagatgtggttggggatggggctggggttgtggcccttgatcgcgtctttcacgtgggctgctttgtatgttctacatgccgggcccagcttcgcggccagcatttctacgccgtggagaggagggcatattgcgagggctgctacgtgtctcgctctgttgcgcagactggagtgcagtggggtgatctctgctcactgcaacctcagcctgccctggttcaagcgattctcatgcctcaggctcccgagcagttgggattacaggccaccctggagaaatgtgccacgtgctcccagcccatcctggaccggatcctgcgggctatggggaaggcctaccaccctggctgcttcacctgcgtggtgtgtcaccgcggcctcgacggcatccccttcacagtggatgctacgagccagatccactgcattgaggactttcacaggaagtttgccccaagatgctcagtgtgcgg

SEQ ID NO: 191248 - DNA, 875 bp, Homo sapiens
  Payload ID: 17777
  Gene Name: thyroid hormone receptor interactor 6
  Uniprot ID: Q15654
  ENST ID: ENST00000437505
  CDS Start-End: 105-347
gttttcttttctggagtcccaaacgaggtgcgggacggaagagggggtgaaggccagaggctcggggcttcaagaccgctgtctggagtccccctttccaggccatgtcggggcccacctggctgcccccgaagcagccggagcccgccagagcccctcaggggagggcgatcccccgcggcaccccggggccaccaccggcccacggagcaggggctccctgcagacagggggggccttcgccctggaagcctggacgccgagatagacttgctgagcagcacgctggccgagctgaatgggggtcggggtcatgcgtcacggcgaccagaccgacaggcatatgagcccccgccacctcctgcctaccgcacgggctccctgaagccaaatccagcctcgccgctcccagcgtctccctatgggggccccactccagcctcttacactaccgccagcaccccggctggcccagccttccccgtgcaagtgaaggtggcacagccagtgaggggctgcggcccacccaggcggggagcctctcaggcctctgggcccctcccgggcccccactttcctctcccaggccgaggtgaagtctgggggcctggctataggagccagagagagccagggccaggggccaaagaggaagctgctggggtctctggccctgcaggaagaggaagaggaggcgagcacgggccccaggtgcccctgagccagcctccagaggatgagctggataggctgacgaagaagctggttcacgacatgaaccacccgcccagcggggagtactttggccagtgtggtggctgcggagaagatgtggttggggatggggctggggttgtggcccttgatcgcgtctt

SEQ ID NO: 191249 - DNA, 992 bp, Homo sapiens
  Payload ID: 17777
  Gene Name: thyroid hormone receptor interactor 6
  Uniprot ID: Q15654
  ENST ID: ENST00000417475
  CDS Start-End: 112-432
agaaaaagttttcttttctggagtcccaaacgaggtgcgggacggaagagggggtgaaggccagaggctcggggcttcaagaccgctgtctggagtccccctttccaggccatgtcggggcccacctggctgcccccgaagcagccggagcccgccagagcccctcaggggagggcgatcccccgcggcaccccggggccaccaccggcccacggagcagtgttaccaggccccagggggaccggaggatcgggggccggcgtgggtggggtcccatggagtactccagcacacgcaggggctccctgcagacagggggggccttcgccctggaagcctggacgccgagatagacttgctgagcagcacgctggccgagctgaatgggggtcggggtcatgcgtcacggcgaccagaccgacaggcatatgagcccccgccacctcctgcctaccgcacgggctccctgaagccaaatccagcctcgccgctcccagcgtctccctatgggggccccactccagcctcttacactaccgccagcaccccggctggcccagccttccccgtgcaagtgaaggtggcacagccagtgaggggctgcggcccacccaggcggggagcctctcaggcctctgggcccctcccgggcccccactttcctctcccaggccgaggtgaagtctgggggcctggctataggagccagagagagccagggccaggggccaaagaggaagctgctggggtctctggccctgcaggaagaggaagaggaggcgagcacgggccccaggtgcccctgagccagcctccagaggatgagctggataggctgacgaagaagctggttcacgacatgaaccacccgcccagcggggagtactttggccagtgtggtggctgcggagaagatgtggttggggatggggctggggttgtggcccttgatcgcgtctttcacgtgggctgctttgtatgttctacatgcc

SEQ ID NO: 191250 - DNA, 1303 bp, Homo sapiens
  Payload ID: 17777
  Gene Name: thyroid hormone receptor interactor 6
  Uniprot ID: Q15654
  ENST ID: ENST00000619988
  CDS Start-End: 1-243
atgtcggggcccacctggctgcccccgaagcagccggagcccgccagagcccctcaggggagggcgatcccccgcggcaccccggggccaccaccggcccacggagcaggggctccctgcagacagggggggccttcgccctggaagcctggacgccgagatagacttgctgagcagcacgctggccgagctgaatgggggtcggggtcatgcgtcacggcgaccagaccgacaggcatatgagcccccgccacctcctgcctaccgcacgggctccctgaagccaaatccagcctcgccgctcccagcgtctccctatgggggccccactccagcctcttacactaccgccagcaccccggctggcccagccttccccgtgcaagtgaaggtggcacagccagtgaggggctgcggcccacccaggcggggagcctctcaggcctctgggcccctcccgggcccccactttcctctcccaggccgaggtgaagtctgggggcctggctataggagccagagagagccagggccaggggccaaagaggaagctgctggggtctctggccctgcaggaagaggaagaggaggcgagcacgggccccaggtgcccctgagccagcctccagaggatgagctggataggctgacgaagaagctggttcacgacatgaaccacccgcccagcggggagtactttggccagtgtggtggctgcggagaagatgtggttggggatggggctggggttgtggcccttgatcgcgtctttcacgtgggctgctttgtatgttctacatgccgggcccagcttcgcggccagcatttctacgccgtggagaggagggcatattgcgagggctgctacgtggccaccctggagaaatgtgccacgtgctcccagcccatcctggaccggatcctgcgggctatggggaaggcctaccaccctggctgcttcacctgcgtggtgtgtcaccgcggcctcgacggcatccccttcacagtggatgctacgagccagatccactgcattgaggactttcacaggaagtttgccccaagatgctcagtgtgcggtggggccataatgcctgagccaggtcaggaggagactgtgagaattgttgctctggatcgaagttttcacattggctgttacaagtgcgaggagtgtgggctgctgctctcctctgagggcgagtgtcagggctgctacccgctggatgggcacatcttgtgcaaggcctgcagcgcctggcgcatccaggagctctcagccaccgtcaccactgactgctga

SEQ ID NO: 191251 - DNA, 1163 bp, Homo sapiens
  Payload ID: 17777
  Gene Name: thyroid hormone receptor interactor 6
  ENST ID: ENST00000629911
  CDS Start-End: 147-1163
cccaaaattagggaggaagaggaaaaaaaaaagccagaaaaagttttcttttctggagtcccaaacgaggtgcgggacggaagagggggtgaaggccagaggctcggggcttcaagaccgctgtctggagtccccctttccaggccatgtcggggcccacctggctgcccccgaagcagccggaggatcgggggccggcgtgggtggggtcccatggagtactccagcacacgcaggggctccctgcagacagggggggccttcgccctggaagcctggacgccgagatagacttgctgagcagcacgctggccgagctgaatgggggtcggggtcatgcgtcacggcgaccagaccgacaggcatatgagcccccgccacctcctgcctaccgcacgggctccctgaagccaaatccagcctcgccgctcccagcgtctccctatgggggccccactccagcctcttacactaccgccagcaccccggctggcccagccttccccgtgcaagtgaaggtggcacagccagtgaggggctgcggcccacccaggcggggagcctctcaggcctctgggcccctcccgggcccccactttcctctcccaggccgaggtgaagtctgggggcctggctataggagccagagagagccagggccaggggccaaagaggaagctgctggggtctctggccctgcaggaagaggaagaggaggcgagcacgggccccaggtgcccctgagccagcctccagaggatgagctggataggctgacgaagaagctggttcacgacatgaaccacccgcccagcggggagtactttggccagtgtggtggctgcggagaagatgtggttggggatggggctggggttgtggcccttgatcgcgtctttcacgtgggctgctttgtatgttctacatgccgggcccagcttcgcggccagcatttctacgccgtggagaggagggcatattgcgagggctgctacgtggtgagtggctggggctgggaggagggagtcagtggctggatgcagggggcttccatccaaggtggtaacagcgtccaagaccaaaggaggaacggtgctaaaagccaggcgactgaaagtgatgtacaaacagggcggaattctgcaagtatcaagcaagtagct

SEQ ID NO: 191252 - DNA, 2538 bp, Homo sapiens
  Payload ID: 17778
  Gene Name: thyroid hormone receptor, alpha
  Uniprot ID: P10827
  ENST ID: ENST00000264637
  CDS Start-End: 581-2053
gaggcggcctgcagggagcagccgcgagccggccgggcgcgccgagcccgagccccagccggagcggggcgggggagggaggagccagagcggccgccgcctctgccggaggagccgcggggccgccacactcgccccccgccccccccgcgctcactcgcactcacacccgggcgcaggaggcgggcggcccgggccccaccggccccccatggacgcccccagcacggggcgctgagacccccgcgtcgctgcccagcccggtccggcgcgccacgccgagggatctctggacaggacaagactccgaagctactcccccagcacacagcccgggacccacaaacccagcttgcccccagccctcccacctgccactccctggcccctcccaccgcccgccccccttggggcgcagggcatggtgtgaaaggccaagtgctgaggcgggtatcatgggtgctgtgccctagggcctgggtggcagggggtgggtggcctgtgggtgtgccgggggggccagtgtgcccaccccagtctcttggcgtgctggagggcatcctggatggaattgaagtgaatggaacagaagccaagcaaggtggagtgtgggtcagacccagaggagaacagtgccaggtcaccagatggaaagcgaaaaagaaagaacggccaatgttccctgaaaaccagcatgtcagggtatatccctagttacctggacaaagacgagcagtgtgtcgtgtgtggggacaaggcaactggttatcactaccgctgtatcacttgtgagggctgcaagggcttctttcgccgcacaatccagaagaacctccatcccacctattcctgcaaatatgacagctgctgtgtcattgacaagatcacccgcaatcagtgccagctgtgccgcttcaagaagtgcatcgccgtgggcatggccatggacttggttctagatgactcgaagcgggtggccaagcgtaagctgattgagcagaaccgggagcggcggcggaaggaggagatgatccgatcactgcagcagcgaccagagcccactcctgaagagtgggatctgatccacattgccacagaggcccatcgcagcaccaatgcccagggcagccattggaaacagaggcggaaattcctgcccgatgacattggccagtcacccattgtctccatgccggacggagacaaggtggacctggaagccttcagcgagtttaccaagatcatcaccccggccatcacccgtgtggtggactttgccaaaaaactgcccatgttctccgagctgccttgcgaagaccagatcatcctcctgaaggggtgctgcatggagatcatgtccctgcgggcggctgtccgctacgaccctgagagcgacaccctgacgctgagtggggagatggctgtcaagcgggagcagctcaagaatggcggcctgggcgtagtctccgacgccatctttgaactgggcaagtcactctctgcctttaacctggatgacacggaagtggctctgctgcaggctgtgctgctaatgtcaacagaccgctcgggcctgctgtgtgtggacaagatcgagaagagtcaggaggcgtacctgctggcgttcgagcactacgtcaaccaccgcaaacacaacattccgcacttctggcccaagctgctgatgaaggagagagaagtgcagagttcgattctgtacaagggggcagcggcagaaggccggccgggcgggtcactgggcgtccacccggaaggacagcagcttctcggaatgcatgttgttcagggtccgcaggtccggcagcttgagcagcagcttggtgaagcgggaagtctccaagggccggttcttcagcaccagagcccgaagagcccgcagcagcgtctcctggagctgctccaccgaagcggaattctccatgcccgagcggtctgtggggaagacgacagcagtgaggcggactccccgagctcctctgaggaggaaccggaggtctgcgaggacctggcaggcaatgcagcctctccctgaagccccccagaaggccgatggggaaggagaaggagtgccataccttctcccaggcctctgccccaagagcaggaggtgcctgaaagctgggagcgtgggctcagcagggctggtcacctcccatcccgtaagaccaccttcccttcctcagcaggccaaacatggccagactcccttgctttttgctgtgtagttccctctgcctgggatgcccttccccctttctctgcctggcaacatcttacttgtcctttgaggccccaactcaagtgtcacctccttccccagctcccccaggcagaaatagttgtctgtgcttccttggttcatgcttctactgtgacacttatctcactgttttataattagtcgggcatgagtctgtttcccaagctagactgtgtctgaatcatgtctgtatccccagtgcccggtgcagggcctggcatagagtaggtactccataaaaggtgtgttgaattgaa

SEQ ID NO: 191253 - DNA, 2260 bp, Homo sapiens
  Payload ID: 17778
  Gene Name: thyroid hormone receptor, alpha
  Uniprot ID: P10827
  ENST ID: ENST00000394121
  CDS Start-End: 557-2029
agcagattgttgggggaaatggctggtgacagagaatagaaagagcctatatggagaagggtgacgttggaaaagggaggcagtggatcggtattgatgttagaaatgagaggggagggaggtaacagggaatgaacccccacaaggatgaaaaacgtaagatgattgaagttaaaaggacatcaggggtcacctgcccagccctcgcagctgaagcttgaggaagctctgcccccgacagcagtggcgatttgtcaagggatctctggacaggacaagactccgaagctactcccccagcacacagcccgggacccacaaacccagcttgcccccagccctcccacctgccactccctggcccctcccaccgcccgccccccttggggcgcagggcatggtgtgaaaggccaagtgctgaggcgggtatcatgggtgctgtgccctagggcctgggtggcagggggtgggtggcctgtgggtgtgccgggggggccagtgtgcccaccccagtctcttggcgtgctggagggcatcctggatggaattgaagtgaatggaacagaagccaagcaaggtggagtgtgggtcagacccagaggagaacagtgccaggtcaccagatggaaagcgaaaaagaaagaacggccaatgttccctgaaaaccagcatgtcagggtatatccctagttacctggacaaagacgagcagtgtgtcgtgtgtggggacaaggcaactggttatcactaccgctgtatcacttgtgagggctgcaagggcttctttcgccgcacaatccagaagaacctccatcccacctattcctgcaaatatgacagctgctgtgtcattgacaagatcacccgcaatcagtgccagctgtgccgcttcaagaagtgcatcgccgtgggcatggccatggacttggttctagatgactcgaagcgggtggccaagcgtaagctgattgagcagaaccgggagcggcggcggaaggaggagatgatccgatcactgcagcagcgaccagagcccactcctgaagagtgggatctgatccacattgccacagaggcccatcgcagcaccaatgcccagggcagccattggaaacagaggcggaaattcctgcccgatgacattggccagtcacccattgtctccatgccggacggagacaaggtggacctggaagccttcagcgagtttaccaagatcatcaccccggccatcacccgtgtggtggactttgccaaaaaactgcccatgttctccgagctgccttgcgaagaccagatcatcctcctgaaggggtgctgcatggagatcatgtccctgcgggcggctgtccgctacgaccctgagagcgacaccctgacgctgagtggggagatggctgtcaagcgggagcagctcaagaatggcggcctgggcgtagtctccgacgccatctttgaactgggcaagtcactctctgcctttaacctggatgacacggaagtggctctgctgcaggctgtgctgctaatgtcaacagaccgctcgggcctgctgtgtgtggacaagatcgagaagagtcaggaggcgtacctgctggcgttcgagcactacgtcaaccaccgcaaacacaacattccgcacttctggcccaagctgctgatgaaggagagagaagtgcagagttcgattctgtacaagggggcagcggcagaaggccggccgggcgggtcactgggcgtccacccggaaggacagcagcttctcggaatgcatgttgttcagggtccgcaggtccggcagcttgagcagcagcttggtgaagcgggaagtctccaagggccggttcttcagcaccagagcccgaagagcccgcagcagcgtctcctggagctgctccaccgaagcggaattctccatgcccgagcggtctgtggggaagacgacagcagtgaggcggactccccgagctcctctgaggaggaaccggaggtctgcgaggacctggcaggcaatgcagcctctccctgaagccccccagaaggccgatggggaaggagaaggagtgccataccttctcccaggcctctgccccaagagcaggaggtgcctgaaagctgggagcgtgggctcagcagggctggtcacctcccatcccgtaagaccaccttcccttcctcagcaggccaaacatggccagactcccttgctttttgctgtgtagttccctctgcctgggatgcccttccccctttctctgcc

SEQ ID NO: 191254 - DNA, 4895 bp, Homo sapiens
  Payload ID: 17778
  Gene Name: thyroid hormone receptor, alpha
  Uniprot ID: P10827
  ENST ID: ENST00000450525
  CDS Start-End: 492-1724
gcggccgccgcctctgccggaggagccgcggggccgccacactcgccccccgccccccccgcgctcactcgcactcacacccgggcgcaggaggcgggcggcccgggccccaccggccccccatggacgcccccagcacggggcgctgagacccccgcgtcgctgcccagcccggtccggcgcgccacgccgagggatctctggacaggacaagactccgaagctactcccccagcacacagcccgggacccacaaacccagcttgcccccagccctcccacctgccactccctggcccctcccaccgcccgccccccttggggcgcagggcatggtgtgaaaggccaagtgctgaggcgggtatcatgggtgctgtgccctagggcctgggtggcagggggtgggtggcctgtgggtgtgccgggggggccagtgtgcccaccccagtctcttggcgtgctggagggcatcctggatggaattgaagtgaatggaacagaagccaagcaaggtggagtgtgggtcagacccagaggagaacagtgccaggtcaccagatggaaagcgaaaaagaaagaacggccaatgttccctgaaaaccagcatgtcagggtatatccctagttacctggacaaagacgagcagtgtgtcgtgtgtggggacaaggcaactggttatcactaccgctgtatcacttgtgagggctgcaagggcttctttcgccgcacaatccagaagaacctccatcccacctattcctgcaaatatgacagctgctgtgtcattgacaagatcacccgcaatcagtgccagctgtgccgcttcaagaagtgcatcgccgtgggcatggccatggacttggttctagatgactcgaagcgggtggccaagcgtaagctgattgagcagaaccgggagcggcggcggaaggaggagatgatccgatcactgcagcagcgaccagagcccactcctgaagagtgggatctgatccacattgccacagaggcccatcgcagcaccaatgcccagggcagccattggaaacagaggcggaaattcctgcccgatgacattggccagtcacccattgtctccatgccggacggagacaaggtggacctggaagccttcagcgagtttaccaagatcatcaccccggccatcacccgtgtggtggactttgccaaaaaactgcccatgttctccgagctgccttgcgaagaccagatcatcctcctgaaggggtgctgcatggagatcatgtccctgcgggcggctgtccgctacgaccctgagagcgacaccctgacgctgagtggggagatggctgtcaagcgggagcagctcaagaatggcggcctgggcgtagtctccgacgccatctttgaactgggcaagtcactctctgcctttaacctggatgacacggaagtggctctgctgcaggctgtgctgctaatgtcaacagaccgctcgggcctgctgtgtgtggacaagatcgagaagagtcaggaggcgtacctgctggcgttcgagcactacgtcaaccaccgcaaacacaacattccgcacttctggcccaagctgctgatgaaggtgactgacctccgcatgatcggggcctgccacgccagccgcttcctccacatgaaagtcgagtgccccaccgaactcttccccccactcttcctcgaggtctttgaggatcaggaagtctaaagcctcaggcggccagagggtgtgcggagctggtggggaggagcctggagagaaggggcagagctgggggctgagggagacccccccacaccccttctctccttcctctcgtccttggatagattcagctcccacacacacacccgcactgcccaggtccctcctcagacctccagccctgggacagggcaaacaactgaacttgctatggaaaggacagtgtgggaggctgggggagctgtgtcctgcagttcccaggaccccatcctctcagaaggtaggggaagggcgggaggattgagaagggacaagccaccttgaccgtaggggaaggaggaatgtgggctgggggaagatgccctcaactcaccccctacacacacatgagagagagcccccacccagttccttggcctaggtctcccctccaggctgagggcctctctacttccccagatgcctgggtgcaaagaacggcttggcttggctcctcctctggaggttaaaatttatagtcattctaactgcactttggaaaccaagcaaggggagaagacaaatgaagaaaaactagacagagagaaaaatacaaaaaagagagagcgagcgatagagagagatgatattaagttattaactgaggctgaccagaggggaggaccccccctttaccaccccatgcactttgcgagctgccccttcttcccccacatcagagagaaatgcccccacaccagagccccaagggtagggctgccgatcagagctgtgagttaacacaacagggtcctggccaccccccttgccataccccgccctctgtgcccctttggcaccccccaaccctagtatgtcctctgctttctgccactcgtgcccgctgagttccatctacctctcatgctggatgccagctggcccctcaccagcctgccctgctgcccacacagctcccctttaagtgcccagccctaggggcctctccccatccacctcctccttccacaccttggcacccacccaggaaaaaactgtggctccaactcctaccctccttatatcctgcagtattagctagaaaccggatgctgctgcattggttgggtcgggggtaggagggctgtgcgtgagcgtctcccagaaccctccacccctttagcactctgtttccctgtttcccatctgtcttctgggctctctctaacctctgccctcctccccagctcctactcactgcactaactctgggcgggcaggtaccagaatgggggtgtttagataagtgacacttagttggggccccaggggaggggtggtcggtgctcctttttctttaaagctcttttggccagctgcccctctgccccgggaccccttcccctcttcttttctctaattcagggactttggcttgagcccctctcgccctcctggtgagggtgctctgttggtctgcacttgggtgagctgtcctcctccccctccctgtggctgccgcccactcctcaggggagagagggagagaggaggtggtcctcccatgggagcaggaggtggggtgggacagagcagaccagagggtgctgggctcagggctgcatgtcggcagggatggatgggtggacacagatgcccccggaagccatggggattggggcagggggtggggggaggggtgccagggcttcctgcgctttgcactattggggcaaaaatgtcttaagcagtggggaacctgccaccccaccctgaccctcagcctgccacagccccctacacacacacacacacacacacacacacacacacacacacggacatgcacacacggacatgggaaggcaatgctatgctgcccgtcagggcactgtccttccccaatcgttcaggtgttccaacaggggtggagggcctggaggagcacccgctgtcacctgtgcatgtgcctgtcccaccctgctggggcctcgggctgcccgcgctgtctttgtctctatcctctctctctctcctggagtactgaatcctgtattactccagtcccatgggtaggccctcttgtaccttcctaccacgcctgggggcccagtggaattcctgacctgtctgctgtcttccccatccctccatccccaccccaacccctccatccccattctcagccatggacacggcagagaaaaggccttgaagagccttagcctcttataggcacttgggactcccccaccctccccaatcatatgagctgtgatcccatcctccccggacccctcccttccccctcggtgatgtggggtgtatgtgtgcgttcctctgcgtgaatgtgtgagtgagtacacatggtaggggaggagccagggcgactcaggagtgccacgcacctgctctagagcggcagctgtcccagtccctgctgtggaagtgggggacagggccctctcctgggggccattggtgctaatgagggggatggccttgatgtgggtgctcagcatgcctcccccagtattggcccggggcactagggcaggcagggtggagcagcaggtgcagtatcggtgggaggacgggttgctgggaataggacgagggggccaggccaggacaaggggttgccagagccatgaccactaccccgcccccaccacccgcctctccatctcagtattgcccctcccatcactcataacacacatacctcatccagcctcctccctgctcagacttggggagggtgggggaggagcccctaccccttctcctggtggcgggtctgcagggctgggagagggcagggcgttgtgagagagagaccgtccataaggaggacagtaactcctgccctgggaactcctgggcgggggggagggggacactgcccagaggcgctactgaatgtatgagaagctggtgctgggctggggggaggggggttgtggccagaaacagggaaggaggtaggtctcttccccagggaggggtgggaccggcaggggtgacttgaggggctcctactcctgccccacgttgacaatcagtatgtctgttatgtgcgatttttcaccccgttgtgttttgggtcaggattttaaagaaagatatttttatggtaattgttgctcgtctattttactatatatttatgtaataaatatatgatgaaaataa

SEQ ID NO: 191255 - DNA, 1909 bp, Homo sapiens
  Payload ID: 17778
  Gene Name: thyroid hormone receptor, alpha
  Uniprot ID: P10827
  ENST ID: ENST00000546243
  CDS Start-End: 403-1635
gtgcacgcatccatgtgagagtgtttttgtgcatgtgtgggctggggagggctctgaatatctcctggaacggtacccagagccctgtggctctgcgcatgcgggggatctctggacaggacaagactccgaagctactcccccagcacacagcccgggacccacaaacccagcttgcccccagccctcccacctgccactccctggcccctcccaccgcccgccccccttggggcgcagggcatggtgtgaaaggccaagtgctgaggcgggtatcatgggtgctgtgccctagggcctgggtggcagggggtgggtggcctgtgggtgtgccgggggggccagtgtgcccaccccagtctcttggcgtgctggagggcatcctggatggaattgaagtgaatggaacagaagccaagcaaggtggagtgtgggtcagacccagaggagaacagtgccaggtcaccagatggaaagcgaaaaagaaagaacggccaatgttccctgaaaaccagcatgtcagggtatatccctagttacctggacaaagacgagcagtgtgtcgtgtgtggggacaaggcaactggttatcactaccgctgtatcacttgtgagggctgcaagggcttctttcgccgcacaatccagaagaacctccatcccacctattcctgcaaatatgacagctgctgtgtcattgacaagatcacccgcaatcagtgccagctgtgccgcttcaagaagtgcatcgccgtgggcatggccatggacttggttctagatgactcgaagcgggtggccaagcgtaagctgattgagcagaaccgggagcggcggcggaaggaggagatgatccgatcactgcagcagcgaccagagcccactcctgaagagtgggatctgatccacattgccacagaggcccatcgcagcaccaatgcccagggcagccattggaaacagaggcggaaattcctgcccgatgacattggccagtcacccattgtctccatgccggacggagacaaggtggacctggaagccttcagcgagtttaccaagatcatcaccccggccatcacccgtgtggtggactttgccaaaaaactgcccatgttctccgagctgccttgcgaagaccagatcatcctcctgaaggggtgctgcatggagatcatgtccctgcgggcggctgtccgctacgaccctgagagcgacaccctgacgctgagtggggagatggctgtcaagcgggagcagctcaagaatggcggcctgggcgtagtctccgacgccatctttgaactgggcaagtcactctctgcctttaacctggatgacacggaagtggctctgctgcaggctgtgctgctaatgtcaacagaccgctcgggcctgctgtgtgtggacaagatcgagaagagtcaggaggcgtacctgctggcgttcgagcactacgtcaaccaccgcaaacacaacattccgcacttctggcccaagctgctgatgaaggtgactgacctccgcatgatcggggcctgccacgccagccgcttcctccacatgaaagtcgagtgccccaccgaactcttccccccactcttcctcgaggtctttgaggatcaggaagtctaaagcctcaggcggccagagggtgtgcggagctggtggggaggagcctggagagaaggggcagagctgggggctgagggagacccccccacaccccttctctccttcctctcgtccttggatagattcagctcccacacacacacccgcactgcccaggtccctcctcagacctccagccctgggacagggcaaacaactgaacttgctatggaaaggacagtgtgggaggctgggggagctgtgtcctgcagttcccaggaccccatcctctcag

SEQ ID NO: 191256 - DNA, 574 bp, Homo sapiens
  Payload ID: 17778
  Gene Name: thyroid hormone receptor, alpha
  ENST ID: ENST00000585047
  CDS Start-End: 357-574
gatcctgagatgaaaggtgctctggcgtcactgggttggttttatgtccatgaatgcagggatctctggacaggacaagactccgaagctactcccccagcacacagcccgggacccacaaacccagcttgcccccagccctcccacctgccactccctggcccctcccaccgcccgccccccttggggcgcagggcatggtgtgaaaggccaagtgctgaggcgggtatcatgggtgctgtgccctagggcctgggtggcagggggtgggtggcctgtgggtgtgccgggggggccagtgtgcccaccccagtctcttggcgtgctggagggcatcctggatggaattgaagtgaatggaacagaagccaagcaaggtggagtgtgggtcagacccagaggagaacagtgccaggtcaccagatggaaagcgaaaaagaaagaacggccaatgttccctgaaaaccagcatgtcagggtatatccctagttacctggacaaagacgagcagtgtgtcgtgtgtggggacaaggcaactggttatcactaccgctgtatcacttgtgagggctg

SEQ ID NO: 191257 - DNA, 2421 bp, Homo sapiens
  Payload ID: 17778
  Gene Name: thyroid hormone receptor, alpha
  Uniprot ID: P10827
  ENST ID: ENST00000584985
  CDS Start-End: 581-1936
gaggcggcctgcagggagcagccgcgagccggccgggcgcgccgagcccgagccccagccggagcggggcgggggagggaggagccagagcggccgccgcctctgccggaggagccgcggggccgccacactcgccccccgccccccccgcgctcactcgcactcacacccgggcgcaggaggcgggcggcccgggccccaccggccccccatggacgcccccagcacggggcgctgagacccccgcgtcgctgcccagcccggtccggcgcgccacgccgagggatctctggacaggacaagactccgaagctactcccccagcacacagcccgggacccacaaacccagcttgcccccagccctcccacctgccactccctggcccctcccaccgcccgccccccttggggcgcagggcatggtgtgaaaggccaagtgctgaggcgggtatcatgggtgctgtgccctagggcctgggtggcagggggtgggtggcctgtgggtgtgccgggggggccagtgtgcccaccccagtctcttggcgtgctggagggcatcctggatggaattgaagtgaatggaacagaagccaagcaaggtggagtgtgggtcagacccagaggagaacagtgccaggtcaccagatggaaagcgaaaaagaaagaacggccaatgttccctgaaaaccagcatgtcagggtatatccctagttacctggacaaagacgagcagtgtgtcgtgtgtggggacaaggcaactggttatcactaccgctgtatcacttgtgagggctgcaagggcttctttcgccgcacaatccagaagaacctccatcccacctattcctgcaaatatgacagctgctgtgtcattgacaagatcacccgcaatcagtgccagctgtgccgcttcaagaagtgcatcgccgtgggcatggccatggacttggttctagatgactcgaagcgggtggccaagcgtaagctgattgagcagaaccgggagcggcggcggaaggaggagatgatccgatcactgcagcagcgaccagagcccactcctgaagagtgggatctgatccacattgccacagaggcccatcgcagcaccaatgcccagggcagccattggaaacagaggcggaaattcctgcccgatgacattggccagtcacccattgtctccatgccggacggagacaaggtggacctggaagccttcagcgagtttaccaagatcatcaccccggccatcacccgtgtggtggactttgccaaaaaactgcccatgttctccgagctgccttgcgaagaccagatcatcctcctgaaggggtgctgcatggagatcatgtccctgcgggcggctgtccgctacgaccctgagagcgacaccctgacgctgagtggggagatggctgtcaagcgggagcagctcaagaatggcggcctgggcgtagtctccgacgccatctttgaactgggcaagtcactctctgcctttaacctggatgacacggaagtggctctgctgcaggctgtgctgctaatgtcaacagaccgctcgggcctgctgtgtgtggacaagatcgagaagagtcaggaggcgtacctgctggcgttcgagcactacgtcaaccaccgcaaacacaacattccgcacttctggcccaagctgctgatgaagggtccgcaggtccggcagcttgagcagcagcttggtgaagcgggaagtctccaagggccggttcttcagcaccagagcccgaagagcccgcagcagcgtctcctggagctgctccaccgaagcggaattctccatgcccgagcggtctgtggggaagacgacagcagtgaggcggactccccgagctcctctgaggaggaaccggaggtctgcgaggacctggcaggcaatgcagcctctccctgaagccccccagaaggccgatggggaaggagaaggagtgccataccttctcccaggcctctgccccaagagcaggaggtgcctgaaagctgggagcgtgggctcagcagggctggtcacctcccatcccgtaagaccaccttcccttcctcagcaggccaaacatggccagactcccttgctttttgctgtgtagttccctctgcctgggatgcccttccccctttctctgcctggcaacatcttacttgtcctttgaggccccaactcaagtgtcacctccttccccagctcccccaggcagaaatagttgtctgtgcttccttggttcatgcttctactgtgacacttatctcactgttttataattagtcgggcatgagtctgtttcccaagctagactgtgtctgaatcatgtctgtatccccagtgcccggtgcagggcctggcatagagtaggtactccataaaaggtgtgttgaattgaa

SEQ ID NO: 191258 - DNA, 581 bp, Homo sapiens
  Payload ID: 17778
  Gene Name: thyroid hormone receptor, alpha
  ENST ID: ENST00000577288
  CDS Start-End: 487-581
atactcccagcacaaagagaagtgctgtgatcctgaggccgacagtggctgggaagggagggcagcctgccatttcctttgtatggcccctccctccaggccctgagagctgctctgctttatacttttggcttccatatcatactaccctatcccctcctttaactggagtgggagaactgcggaaagggatctctggacaggacaagactccgaagctactcccccagcacacagcccgggacccacaaacccagcttgcccccagccctcccacctgccactccctggcccctcccaccgcccgccccccttggggcgcagggcatggtgtgaaaggccaagtgctgaggcgggtatcatgggtgctgtgccctagggcctgggtggcagggggtgggtggcctgtgggtgtgccgggggggccagtgtgcccaccccagtctcttggcgtgctggagggcatcctggatggaattgaagtgaatggaacagaagccaagcaaggtggagtgtgggtcagacccagaggagaacagtgccaggtcaccagatggaaagcgaaaaagaaagaacggcca

SEQ ID NO: 191259 - DNA, 907 bp, Homo sapiens
  Payload ID: 17778
  Gene Name: thyroid hormone receptor, alpha
  ENST ID: ENST00000578218
  CDS Start-End: 654-907
agcagattgttgggggaaatggctggtgacagagaatagaaagagcctatatggagaagggtgacgttggaaaagggaggcagtggatcggtattgatgttagaaatgagaggggagggaggtaacagggaatgaacccccacaaggatgaaaaacgtaagatgattgaagttaaaaggacatcaggggtcacctgcccagccctcgcagctgaagcttgaggaagctctgcccccgacagcagtggcgatttgtcaaggtcacacagtgagttaccggcggagaagggacccgaactcccaaacaaactacacctgcaagcgtttggtgtttagactttctccccgatgtataagggatctctggacaggacaagactccgaagctactcccccagcacacagcccgggacccacaaacccagcttgcccccagccctcccacctgccactccctggcccctcccaccgcccgccccccttggggcgcagggcatggtgtgaaaggccaagtgctgaggcgggtatcatgggtgctgtgccctagggcctgggtggcagggggtgggtggcctgtgggtgtgccgggggggccagtgtgcccaccccagtctcttggcgtgctggagggcatcctggatggaattgaagtgaatggaacagaagccaagcaaggtggagtgtgggtcagacccagaggagaacagtgccaggtcaccagatggaaagcgaaaaagaaagaacggccaatgttccctgaaaaccagcatgtcagggtatatccctagttacctggacaaagacgagcagtgtgtcgtgtgtggggacaaggcaactggttatcactaccgctgtatcacttgtgagggctgcaagggcttctttcgccgcacaatccagaagaacct

SEQ ID NO: 191260 - DNA, 563 bp, Homo sapiens
  Payload ID: 17778
  Gene Name: thyroid hormone receptor, alpha
  ENST ID: ENST00000577486
  CDS Start-End: 392-563
acatttggagttaaggctgggcaggagagagggatggggaaataaacatggtggcttaggttggcactgctccaggtctgcaatgtagcaactgggatctctggacaggacaagactccgaagctactcccccagcacacagcccgggacccacaaacccagcttgcccccagccctcccacctgccactccctggcccctcccaccgcccgccccccttggggcgcagggcatggtgtgaaaggccaagtgctgaggcgggtatcatgggtgctgtgccctagggcctgggtggcagggggtgggtggcctgtgggtgtgccgggggggccagtgtgcccaccccagtctcttggcgtgctggagggcatcctggatggaattgaagtgaatggaacagaagccaagcaaggtggagtgtgggtcagacccagaggagaacagtgccaggtcaccagatggaaagcgaaaaagaaagaacggccaatgttccctgaaaaccagcatgtcagggtatatccctagttacctggacaaagacgagcagtgtgtcgtgtgtgggg

SEQ ID NO: 191261 - DNA, 1718 bp, Homo sapiens
  Payload ID: 17779
  Gene Name: thyroid hormone receptor, beta
  Uniprot ID: P10828
  ENST ID: ENST00000280696
  CDS Start-End: 242-1672
cagaagagctcaaaagacacctcggtctaaataggattttagcacatcaggtgctattacaaagtaaagcaggctgggttgctgtgttggtggtggtgtttattcatcttcccttcgcgtttcatgtgtatgtatgtatgcttctctgcgtatatgcccagctctcagggtgtatggggctggagaatgcatgcgtagactgtgtgtatatgtaaactagaaactgaaccagggaaacaaaatgaactactgtatgcaagaaatatatgaagtgcacccagctgccggcagcaattgctacatgcagtccactgattattacgcgtattttgaagatagtccgggttacagcggttgcgatgctcaggctgtgcccagtaacaacatatatatggaacaggcctgggcagtgaatcagccttatacctgtagttaccctggaaacatgtttaaaagcaaggactctgacttggacatggccctgaatcaatacagccaacctgaatatttcactgaagaaaagcctactttttctcaagtgcagtcgccatcgtattctcaaaaaaaagggtacatccccagttacttagacaaggacgagctctgtgtagtgtgtggtgacaaagccaccgggtatcactaccgctgtatcacgtgtgaaggctgcaagggtttctttagaagaaccattcagaaaaatctccatccatcctattcctgtaaatatgaaggaaaatgtgtcatagacaaagtcacgcgaaatcagtgccaggaatgtcgctttaagaaatgcatctatgttggcatggcaacagatttggtgctggatgacagcaagaggctggccaagaggaagctgatagaggagaaccgggagaaaagacggcgggaagagctgcagaagtccatcgggcacaagccagagcccacagacgaggaatgggagctcatcaaaactgtcaccgaagcccatgtggcgaccaacgcccaaggcagccactggaagcaaaaacggaaattcctgccagaagacattggacaagcaccaatagtcaatgccccagaaggtggaaaggttgacttggaagccttcagccattttacaaaaatcatcacaccagcaattaccagagtggtggattttgccaaaaagttgcctatgttttgtgagctgccatgtgaagaccagatcatcctcctcaaaggctgctgcatggagatcatgtcccttcgcgctgctgtgcgctatgacccagaaagtgagactttaaccttgaatggggaaatggcagtgacacggggccagctgaaaaatgggggtcttggggtggtgtcagacgccatctttgacctgggcatgtctctgtcttctttcaacctggatgacactgaagtagccctccttcaggccgtcctgctgatgtcttcagatcgcccggggcttgcctgtgttgagagaatagaaaagtaccaagatagtttcctgctggcctttgaacactatatcaattaccgaaaacaccacgtgacacacttttggccaaaactcctgatgaaggtgacagatctgcggatgataggagcctgccatgccagccgcttcctgcacatgaaggtggaatgccccacagaactcttcccccctttgttcttggaagtgttcgaggattagactgactggattcattctcataattcctacagcactactgggtgtc

SEQ ID NO: 191262 - DNA, 6345 bp, Homo sapiens
  Payload ID: 17779
  Gene Name: thyroid hormone receptor, beta
  Uniprot ID: P10828
  ENST ID: ENST00000356447
  CDS Start-End: 286-1671
cggcggggattaactttgcatgaataatgtgagtgcgcttggaaaagagacctcctgctccgcgggctcggggcaagagcccgcaggctaccttccccgggcaggggcgctcaacccaaccggctccagggcactggtaatttggctagaggaccgcgcggaggcagcgggatctgcgatttccttctggttggctgtcctgcgtgggtgccaagttccacacatgatttaatgaataagaaggagatgtcagtgaaaaaagggatccagaatgattactaacctatgactcccaacagtatgacagaaaatggccttacagcctgggacaaaccgaagcactgtccagaccgagaacacgactggaagctagtaggaatgtctgaagcctgcctacataggaagagccattcagagaggcgcagcacgttgaaaaatgaacagtcgtcgccacatctcatccagaccacttggactagctcaatattccatctggaccatgatgatgtgaacgaccagagtgtctcaagtgcccagaccttccaaacggaggagaagaaatgtaaagggtacatccccagttacttagacaaggacgagctctgtgtagtgtgtggtgacaaagccaccgggtatcactaccgctgtatcacgtgtgaaggctgcaagggtttctttagaagaaccattcagaaaaatctccatccatcctattcctgtaaatatgaaggaaaatgtgtcatagacaaagtcacgcgaaatcagtgccaggaatgtcgctttaagaaatgcatctatgttggcatggcaacagatttggtgctggatgacagcaagaggctggccaagaggaagctgatagaggagaaccgggagaaaagacggcgggaagagctgcagaagtccatcgggcacaagccagagcccacagacgaggaatgggagctcatcaaaactgtcaccgaagcccatgtggcgaccaacgcccaaggcagccactggaagcaaaaacggaaattcctgccagaagacattggacaagcaccaatagtcaatgccccagaaggtggaaaggttgacttggaagccttcagccattttacaaaaatcatcacaccagcaattaccagagtggtggattttgccaaaaagttgcctatgttttgtgagctgccatgtgaagaccagatcatcctcctcaaaggctgctgcatggagatcatgtcccttcgcgctgctgtgcgctatgacccagaaagtgagactttaaccttgaatggggaaatggcagtgacacggggccagctgaaaaatgggggtcttggggtggtgtcagacgccatctttgacctgggcatgtctctgtcttctttcaacctggatgacactgaagtagccctccttcaggccgtcctgctgatgtcttcagatcgcccggggcttgcctgtgttgagagaatagaaaagtaccaagatagtttcctgctggcctttgaacactatatcaattaccgaaaacaccacgtgacacacttttggccaaaactcctgatgaaggtgacagatctgcggatgataggagcctgccatgccagccgcttcctgcacatgaaggtggaatgccccacagaactcttcccccctttgttcttggaagtgttcgaggattagactgactggattcattctcataattcctacagcactactgggtgtcatttcattccattgcctagctcttttttgtttgtttctttgtgttgggagggattatttgggagggaaaagggaagtagtccttggcatagacatggatgaaattgccccttgaatgcgggtacttgaaactattgcatttcgttctccggtcctgtgatgtgaatgctctgaaggttttatggttgtggaggtggggtgggggacaatcattaactcaccagcaccaagcatcaccagctcccacccgtccctggtccaagacttgagtcagcaaaatggcgccacaggacactaaagaagccttaaaaccaagataatacgaccacctccacccaatcctgatgttcgcagggctgaagttaacagagcacagaccacctttagttagatgtggctttcagccttttagggaaagactcgaacaaattttcatctattcaagagcatgctgtttgcagcactctttatggtctcctaggagcataacttggaatgtacaggaatatttgtgtcctaaaaaaatcagctgcccttccaatatcatttttataacgttatggtttaattcaagttatacaaaggtgtgactcaaggatgtgcaggtattgactgatggaggccaacaaggaaaatattttttttcagtgagcccagagaaattagaaatcttcaccaatgtcagtgactgcatggtttccaaaaattcacatagtattacctcacagtaggaaggcttctttcccatttaggctcagagaacacttttacagaaatcaaacctatttacagggtggcaccccttttctgtggcatctgatctgtcatctcccaagctcctgaagttctttatccaggttgtatctttgctgagctgacaacagatttctctatggatcaaatattctaatcaaggaaagatacggtgaaacttcagtcttcttctggagaaatgctgaggcgagattagtgcagctacattctgagttgaaggaaatgcagtgttctgagggcccctttgtgtcctgatggctggaggacgcttcctcctggttagatcctcaagctccttgcctcattgacaaatgtctcctagtcccctttttccctctgactctgaggaactaaatagcttgactatctctaaacagagactggccctgccactgaccctcctgtccctctcatagcataccctgacagatactcaatagaaaacacctgcagaccatgtgcacacttaactttcctgcccaacctgcctccccaacggcccatgctagaatagcttgtgcccagaaaacaaacagtgacacttcatctcttcagcgtcagaaaatgggcatagaatgtacccatgcaattgaatgtatctcattctccactggcatagtagatataaactattcctttgcctaccttttactgccttatcctggaaatattggggaaaataagccatatcagtgagatttacctaaaaacaaaggaaggaaagtcactatggaaaccaagtagatgctttttgtaagtttggtggagcataactggcccagaagtctgggtgcctgagttctagttcgtgctctgtcaactggtagatttgtaattctaggtcttggttttcttacctggtgaataagtcatgatctctaaaacccttcctgcccttaatattgtctgaatttcaaggggaaaaaaaaaatctggttcctttaattatttttttttaacacttaaattcctaactttattagacaagaagtatggcccacttaacagttaaggaacgtaaatttgttattggctcgaaataataatttgacacaatactagtcaaccatttagaggccttggaaaaagaagaggaacagcactgaaaattccaagtatgattggaaattatctgggagcggggaattaaatattcaatgcatgaaagcaattgtactggcttctgggaaaaaggaaacaagaacattgctatggaacttgttacccagagaaaggaagtgaaaagatttacaattataagcacgaaattcattggcagattacctgctttatctacagacagattgttttggggtttggttttgtctaggcagcctctggccaggctccttaattgcttgctctgctaatatttcagcttcctctcttgactccttgaggaaccaaccgctctttggaagacaaacacttagccacctctgtgctccagggtaaccctgagaagctctgctgtctggggcaagctttctttccaaagggaatgagaggaaggcaagcaggcagggtcctgcagcgtcaggccttctggggaaagtttcctcattttgtttgacagggtcctcagtacatcagacacccagatttgaatataagttcagagcctgatctcaagctaaatcagaatgctttggggactaaccatgatcgagaattggccaaatagtatggcatataaacagccatccagccagccgcaagtaaaggaacgtttgatccttggcaccttaaatgattgattgccttcaataggcaaactgctggtctggaaatctcgttgaaggctgaatacttcatgcggagtaggacaagccttagcccaccttcaggttgaaaggaaaggccataggactcaaaagataatgactctgaaactaaactccttccttctgaagctgacagaggtacttagtgcatctcaagactccatctcataaaactcatttgtgagggatttgctctagatttttctaaacattttttcatctattgtccagacttgcaaatccagtgtggacctgatggagatacccttcacacctgcgctcccaccccctcggcagggagacgtctcagtagaggagaacacacccattatgctgggatttgtatttataaatcacttcccttttagggatgagcggtgtggggcgtgtgtgcgtgtgagtgtatgcgcgtgcgtgtgtgaccctcaagtgtactttgctcaatttagacgtgcagtatttccagaaacaatgaaaaaagtaagatgttttcttctttatgattctgctcaaaacaccacgtgccgcctcagagctttttctagagcctcggtcctcaatgacgcgcttgacctgttgatgcctcagcccagcgaagcccctcacctgtgccccgggcgacagctcttcagtgtgcagtgcaggcctggggtggactgccaggccttcgctctgtgccagcaacgccgttcttgttgctcctccatgaacaggggtacaagccctggcccctcctcgacactaagccccccacagactcagcctccaaggaaccgctgagcacccttgaagcatgtcattgtcagtgatacctttttattctatggaactctaacctattcgtgtcatattgaccttttgctgcatgagtcataaattatgaaatcagtcttacagtttttgaaatgtagccagcatttgtaaggctaaacctttttcatgaactgaatttaagtgaataaccaagccacagttcctcctcaaatggagagtgatgatcgacatttgaatctctttgccctttccaacggctatggcatcaggttctaaaataagctcgtaatttttcctgttattttaataatatggaaatattagcatagtgtttcttttgatagtgatagactataatccatatttaaattttatagagaagaaattttattgtactgtgatgtagatatttattatccaggtaaggatttgcccggtgtgtattttttacaattgagacattttactttaatctttaaaaaaaatgcattaaaaacacactcaaaaaaaaaaaaaaaaaaaaaaaaaaaaaaccagactgggggaaaaaaggtttggccttatcacagaatttttactgtgctgtataaatgtttgcaaatgcgaaaagtgtgcatttatagtgtgtttccacattaattaatgccgccttcaagagcaatattgtgcaggtaaaacgctgtttgtggctttctgttgcacagttaaagctgacccaccctatgcacaagacaatcaaatataaatctgtcctcctcaggatgcagataatactcatgtaaattatggagcacaatgtaagacaaaaggagacactttacatatgtattgttgatacagaaattatcagggcatgaatgagctgatgtgacattatgccacttctttcttttggttctcccttattaacttggcatttttaatttgaccatagagccaaattagttctccatgctttcttcgtagaaaatccttttttttcccataatgttttcatgccctgagaatcagaaaaatactacagaatagaaaaagatttacagtcattggaagatttgtgttttgcaaacagtgttaagtgatattgctagatggtgatatttttttcagcctaaaactctgttgaaatctgtgatcaaaatgttttaaactatccaaaaaaaatttgtatatttgggaaaaatggatttttacatagcttttgtatgcagatataaaactgtaattatgaatatagtgggcgtagataaactcataagcttaaattctaaaaaagaaaaagcttataacagatata

SEQ ID NO: 191263 - DNA, 7506 bp, Homo sapiens
  Payload ID: 17779
  Gene Name: thyroid hormone receptor, beta
  Uniprot ID: P10828
  ENST ID: ENST00000396671
  CDS Start-End: 397-1782
cggcggggattaactttgcatgaataatgtgagtgcgcttggaaaagagacctcctgctccgcgggctcggggcaagagcccgcaggctaccttccccgggcaggggcgctcaacccaaccggctccagggcactgatctgcgatttccttctggttggctgtcctgcgtgggtgccaagttccacacatgatttaatgaataagaagctcgccagagaggcaaactccagcattttatatttcatctgcccccagtgacttcactgtaggaagaggaaatgcagaaaaacaaacgtcttgaagactgaaagcctgttattcaaagaggttagcagtagactgttggaagtaaggagatgtcagtgaaaaaagggatccagaatgattactaacctatgactcccaacagtatgacagaaaatggccttacagcctgggacaaaccgaagcactgtccagaccgagaacacgactggaagctagtaggaatgtctgaagcctgcctacataggaagagccattcagagaggcgcagcacgttgaaaaatgaacagtcgtcgccacatctcatccagaccacttggactagctcaatattccatctggaccatgatgatgtgaacgaccagagtgtctcaagtgcccagaccttccaaacggaggagaagaaatgtaaagggtacatccccagttacttagacaaggacgagctctgtgtagtgtgtggtgacaaagccaccgggtatcactaccgctgtatcacgtgtgaaggctgcaagggtttctttagaagaaccattcagaaaaatctccatccatcctattcctgtaaatatgaaggaaaatgtgtcatagacaaagtcacgcgaaatcagtgccaggaatgtcgctttaagaaatgcatctatgttggcatggcaacagatttggtgctggatgacagcaagaggctggccaagaggaagctgatagaggagaaccgggagaaaagacggcgggaagagctgcagaagtccatcgggcacaagccagagcccacagacgaggaatgggagctcatcaaaactgtcaccgaagcccatgtggcgaccaacgcccaaggcagccactggaagcaaaaacggaaattcctgccagaagacattggacaagcaccaatagtcaatgccccagaaggtggaaaggttgacttggaagccttcagccattttacaaaaatcatcacaccagcaattaccagagtggtggattttgccaaaaagttgcctatgttttgtgagctgccatgtgaagaccagatcatcctcctcaaaggctgctgcatggagatcatgtcccttcgcgctgctgtgcgctatgacccagaaagtgagactttaaccttgaatggggaaatggcagtgacacggggccagctgaaaaatgggggtcttggggtggtgtcagacgccatctttgacctgggcatgtctctgtcttctttcaacctggatgacactgaagtagccctccttcaggccgtcctgctgatgtcttcagatcgcccggggcttgcctgtgttgagagaatagaaaagtaccaagatagtttcctgctggcctttgaacactatatcaattaccgaaaacaccacgtgacacacttttggccaaaactcctgatgaaggtgacagatctgcggatgataggagcctgccatgccagccgcttcctgcacatgaaggtggaatgccccacagaactcttcccccctttgttcttggaagtgttcgaggattagactgactggattcattctcataattcctacagcactactgggtgtcatttcattccattgcctagctcttttttgtttgtttctttgtgttgggagggattatttgggagggaaaagggaagtagtccttggcatagacatggatgaaattgccccttgaatgcgggtacttgaaactattgcatttcgttctccggtcctgtgatgtgaatgctctgaaggttttatggttgtggaggtggggtgggggacaatcattaactcaccagcaccaagcatcaccagctcccacccgtccctggtccaagacttgagtcagcaaaatggcgccacaggacactaaagaagccttaaaaccaagataatacgaccacctccacccaatcctgatgttcgcagggctgaagttaacagagcacagaccacctttagttagatgtggctttcagccttttagggaaagactcgaacaaattttcatctattcaagagcatgctgtttgcagcactctttatggtctcctaggagcataacttggaatgtacaggaatatttgtgtcctaaaaaaatcagctgcccttccaatatcatttttataacgttatggtttaattcaagttatacaaaggtgtgactcaaggatgtgcaggtattgactgatggaggccaacaaggaaaatattttttttcagtgagcccagagaaattagaaatcttcaccaatgtcagtgactgcatggtttccaaaaattcacatagtattacctcacagtaggaaggcttctttcccatttaggctcagagaacacttttacagaaatcaaacctatttacagggtggcaccccttttctgtggcatctgatctgtcatctcccaagctcctgaagttctttatccaggttgtatctttgctgagctgacaacagatttctctatggatcaaatattctaatcaaggaaagatacggtgaaacttcagtcttcttctggagaaatgctgaggcgagattagtgcagctacattctgagttgaaggaaatgcagtgttctgagggcccctttgtgtcctgatggctggaggacgcttcctcctggttagatcctcaagctccttgcctcattgacaaatgtctcctagtcccctttttccctctgactctgaggaactaaatagcttgactatctctaaacagagactggccctgccactgaccctcctgtccctctcatagcataccctgacagatactcaatagaaaacacctgcagaccatgtgcacacttaactttcctgcccaacctgcctccccaacggcccatgctagaatagcttgtgcccagaaaacaaacagtgacacttcatctcttcagcgtcagaaaatgggcatagaatgtacccatgcaattgaatgtatctcattctccactggcatagtagatataaactattcctttgcctaccttttactgccttatcctggaaatattggggaaaataagccatatcagtgagatttacctaaaaacaaaggaaggaaagtcactatggaaaccaagtagatgctttttgtaagtttggtggagcataactggcccagaagtctgggtgcctgagttctagttcgtgctctgtcaactggtagatttgtaattctaggtcttggttttcttacctggtgaataagtcatgatctctaaaacccttcctgcccttaatattgtctgaatttcaaggggaaaaaaaaaatctggttcctttaattatttttttttaacacttaaattcctaactttattagacaagaagtatggcccacttaacagttaaggaacgtaaatttgttattggctcgaaataataatttgacacaatactagtcaaccatttagaggccttggaaaaagaagaggaacagcactgaaaattccaagtatgattggaaattatctgggagcggggaattaaatattcaatgcatgaaagcaattgtactggcttctgggaaaaaggaaacaagaacattgctatggaacttgttacccagagaaaggaagtgaaaagatttacaattataagcacgaaattcattggcagattacctgctttatctacagacagattgttttggggtttggttttgtctaggcagcctctggccaggctccttaattgcttgctctgctaatatttcagcttcctctcttgactccttgaggaaccaaccgctctttggaagacaaacacttagccacctctgtgctccagggtaaccctgagaagctctgctgtctggggcaagctttctttccaaagggaatgagaggaaggcaagcaggcagggtcctgcagcgtcaggccttctggggaaagtttcctcattttgtttgacagggtcctcagtacatcagacacccagatttgaatataagttcagagcctgatctcaagctaaatcagaatgctttggggactaaccatgatcgagaattggccaaatagtatggcatataaacagccatccagccagccgcaagtaaaggaacgtttgatccttggcaccttaaatgattgattgccttcaataggcaaactgctggtctggaaatctcgttgaaggctgaatacttcatgcggagtaggacaagccttagcccaccttcaggttgaaaggaaaggccataggactcaaaagataatgactctgaaactaaactccttccttctgaagctgacagaggtacttagtgcatctcaagactccatctcataaaactcatttgtgagggatttgctctagatttttctaaacattttttcatctattgtccagacttgcaaatccagtgtggacctgatggagatacccttcacacctgcgctcccaccccctcggcagggagacgtctcagtagaggagaacacacccattatgctgggatttgtatttataaatcacttcccttttagggatgagcggtgtggggcgtgtgtgcgtgtgagtgtatgcgcgtgcgtgtgtgaccctcaagtgtactttgctcaatttagacgtgcagtatttccagaaacaatgaaaaaagtaagatgttttcttctttatgattctgctcaaaacaccacgtgccgcctcagagctttttctagagcctcggtcctcaatgacgcgcttgacctgttgatgcctcagcccagcgaagcccctcacctgtgccccgggcgacagctcttcagtgtgcagtgcaggcctggggtggactgccaggccttcgctctgtgccagcaacgccgttcttgttgctcctccatgaacaggggtacaagccctggcccctcctcgacactaagccccccacagactcagcctccaaggaaccgctgagcacccttgaagcatgtcattgtcagtgatacctttttattctatggaactctaacctattcgtgtcatattgaccttttgctgcatgagtcataaattatgaaatcagtcttacagtttttgaaatgtagccagcatttgtaaggctaaacctttttcatgaactgaatttaagtgaataaccaagccacagttcctcctcaaatggagagtgatgatcgacatttgaatctctttgccctttccaacggctatggcatcaggttctaaaataagctcgtaatttttcctgttattttaataatatggaaatattagcatagtgtttcttttgatagtgatagactataatccatatttaaattttatagagaagaaattttattgtactgtgatgtagatatttattatccaggtaaggatttgcccggtgtgtattttttacaattgagacattttactttaatctttaaaaaaaatgcattaaaaacacactcaaaaaaaaaaaaaaaaaaaaaaaaaaaaaaccagactgggggaaaaaaggtttggccttatcacagaatttttactgtgctgtataaatgtttgcaaatgcgaaaagtgtgcatttatagtgtgtttccacattaattaatgccgccttcaagagcaatattgtgcaggtaaaacgctgtttgtggctttctgttgcacagttaaagctgacccaccctatgcacaagacaatcaaatataaatctgtcctcctcaggatgcagataatactcatgtaaattatggagcacaatgtaagacaaaaggagacactttacatatgtattgttgatacagaaattatcagggcatgaatgagctgatgtgacattatgccacttctttcttttggttctcccttattaacttggcatttttaatttgaccatagagccaaattagttctccatgctttcttcgtagaaaatccttttttttcccataatgttttcatgccctgagaatcagaaaaatactacagaatagaaaaagatttacagtcattggaagatttgtgttttgcaaacagtgttaagtgatattgctagatggtgatatttttttcagcctaaaactctgttgaaatctgtgatcaaaatgttttaaactatccaaaaaaaatttgtatatttgggaaaaatggatttttacatagcttttgtatgcagatataaaactgtaattatgaatatagtgggcgtagataaactcataagcttaaattctaaaaaagaaaaagcttataacagatatattttcctgtctctttctttaaatattattattttctacataggcaaagagttgcctgctcttctcacttcagctgctgccaaaagacggaaccacggatgtaaggacatttatttcataaataaacatctactagaataagcaaatttacttgagaagaaactatggagggagagaagaaactaagtaaaatgctgatggggggttacctctttggaaggggccacaaagatgaagggaggagagaggtgaagttttgcagctcaaggacaacattcatcttctcatctcaaattattcaggaatattactaatggaattatgttaacatcagctgccaacatatatctcaatctctgttgccctgaacacatgttaattgagattctttctatgacaagtaacaaaaagctaactcaaactggcttaagcagaaagctaattattgactttaatatctgggatctagggtattgcataccaaagcttcaggcatggctggatctgggtgcacttactcagtattctcaggaagctcctttttttgtcattcatgtagacttaacattcacatggcctttcaccttacggtggcctccaatagctccaggatgagctttacagctccaaatatagtgaaaggagaatttcttttctccaacaattctaatgaaaattctggcctaattctcactggcccaagttcagtcatgtgcccattcctgagccaatcactgtggtgaggaaaacagatgcataaccaaccttatcctcaggaatcctggaactgggtgaggggaaagagggacagtcagcttcatctaaactatggactgagagttgaggcaagatgattcctgaaagaaaattctaagtcttgctgctataagtggaagagaatggtgggcaagcaaaagcaaccagtgcccacaccaaaggtaaatctaaaacaacatcccatttcagtacagcaagcggttctccttcacacagaggaagctcatctccaagtttttatttggccaggacatgaaccaaataaacaccttcc

SEQ ID NO: 191264 - DNA, 754 bp, Homo sapiens
  Payload ID: 17779
  Gene Name: thyroid hormone receptor, beta
  ENST ID: ENST00000447875
  CDS Start-End: 389-754
ggcaagagcccgcaggctaccttccccgggcaggggcgctcaacccaaccggctccagggcactggtcagccagttcctgaggatcatcctgataaactccacaatgggtcactaacagggccacttcttgctcatgatctgcgatttccttctggttggctgtcctgcgtgggtgccaagttccacacatgatttaatgaataagaagggggcttggaggctcatagcaaaggtccttgaagagagcaagaaaaagtcttcccaggaaaagtggacacctgagtgagtgttacaacgagaaggggggcatcccaggcaaggcagctaccaagcacaggtgtgaaggagatgtcagtgaaaaaagggatccagaatgattactaacctatgactcccaacagtatgacagaaaatggccttacagcctgggacaaaccgaagcactgtccagaccgagaacacgactggaagctagtaggaatgtctgaagcctgcctacataggaagagccattcagagaggcgcagcacgttgaaaaatgaacagtcgtcgccacatctcatccagaccacttggactagctcaatattccatctggaccatgatgatgtgaacgaccagagtgtctcaagtgcccagaccttccaaacggaggagaagaaatgtaaagggtacatccccagttacttagacaaggacgagctctgtgtagtgtgtggtgacaaagccaccgggtatcactaccgctgtatc

SEQ ID NO: 191265 - DNA, 592 bp, Homo sapiens
  Payload ID: 17779
  Gene Name: thyroid hormone receptor, beta
  ENST ID: ENST00000418247
  CDS Start-End: 404-592
atgaataatgtgagtgcgcttggaaaagagacctcctgctccgcgggctcggggcaagagcccgcaggctaccttccccgggcaggggcgctcaacccaaccggctccagggcactggtaatttggctagaggaccgcgcggaggcagcgggatctgcgatttccttctggttggctgtcctgcgtgggtgccaagttccacacatgatttaatgaataagaagggggcttggaggctcatagcaaaggtccttgaagagagcaagaaaaagtcttcccaggaaaagtggacacctgagtgagtgttacaacgagaaggggggcatcccaggcaaggcagctaccaagcacaggtgtgaaggagatgtcagtgaaaaaagggatccagaatgattactaacctatgactcccaacagtatgacagaaaatggccttacagcctgggacaaaccgaagcactgtccagaccgagaacacgactggaagctagtaggaatgtctgaagcctgcctacataggaagagccattcagagaggcgcagcacgttgaaaaatgaacagtcgtcgccacatctcatccagaccacttgg

SEQ ID NO: 191266 - DNA, 568 bp, Homo sapiens
  Payload ID: 17779
  Gene Name: thyroid hormone receptor, beta
  ENST ID: ENST00000431815
  CDS Start-End: 226-568
aatgtgagtgcgcttggaaaagagacctcctgctccgcgggctcggggcaagagcccgcaggctaccttccccgggcaggggcgctcaacccaaccggctccagggcactgatctgcgatttccttctggttggctgtcctgcgtgggtgccaagttccacacatgatttaatgaataagaaggagatgtcagtgaaaaaagggatccagaatgattactaacctatgactcccaacagtatgacagaaaatggccttacagcctgggacaaaccgaagcactgtccagaccgagaacacgactggaagctagtaggaatgtctgaagcctgcctacataggaagagccattcagagaggcgcagcacgttgaaaaatgaacagtcgtcgccacatctcatccagaccacttggactagctcaatattccatctggaccatgatgatgtgaacgaccagagtgtctcaagtgcccagaccttccaaacggaggagaagaaatgtaaagggtacatccccagttacttagacaaggacgagctctgtgtagtgtgtggtgacaaagcca

SEQ ID NO: 191267 - DNA, 575 bp, Homo sapiens
  Payload ID: 17779
  Gene Name: thyroid hormone receptor, beta
  ENST ID: ENST00000447414
  CDS Start-End: 265-575
atttcctcgctgcgcccctggcggagccgggtttgcctgctcttggccgccgccgccaccgccgcgcaagtcggacagccgtgagggctggaggggaaaccaggtcaccggttcgcagacgcggcgcggagcaggcgccccgggcccggaatctgcgatttccttctggttggctgtcctgcgtgggtgccaagttccacacatgatttaatgaataagaaggagatgtcagtgaaaaaagggatccagaatgattactaacctatgactcccaacagtatgacagaaaatggccttacagcctgggacaaaccgaagcactgtccagaccgagaacacgactggaagctagtaggaatgtctgaagcctgcctacataggaagagccattcagagaggcgcagcacgttgaaaaatgaacagtcgtcgccacatctcatccagaccacttggactagctcaatattccatctggaccatgatgatgtgaacgaccagagtgtctcaagtgcccagaccttccaaacggaggagaagaaatgtaaagggtacatccccagttacttagacaagga

SEQ ID NO: 191268 - DNA, 539 bp, Homo sapiens
  Payload ID: 17779
  Gene Name: thyroid hormone receptor, beta
  ENST ID: ENST00000428492
  CDS Start-End: 337-539
ctcctgctccgcgggctcggggcaagagcccgcaggctaccttccccgggcaggggcgctcaacccaaccggctccagggcactgatctgcgatttccttctggttggctgtcctgcgtgggtgccaagttccacacatgatttaatgaataagaagggggcttggaggctcatagcaaaggtccttgaagagagcaagaaaaagtcttcccaggaaaagtggacacctgagtgagtgttacaacgagaaggggggcatcccaggcaaggcagctaccaagcacaggtgtgaaggagatgtcagtgaaaaaagggatccagaatgattactaacctatgactcccaacagtatgacagaaaatggccttacagcctgggacaaaccgaagcactgtccagaccgagaacacgactggaagctagtaggaatgtctgaagcctgcctacataggaagagccattcagagaggcgcagcacgttgaaaaatgaacagtcgtcgccacatctcatccagaccacttggactagctcaatatt

SEQ ID NO: 191269 - DNA, 671 bp, Homo sapiens
  Payload ID: 17779
  Gene Name: thyroid hormone receptor, beta
  ENST ID: ENST00000415021
  CDS Start-End: 306-671
cttccccgggcaggggcgctcaacccaaccggctccagggcactgatctgcgatttccttctggttggctgtcctgcgtgggtgccaagttccacacatgatttaatgaataagaagctcgccagagaggcaaactccagcattttatatttcatctgcccccagtgacttcactgtaggaagaggaaatgcagaaaaacaaacgtcttgaagactgaaagcctgttattcaaagaggttagcagtagactgttggaagtaaggagatgtcagtgaaaaaagggatccagaatgattactaacctatgactcccaacagtatgacagaaaatggccttacagcctgggacaaaccgaagcactgtccagaccgagaacacgactggaagctagtaggaatgtctgaagcctgcctacataggaagagccattcagagaggcgcagcacgttgaaaaatgaacagtcgtcgccacatctcatccagaccacttggactagctcaatattccatctggaccatgatgatgtgaacgaccagagtgtctcaagtgcccagaccttccaaacggaggagaagaaatgtaaagggtacatccccagttacttagacaaggacgagctctgtgtagtgtgtggtgacaaagccaccgggtatcactaccgctgtatc

SEQ ID NO: 191270 - DNA, 896 bp, Homo sapiens
  Payload ID: 17779
  Gene Name: thyroid hormone receptor, beta
  ENST ID: ENST00000413780
  CDS Start-End: 501-896
cggcgcggccctggctgcggccgcctctcttcgcccaaggagttgacattttgcaggactcgcgcgacgcccagtcgccggcgctccccgggaccccgccgccgggaggagggggcggaggagggtggagactgcggggcttggccaaggaaggcgcacatcctcgggcgggcggccgtgacgcggcggggattaactttgcatgaataatatctgcgatttccttctggttggctgtcctgcgtgggtgccaagttccacacatgatttaatgaataagaagctcgccagagaggcaaactccagcattttatatttcatctgcccccagtgacttcactgtaggaagaggaaatgcagaaaaacaaacgtcttgaagactgaaagcctgttattcaaagaggttagcagtagactgttggaagtaagaaaatggccttacagcctgggacaaaccgaagcactgtccagaccgagaacacgactggaagctagtaggaatgtctgaagcctgcctacataggaagagccattcagagaggcgcagcacgttgaaaaatgaacagtcgtcgccacatctcatccagaccacttggactagctcaatattccatctggaccatgatgatgtgaacgaccagagtgtctcaagtgcccagaccttccaaacggaggagaagaaatgtaaagggtacatccccagttacttagacaaggacgagctctgtgtagtgtgtggtgacaaagccaccgggtatcactaccgctgtatcacgtgtgaaggctgcaagggtttctttagaagaaccattcagaaaaatctccatccatcctattcctgtaaatatgaaggaaaatgtgtcatagacaaagtcacgcgaaatcagtgccaggaa

SEQ ID NO: 191271 - DNA, 2571 bp, Homo sapiens
  Payload ID: 17779
  Gene Name: thyroid hormone receptor, beta
  Uniprot ID: P10828
  ENST ID: ENST00000416420
  CDS Start-End: 510-1895
aactttgcatgaataatgtgagtgcgcttggaaaagagacctcctgctccgcgggctcggggcaagagcccgcaggctaccttccccgggcaggggcgctcaacccaaccggctccagggcactggtaatttggctagaggaccgcgcggaggcagcgggatctgcgatttccttctggttggctgtcctgcgtgggtgccaagttccacacatgatttaatgaataagaagggggcttggaggctcatagcaaaggtccttgaagagagcaagaaaaagtcttcccaggaaaagtggacacctgagtgagtgttacaacgagaaggggggcatcccaggcaaggcagctaccaagcacaggtgtgaagtgacttcactgtaggaagaggaaatgcagaaaaacaaacgtcttgaagactgaaagcctgttattcaaagaggttagcagtagactgttggaagtaaggagatgtcagtgaaaaaagggatccagaatgattactaacctatgactcccaacagtatgacagaaaatggccttacagcctgggacaaaccgaagcactgtccagaccgagaacacgactggaagctagtaggaatgtctgaagcctgcctacataggaagagccattcagagaggcgcagcacgttgaaaaatgaacagtcgtcgccacatctcatccagaccacttggactagctcaatattccatctggaccatgatgatgtgaacgaccagagtgtctcaagtgcccagaccttccaaacggaggagaagaaatgtaaagggtacatccccagttacttagacaaggacgagctctgtgtagtgtgtggtgacaaagccaccgggtatcactaccgctgtatcacgtgtgaaggctgcaagggtttctttagaagaaccattcagaaaaatctccatccatcctattcctgtaaatatgaaggaaaatgtgtcatagacaaagtcacgcgaaatcagtgccaggaatgtcgctttaagaaatgcatctatgttggcatggcaacagatttggtgctggatgacagcaagaggctggccaagaggaagctgatagaggagaaccgggagaaaagacggcgggaagagctgcagaagtccatcgggcacaagccagagcccacagacgaggaatgggagctcatcaaaactgtcaccgaagcccatgtggcgaccaacgcccaaggcagccactggaagcaaaaacggaaattcctgccagaagacattggacaagcaccaatagtcaatgccccagaaggtggaaaggttgacttggaagccttcagccattttacaaaaatcatcacaccagcaattaccagagtggtggattttgccaaaaagttgcctatgttttgtgagctgccatgtgaagaccagatcatcctcctcaaaggctgctgcatggagatcatgtcccttcgcgctgctgtgcgctatgacccagaaagtgagactttaaccttgaatggggaaatggcagtgacacggggccagctgaaaaatgggggtcttggggtggtgtcagacgccatctttgacctgggcatgtctctgtcttctttcaacctggatgacactgaagtagccctccttcaggccgtcctgctgatgtcttcagatcgcccggggcttgcctgtgttgagagaatagaaaagtaccaagatagtttcctgctggcctttgaacactatatcaattaccgaaaacaccacgtgacacacttttggccaaaactcctgatgaaggtgacagatctgcggatgataggagcctgccatgccagccgcttcctgcacatgaaggtggaatgccccacagaactcttcccccctttgttcttggaagtgttcgaggattagactgactggattcattctcataattcctacagcactactgggtgtcatttcattccattgcctagctcttttttgtttgtttctttgtgttgggagggattatttgggagggaaaagggaagtagtccttggcatagacatggatgaaattgccccttgaatgcgggtacttgaaactattgcatttcgttctccggtcctgtgatgtgaatgctctgaaggttttatggttgtggaggtggggtgggggacaatcattaactcaccagcaccaagcatcaccagctcccacccgtccctggtccaagacttgagtcagcaaaatggcgccacaggacactaaagaagccttaaaaccaagataatacgaccacctccacccaatcctgatgttcgcagggctgaagttaacagagcacagaccacctttagttagatgtggctttcagccttttagggaaagactcgaacaaattttcatctattcaagagcatgctgtttgcagcactctttatggtctcctaggagcataacttggaatgtacaggaatatttgtgtcctaaaaaaatcagctgcccttccaatatcatttttataacgttatggtttaattcaagttatacaaaggtgtgactcaaggatgtgcaggtattgactgatggaggccaacaagg

SEQ ID NO: 191272 - DNA, 703 bp, Homo sapiens
  Payload ID: 17779
  Gene Name: thyroid hormone receptor, beta
  ENST ID: ENST00000453729
  CDS Start-End: 340-703
tgacattttgcaggactcgcgcgacgcccagtcgccggcgctccccgggaccccgccgccgggaggagggggcggaggagggtggagactgcggggcttggccaaggaaggcgcacatcctcgggcgggcggccgtgacgcggcggggattaactttgcatgaataatgtcctagaaaggaaagcacagcacatcgtgcagaaggccgcatgggaaaagggccagatctgcgatttccttctggttggctgtcctgcgtgggtgccaagttccacacatgatttaatgaataagaaggagatgtcagtgaaaaaagggatccagaatgattactaacctatgactcccaacagtatgacagaaaatggccttacagcctgggacaaaccgaagcactgtccagaccgagaacacgactggaagctagtaggaatgtctgaagcctgcctacataggaagagccattcagagaggcgcagcacgttgaaaaatgaacagtcgtcgccacatctcatccagaccacttggactagctcaatattccatctggaccatgatgatgtgaacgaccagagtgtctcaagtgcccagaccttccaaacggaggagaagaaatgtaaagggtacatccccagttacttagacaaggacgagctctgtgtagtgtgtggtgacaaagccaccgggtatcactaccgctgta

SEQ ID NO: 191273 - DNA, 1174 bp, Homo sapiens
  Payload ID: 17780
  Gene Name: thyroid hormone responsive
  Uniprot ID: Q92748
  ENST ID: ENST00000281030
  CDS Start-End: 22-462
attgtgtcagaggaagcaaccatgcaggtgctaaccaagcgttaccccaagaactgcctgctgaccgtcatggaccggtatgcagccgaggtgcacaacatggagcaggtggtgatgatccccagccttctgcgggacgtgcagctgagtgggcctgggggccaggcccaggctgaggcccctgatctctacacctacttcaccatgctcaaggccatctgtgtggatgtggaccatgggctgctgccgcgggaggagtggcaggccaaggtggcaggcagcgaagagaatggaaccgcagagacagaggaagtcgaggacgagagtgcctcaggagagctggacctggaagcccagttccacctgcacttctccagcctccatcacatcctcatgcacctcaccgagaaagcccaggaggtgacaaggaaataccaggaaatgacgggacaagtttggtagaccttggacactagggaagatcccttcacatgatagaagacagactctttgatgaggtcggcggagcagttcactagccaatgatgagagcagaaaggcctagacctgcagccagaagtgaaggcggctcagttctccgggatgcttctctacctcctgagcaccaattcctggattccagtcactggctcacctttagaatgtctgttgctattcactgctcccctcgctcctcttaacagcttggggaggtgaccagtggttcaggagggactagacaattacctgtccagtgtggtatggtaggaagagtgtaggtgttggcacgtgaccaaaattcacatccctcctcatggcagtcattcagtatgtgtacttgtacaagttatttaacccattggagcctaaattccctcatctataaaatggggataatattatctacctcacaagcttatgaaaactaaacatgatgaatcaaaagcacttggcatgtgagggctattaaaatagcctgattttttttttctccccctctccccaatgtatttgctctggcccttgctttttaccctccagagctaagaggtagcagagtctcttgggatgagtgattcaccctcttacttggcgaccactgatgagatcaacaacaggtgaactataaacctattatttattgcagaactaataaaaaatccaaagccttgta

SEQ ID NO: 191274 - DNA, 2923 bp, Homo sapiens
  Payload ID: 17781
  Gene Name: thyroid peroxidase
  Uniprot ID: P07202
  ENST ID: ENST00000346956
  CDS Start-End: 2-2671
aatgagagcgctcgctgtgctgtctgtcacgctggttatggcctgcacagaagccttcttccccttcatctcgagagggaaagaactcctttggggaaagcctgaggagtctcgtgtctctagcgtcttggaggaaagcaagcgcctggtggacaccgccatgtacgccacgatgcagagaaacctcaagaaaagaggaatcctttctccagctcagcttctgtctttttccaaacttcctgagccaacaagcggagtgattgcccgagcagcagagataatggaaacatcaatacaagcgatgaaaagaaaagtcaacctgaaaactcaacaatcacagcatccaacggatgctttatcagaagatctgctgagcatcattgcaaacatgtctggatgtctcccttacatgctgcccccaaaatgcccaaacacttgcctggcgaacaaatacaggcccatcacaggagcttgcaacaacagagaccaccccagatggggcgcctccaacacggccctggcacgatggctccctccagtctatgaggacggcttcagtcagccccgaggctggaaccccggcttcttgtacaacgggttcccactgcccccggtccgggaggtgacaagacatgtcattcaagtttcaaatgaggttgtcacagatgatgaccgctattctgacctcctgatggcatggggacaatacatcgaccacgacatcgcgttcacaccacagagcaccagcaaagctgccttcgggggaggggctgactgccagatgacttgtgagaaccaaaacccatgttttcccatacaactcccggaggaggcccggccggccgcgggcaccgcctgtctgcccttctaccgctcttcggccgcctgcggcaccggggaccaaggcgcgctctttgggaacctgtccacggccaacccgcggcagcagatgaacgggttgacctcgttcctggacgcgtccaccgtgtatggcagctccccggccctagagaggcagctgcggaactggaccagtgccgaagggctgctccgcgtccacgcgcgcctccgggactccggccgcgcctacctgcccttcgtgccgccacgcgcgcctgcggcctgtgcgcccgagcccggcatccccggagagacccgcgggccctgcttcctggccggagacggccgcgccagcgaggtcccctccctgacggcactgcacacgctgtggctgcgcgagcacaaccgcctggccgcggcgctcaaggccctcaatgcgcactggagcgcggacgccgtgtaccaggaggcgcgcaaggtcgtgggcgctctgcaccagatcatcaccctgagggattacatccccaggatcctgggacccgaggccttccagcagtacgtgggtccctatgaaggctatgactccaccgccaaccccactgtgtccaacgtgttctccacagccgccttccgcttcggccatgccacgatccacccgctggtgaggaggctggacgccagcttccaggagcaccccgacctgcccgggctgtggctgcaccaggctttcttcagcccatggacattactccgtggaggtggtttggacccactaatacgaggccttcttgcaagaccagccaaactgcaggtgcaggatcagctgatgaacgaggagctgacggaaaggctctttgtgctgtccaattccagcaccttggatctggcgtccatcaacctgcagaggggccgggaccacgggctgccaggttacaatgagtggagggagttctgcggcctgcctcgcctggagacccccgctgacctgagcacagccatcgccagcaggagcgtggccgacaagatcctggacttgtacaagcatcctgacaacatcgatgtctggctgggaggcttagctgaaaacttcctccccagggctcggacagggcccctgtttgcctgtctcattgggaagcagatgaaggctctgcgggacggtgactggttttggtgggagaacagccacgtcttcacggatgcacagaggcgtgagctggagaagcactccctgtctcgggtcatctgtgacaacactggcctcaccagggtgcccatggatgccttccaagtcggcaaattccccgaagactttgagtcttgtgacagcatcactggcatgaacctggaggcctggagggaaacctttcctcaagacgacaagtgtggcttcccagagagcgtggagaatggggactttgtgcactgtgaggagtctgggaggcgcgtgctggtgtattcctgccggcacgggtatgagctccaaggccgggagcagctcacttgcacccaggaaggatgggatttccagcctcccctctgcaaagactccgggaggctccctcgggtgacttggatctccatgtcgctggctgctctgctgatcggaggcttcgcaggtctcacctcgacggtgatttgcaggtggacacgcactggcactaaatccacactgcccatctcggagacaggcggaggaactcccgagctgagatgcggaaagcaccaggccgtagggacctcaccgcagcgggccgcagctcaggactcggagcaggagagtgctgggatggaaggccgggatactcacaggctgccgagagccctctgagggcaaagtggcaggacactgcagaacagcttcatgttcccaaaatcaccgtacgactcttttccaaacacaggcaaatccgaaatcagcaggacgactgttttcccaacacgggtaaatctagtaccatgtcgtagttactctcaggcatggatgaataaatgttatagctgcatttgtctggccttttcttgtaaacattgcctgatttgttccttctggggctttgccattaaaatgtatttacagatt

SEQ ID NO: 191275 - DNA, 3145 bp, Homo sapiens
  Payload ID: 17781
  Gene Name: thyroid peroxidase
  Uniprot ID: P07202
  ENST ID: ENST00000345913
  CDS Start-End: 92-2893
ggaaggcaattaaggcgcccatttcagaagagttacagccgtgaaaattactcagcagtgcagttggctgagaagaggaaaaaaggtcagaatgagagcgctcgctgtgctgtctgtcacgctggttatggcctgcacagaagccttcttccccttcatctcgagagggaaagaactcctttggggaaagcctgaggagtctcgtgtctctagcgtcttggaggaaagcaagcgcctggtggacaccgccatgtacgccacgatgcagagaaacctcaagaaaagaggaatcctttctccagctcagcttctgtctttttccaaacttcctgagccaacaagcggagtgattgcccgagcagcagagataatggaaacatcaatacaagcgatgaaaagaaaagtcaacctgaaaactcaacaatcacagcatccaacggatgctttatcagaagatctgctgagcatcattgcaaacatgtctggatgtctcccttacatgctgcccccaaaatgcccaaacacttgcctggcgaacaaatacaggcccatcacaggagcttgcaacaacagagaccaccccagatggggcgcctccaacacggccctggcacgatggctccctccagtctatgaggacggcttcagtcagccccgaggctggaaccccggcttcttgtacaacgggttcccactgcccccggtccgggaggtgacaagacatgtcattcaagtttcaaatgaggttgtcacagatgatgaccgctattctgacctcctgatggcatggggacaatacatcgaccacgacatcgcgttcacaccacagagcaccagcaaagctgccttcgggggaggggctgactgccagatgacttgtgagaaccaaaacccatgttttcccatacaactcccggaggaggcccggccggccgcgggcaccgcctgtctgcccttctaccgctcttcggccgcctgcggcaccggggaccaaggcgcgctctttgggaacctgtccacggccaacccgcggcagcagatgaacgggttgacctcgttcctggacgcgtccaccgtgtatggcagctccccggccctagagaggcagctgcggaactggaccagtgccgaagggctgctccgcgtccacgcgcgcctccgggactccggccgcgcctacctgcccttcgtgccgccacgcgcgcctgcggcctgtgcgcccgagcccggcatccccggagagacccgcgggccctgcttcctggccggagacggccgcgccagcgaggtcccctccctgacggcactgcacacgctgtggctgcgcgagcacaaccgcctggccgcggcgctcaaggccctcaatgcgcactggagcgcggacgccgtgtaccaggaggcgcgcaaggtcgtgggcgctctgcaccagatcatcaccctgagggattacatccccaggatcctgggacccgaggccttccagcagtacgtgggtccctatgaaggctatgactccaccgccaaccccactgtgtccaacgtgttctccacagccgccttccgcttcggccatgccacgatccacccgctggtgaggaggctggacgccagcttccaggagcaccccgacctgcccgggctgtggctgcaccaggctttcttcagcccatggacattactccgtggaggtggtttggacccactaatacgaggccttcttgcaagaccagccaaactgcaggtgcaggatcagctgatgaacgaggagctgacggaaaggctctttgtgctgtccaattccagcaccttggatctggcgtccatcaacctgcagaggggccgggaccacgggctgccaggttacaatgagtggagggagttctgcggcctgcctcgcctggagacccccgctgacctgagcacagccatcgccagcaggagcgtggccgacaagatcctggacttgtacaagcatcctgacaacatcgatgtctggctgggaggcttagctgaaaacttcctccccagggctcggacagggcccctgtttgcctgtctcattgggaagcagatgaaggctctgcgggacggtgactggttttggtgggagaacagccacgtcttcacggatgcacagaggcgtgagctggagaagcactccctgtctcgggtcatctgtgacaacactggcctcaccagggtgcccatggatgccttccaagtcggcaaattccccgaagactttgagtcttgtgacagcatcactggcatgaacctggaggcctggagggaaacctttcctcaagacgacaagtgtggcttcccagagagcgtggagaatggggactttgtgcactgtgaggagtctgggaggcgcgtgctggtgtattcctgccggcacgggtatgagctccaaggccgggagcagctcacttgcacccaggaaggatgggatttccagcctcccctctgcaaagatgtgaacgagtgtgcagacggtgcccaccccccctgccacgcctctgcgaggtgcagaaacaccaaaggcggcttccagtgtctctgcgcggacccctacgagttaggagacgatgggagaacctgcgtagactccgggaggctccctcgggtgacttggatctccatgtcgctggctgctctgctgatcggaggcttcgcaggtctcacctcgacggtgatttgcaggtggacacgcactggcactaaatccacactgcccatctcggagacaggcggaggaactcccgagctgagatgcggaaagcaccaggccgtagggacctcaccgcagcgggccgcagctcaggactcggagcaggagagtgctgggatggaaggccgggatactcacaggctgccgagagccctctgagggcaaagtggcaggacactgcagaacagcttcatgttcccaaaatcaccgtacgactcttttccaaacacaggcaaatccgaaatcagcaggacgactgttttcccaacacgggtaaatctagtaccatgtcgtagttactctcaggcatggatgaataaatgttatagctgcatttgtctggccttttcttgtaaacattgcctgatttgttccttctggggctttgccattaaaatgtatttacagatt

SEQ ID NO: 191276 - DNA, 3138 bp, Homo sapiens
  Payload ID: 17781
  Gene Name: thyroid peroxidase
  Uniprot ID: P07202
  ENST ID: ENST00000329066
  CDS Start-End: 84-2885
aggcaattaaggcgcccatttcagaagagttacagccgtgaaaattactcagcagtgcagttggctgagaagaggaaaaaagaatgagagcgctcgctgtgctgtctgtcacgctggttatggcctgcacagaagccttcttccccttcatctcgagagggaaagaactcctttggggaaagcctgaggagtctcgtgtctctagcgtcttggaggaaagcaagcgcctggtggacaccgccatgtacgccacgatgcagagaaacctcaagaaaagaggaatcctttctccagctcagcttctgtctttttccaaacttcctgagccaacaagcggagtgattgcccgagcagcagagataatggaaacatcaatacaagcgatgaaaagaaaagtcaacctgaaaactcaacaatcacagcatccaacggatgctttatcagaagatctgctgagcatcattgcaaacatgtctggatgtctcccttacatgctgcccccaaaatgcccaaacacttgcctggcgaacaaatacaggcccatcacaggagcttgcaacaacagagaccaccccagatggggcgcctccaacacggccctggcacgatggctccctccagtctatgaggacggcttcagtcagccccgaggctggaaccccggcttcttgtacaacgggttcccactgcccccggtccgggaggtgacaagacatgtcattcaagtttcaaatgaggttgtcacagatgatgaccgctattctgacctcctgatggcatggggacaatacatcgaccacgacatcgcgttcacaccacagagcaccagcaaagctgccttcgggggaggggctgactgccagatgacttgtgagaaccaaaacccatgttttcccatacaactcccggaggaggcccggccggccgcgggcaccgcctgtctgcccttctaccgctcttcggccgcctgcggcaccggggaccaaggcgcgctctttgggaacctgtccacggccaacccgcggcagcagatgaacgggttgacctcgttcctggacgcgtccaccgtgtatggcagctccccggccctagagaggcagctgcggaactggaccagtgccgaagggctgctccgcgtccacgcgcgcctccgggactccggccgcgcctacctgcccttcgtgccgccacgcgcgcctgcggcctgtgcgcccgagcccggcatccccggagagacccgcgggccctgcttcctggccggagacggccgcgccagcgaggtcccctccctgacggcactgcacacgctgtggctgcgcgagcacaaccgcctggccgcggcgctcaaggccctcaatgcgcactggagcgcggacgccgtgtaccaggaggcgcgcaaggtcgtgggcgctctgcaccagatcatcaccctgagggattacatccccaggatcctgggacccgaggccttccagcagtacgtgggtccctatgaaggctatgactccaccgccaaccccactgtgtccaacgtgttctccacagccgccttccgcttcggccatgccacgatccacccgctggtgaggaggctggacgccagcttccaggagcaccccgacctgcccgggctgtggctgcaccaggctttcttcagcccatggacattactccgtggaggtggtttggacccactaatacgaggccttcttgcaagaccagccaaactgcaggtgcaggatcagctgatgaacgaggagctgacggaaaggctctttgtgctgtccaattccagcaccttggatctggcgtccatcaacctgcagaggggccgggaccacgggctgccaggttacaatgagtggagggagttctgcggcctgcctcgcctggagacccccgctgacctgagcacagccatcgccagcaggagcgtggccgacaagatcctggacttgtacaagcatcctgacaacatcgatgtctggctgggaggcttagctgaaaacttcctccccagggctcggacagggcccctgtttgcctgtctcattgggaagcagatgaaggctctgcgggacggtgactggttttggtgggagaacagccacgtcttcacggatgcacagaggcgtgagctggagaagcactccctgtctcgggtcatctgtgacaacactggcctcaccagggtgcccatggatgccttccaagtcggcaaattccccgaagactttgagtcttgtgacagcatcactggcatgaacctggaggcctggagggaaacctttcctcaagacgacaagtgtggcttcccagagagcgtggagaatggggactttgtgcactgtgaggagtctgggaggcgcgtgctggtgtattcctgccggcacgggtatgagctccaaggccgggagcagctcacttgcacccaggaaggatgggatttccagcctcccctctgcaaagatgtgaacgagtgtgcagacggtgcccaccccccctgccacgcctctgcgaggtgcagaaacaccaaaggcggcttccagtgtctctgcgcggacccctacgagttaggagacgatgggagaacctgcgtagactccgggaggctccctcgggtgacttggatctccatgtcgctggctgctctgctgatcggaggcttcgcaggtctcacctcgacggtgatttgcaggtggacacgcactggcactaaatccacactgcccatctcggagacaggcggaggaactcccgagctgagatgcggaaagcaccaggccgtagggacctcaccgcagcgggccgcagctcaggactcggagcaggagagtgctgggatggaaggccgggatactcacaggctgccgagagccctctgagggcaaagtggcaggacactgcagaacagcttcatgttcccaaaatcaccgtacgactcttttccaaacacaggcaaatccgaaatcagcaggacgactgttttcccaacacgggtaaatctagtaccatgtcgtagttactctcaggcatggatgaataaatgttatagctgcatttgtctggccttttcttgtaaacattgcctgatttgttccttctggggctttgccattaaaatgtatttacagatta

SEQ ID NO: 191277 - DNA, 2283 bp, Homo sapiens
  Payload ID: 17781
  Gene Name: thyroid peroxidase
  Uniprot ID: P07202
  ENST ID: ENST00000382198
  CDS Start-End: 1-2283
atgagagcgctcgctgtgctgtctgtcacgctggttatggcctgcacagaagccttcttccccttcatctcgagagggaaagaactcctttggggaaagcctgaggagtctcgtgtctctagcgtcttggaggaaagcaagcgcctggtggacaccgccatgtacgccacgatgcagagaaacctcaagaaaagaggaatcctttctccagctcagcttctgtctttttccaaacttcctgagccaacaagcggagtgattgcccgagcagcagagataatggaaacatcaatacaagcgatgaaaagaaaagtcaacctgaaaactcaacaatcacagcatccaacggatgctttatcagaagatctgctgagcatcattgcaaacatgtctggatgtctcccttacatgctgcccccaaaatgcccaaacacttgcctggcgaacaaatacaggcccatcacaggagcttgcaacaacagagaccaccccagatggggcgcctccaacacggccctggcacgatggctccctccagtctatgaggacggcttcagtcagccccgaggctggaaccccggcttcttgtacaacgggttcccactgcccccggtccgggaggtgacaagacatgtcattcaagtttcaaatgaggttgtcacagatgatgaccgctattctgacctcctgatggcatggggacaatacatcgaccacgacatcgcgttcacaccacagagcaccagcaaagctgccttcgggggaggggctgactgccagatgacttgtgagaaccaaaacccatgttttcccatacaaatcatcaccctgagggattacatccccaggatcctgggacccgaggccttccagcagtacgtgggtccctatgaaggctatgactccaccgccaaccccactgtgtccaacgtgttctccacagccgccttccgcttcggccatgccacgatccacccgctggtgaggaggctggacgccagcttccaggagcaccccgacctgcccgggctgtggctgcaccaggctttcttcagcccatggacattactccgtggaggtggtttggacccactaatacgaggccttcttgcaagaccagccaaactgcaggtgcaggatcagctgatgaacgaggagctgacggaaaggctctttgtgctgtccaattccagcaccttggatctggcgtccatcaacctgcagaggggccgggaccacgggctgccaggttacaatgagtggagggagttctgcggcctgcctcgcctggagacccccgctgacctgagcacagccatcgccagcaggagcgtggccgacaagatcctggacttgtacaagcatcctgacaacatcgatgtctggctgggaggcttagctgaaaacttcctccccagggctcggacagggcccctgtttgcctgtctcattgggaagcagatgaaggctctgcgggacggtgactggttttggtgggagaacagccacgtcttcacggatgcacagaggcgtgagctggagaagcactccctgtctcgggtcatctgtgacaacactggcctcaccagggtgcccatggatgccttccaagtcggcaaattccccgaagactttgagtcttgtgacagcatcactggcatgaacctggaggcctggagggaaacctttcctcaagacgacaagtgtggcttcccagagagcgtggagaatggggactttgtgcactgtgaggagtctgggaggcgcgtgctggtgtattcctgccggcacgggtatgagctccaaggccgggagcagctcacttgcacccaggaaggatgggatttccagcctcccctctgcaaagatgtgaacgagtgtgcagacggtgcccaccccccctgccacgcctctgcgaggtgcagaaacaccaaaggcggcttccagtgtctctgcgcggacccctacgagttaggagacgatgggagaacctgcgtagactccgggaggctccctcgggtgacttggatctccatgtcgctggctgctctgctgatcggaggcttcgcaggtctcacctcgacggtgatttgcaggtggacacgcactggcactaaatccacactgcccatctcggagacaggcggaggaactcccgagctgagatgcggaaagcaccaggccgtagggacctcaccgcagcgggccgcagctcaggactcggagcaggagagtgctgggatggaaggccgggatactcacaggctgccgagagccctctga

SEQ ID NO: 191278 - DNA, 2956 bp, Homo sapiens
  Payload ID: 17781
  Gene Name: thyroid peroxidase
  Uniprot ID: P07202
  ENST ID: ENST00000382201
  CDS Start-End: 73-2703
catttcagaagagttacagccgtgaaaattactcagcagtgcagttggctgagaagaggaaaaaaggtcagaatgagagcgctcgctgtgctgtctgtcacgctggttatggcctgcacagaagccttcttccccttcatctcgagagggaaagaactcctttggggaaagcctgaggagtctcgtgtctctagcgtcttggaggaaagcaagcgcctggtggacaccgccatgtacgccacgatgcagagaaacctcaagaaaagaggaatcctttctccagctcagcttctgtctttttccaaacttcctgagccaacaagcggagtgattgcccgagcagcagagataatggaaacatcaatacaagcgatgaaaagaaaagtcaacctgaaaactcaacaatcacagcatccaacggatgctttatcagaagatctgctgagcatcattgcaaacatgtctggatgtctcccttacatgctgcccccaaaatgcccaaacacttgcctggcgaacaaatacaggcccatcacaggagcttgcaacaacagagaccaccccagatggggcgcctccaacacggccctggcacgatggctccctccagtctatgaggacggcttcagtcagccccgaggctggaaccccggcttcttgtacaacgggttcccactgcccccggtccgggaggtgacaagacatgtcattcaagtttcaaatgaggttgtcacagatgatgaccgctattctgacctcctgatggcatggggacaatacatcgaccacgacatcgcgttcacaccacagagcaccagcaaagctgccttcgggggaggggctgactgccagatgacttgtgagaaccaaaacccatgttttcccatacaactcccggaggaggcccggccggccgcgggcaccgcctgtctgcccttctaccgctcttcggccgcctgcggcaccggggaccaaggcgcgctctttgggaacctgtccacggccaacccgcggcagcagatgaacgggttgacctcgttcctggacgcgtccaccgtgtatggcagctccccggccctagagaggcagctgcggaactggaccagtgccgaagggctgctccgcgtccacgcgcgcctccgggactccggccgcgcctacctgcccttcgtgccgccacgcgcgcctgcggcctgtgcgcccgagcccggcatccccggagagacccgcgggccctgcttcctggccggagacggccgcgccagcgaggtcccctccctgacggcactgcacacgctgtggctgcgcgagcacaaccgcctggccgcggcgctcaaggccctcaatgcgcactggagcgcggacgccgtgtaccaggaggcgcgcaaggtcgtgggcgctctgcaccagatcatcaccctgagggattacatccccaggatcctgggacccgaggccttccagcagtacgtgggtccctatgaaggctatgactccaccgccaaccccactgtgtccaacgtgttctccacagccgccttccgcttcggccatgccacgatccacccgctggtgaggaggctggacgccagcttccaggagcaccccgacctgcccgggctgtggctgcaccaggctttcttcagcccatggacattactccgtggaggttacaatgagtggagggagttctgcggcctgcctcgcctggagacccccgctgacctgagcacagccatcgccagcaggagcgtggccgacaagatcctggacttgtacaagcatcctgacaacatcgatgtctggctgggaggcttagctgaaaacttcctccccagggctcggacagggcccctgtttgcctgtctcattgggaagcagatgaaggctctgcgggacggtgactggttttggtgggagaacagccacgtcttcacggatgcacagaggcgtgagctggagaagcactccctgtctcgggtcatctgtgacaacactggcctcaccagggtgcccatggatgccttccaagtcggcaaattccccgaagactttgagtcttgtgacagcatcactggcatgaacctggaggcctggagggaaacctttcctcaagacgacaagtgtggcttcccagagagcgtggagaatggggactttgtgcactgtgaggagtctgggaggcgcgtgctggtgtattcctgccggcacgggtatgagctccaaggccgggagcagctcacttgcacccaggaaggatgggatttccagcctcccctctgcaaagatgtgaacgagtgtgcagacggtgcccaccccccctgccacgcctctgcgaggtgcagaaacaccaaaggcggcttccagtgtctctgcgcggacccctacgagttaggagacgatgggagaacctgcgtagactccgggaggctccctcgggtgacttggatctccatgtcgctggctgctctgctgatcggaggcttcgcaggtctcacctcgacggtgatttgcaggtggacacgcactggcactaaatccacactgcccatctcggagacaggcggaggaactcccgagctgagatgcggaaagcaccaggccgtagggacctcaccgcagcgggccgcagctcaggactcggagcaggagagtgctgggatggaaggccgggatactcacaggctgccgagagccctctgagggcaaagtggcaggacactgcagaacagcttcatgttcccaaaatcaccgtacgactcttttccaaacacaggcaaatccgaaatcagcaggacgactgttttcccaacacgggtaaatctagtaccatgtcgtagttactctcaggcatggatgaataaatgttatagctgcatttgtctggccttttcttgtaaacattgcctgatttgttccttctggggctttgccattaaaatgtatttacagatta

SEQ ID NO: 191279 - DNA, 1155 bp, Homo sapiens
  Payload ID: 17781
  Gene Name: thyroid peroxidase
  ENST ID: ENST00000382269
  CDS Start-End: 87-611
ggaaggcaattaaggcgcccatttcagaagagttacagccgtgaaaattactcagcagtgcagttggctgagaagaggaaaaaagaatgagagcgctcgctgtgctgtctgtcacgctggttatggcctgcacagaagccttcttccccttcatctcgagagggaaagaactcctttggggaaagcctgaggagtctcgtgtctctagcgtcttggaggaaagcaagcgcctggtggacaccgccatgtacgccacgatgcagagaaacctcaagaaaagaggaatcctttctccagctcagcttctgtctttttccaaacttcctgagccaacaagcggagtgattgcccgagcagcagagataatggaaacatcaatacaagcgatgaaaagaaaagtcaacctgaaaactcaacaatcacagcatccaacggatgctttatcagaagatctgctgagcatcattgcaaacatgtctggatgtctcccttacatgctgcccccaaaatgcccaaacacttgcctggcgaacaaatacaggcccatcacaggagcttgcaacaacagaaaaatgaaatataagcccgaccattccgaaactgccaactaacctgtttaactaggaaccttccagcaggacagaccaaataatgcgaaactgaagccagtcaaagcttttctccaatgacgtctacatccacctgcaaagcctgcccctgggtcctgcagtagagcctgaacctttctttggtttgatgcttcctgattcataaatcatgatcactcaaaaaaaactctttaaaaaatgtattgtgcctaagtttacattttaacaacctcaagaccagggcctcagccggcagcagtgagttcctgctcggcccttctgaaaggccctgctgctgtcttgggcgcctctgccccagctgctgggcgggctccactgacgctcctgggagaatctctgctgaccacacaatgacattggcactgggagctgtgatctggggacacttagatctgagctggtttctctccttctgtggtaacagctacagttttcattaagaattcacagcatctggatctaaaatctcctacgttcaaggcttcacacattgtattccaccaaaaataaaacatctgctcagaaa

SEQ ID NO: 191280 - DNA, 542 bp, Homo sapiens
  Payload ID: 17781
  Gene Name: thyroid peroxidase
  ENST ID: ENST00000423320
  CDS Start-End: 28-542
actctgtctccttccgttaattttagaatgagagcgctcgctgtgctgtctgtcacgctggttatggcctgcacagaagccttcttccccttcatctcgagagggaaagaactcctttggggaaagcctgaggagtctcgtgtctctagcgtcttggaggaaagcaagcgcctggtggacaccgccatgtacgccacgatgcagagaaacctcaagaaaagaggaatcctttctccagctcagcttctgtctttttccaaacttcctgagccaacaagcggagtgattgcccgagcagcagagataatggaaacatcaatacaagcgatgaaaagaaaagtcaacctgaaaactcaacaatcacagcatccaacggatgctttatcagaagatctgctgagcatcattgcaaacatgtctggatgtctcccttacatgctgcccccaaaatgcccaaacacttgcctggcgaacaaatacaggcccatcacaggagcttgcaacaacagagaccaccccagatggggcgcctccaacacggc

SEQ ID NO: 191281 - DNA, 1282 bp, Homo sapiens
  Payload ID: 17781
  Gene Name: thyroid peroxidase
  ENST ID: ENST00000446278
  CDS Start-End: 1-1214
cctatgaaggctatgactccaccgccaaccccactgtgtccaacgtgttctccacagccgccttccgcttcggccatgccacgatccacccgctggtgaggaggctggacgccagcttccaggagcaccccgacctgcccgggctgtggctgcaccaggctttcttcagcccatggacattactccgtggaggttacaatgagtggagggagttctgcggcctgcctcgcctggagacccccgctgacctgagcacagccatcgccagcaggagcgtggccgacaagatcctggacttgtacaagcatcctgacaacatcgatgtctggctgggaggcttagctgaaaacttcctccccagggctcggacagggcccctgtttgcctgtctcattgggaagcagatgaaggctctgcgggacggtgactggttttggtgggagaacagccacgtcttcacggatgcacagaggcgtgagctggagaagcactccctgtctcgggtcatctgtgacaacactggcctcaccagggtgcccatggatgccttccaagtcggcaaattccccgaagactttgagtcttgtgacagcatcactggcatgaacctggaggcctggagggaaacctttcctcaagacgacaagtgtggcttcccagagagcgtggagaatggggactttgtgcactgtgaggagtctgggaggcgcgtgctggtgtattcctgccggcacgggtatgagctccaaggccgggagcagctcacttgcacccaggaaggatgggatttccagcctcccctctgcaaagatgtgaacgagtgtgcagacggtgcccaccccccctgccacgcctctgcgaggtgcagaaacaccaaaggcggcttccagtgtctctgcgcggacccctacgagttaggagacgatgggagaacctgcgtagactccgggaggctccctcgggtgacttggatctccatgtcgctggctgctctgctgatcggaggcttcgcaggtctcacctcgacggtgatttgcaggtggagagtgctgggatggaaggccgggatactcacaggctgccgagagccctctgagggcaaagtggcaggacactgcagaacagcttcatgttcccaaaatcaccgtacgactcttttccaaacacaggcaaatccgaaatcagcaggacgactgttttcccaacacgggtaaatctagtaccatgtcgtagttactctcaggcatggatgaataaatgttatagctgcatttgtctggcc

SEQ ID NO: 191282 - DNA, 5391 bp, Homo sapiens
  Payload ID: 17781
  Gene Name: thyroid peroxidase
  ENST ID: ENST00000422464
  CDS Start-End: 1-2595
cagcttctgtctttttccaaacttcctgagccaacaagcggagtgattgcccgagcagcagagataatggaaacatcaatacaagcgatgaaaagaaaagtcaacctgaaaactcaacaatcacagcatccaacggatgctttatcagaagatctgctgagcatcattgcaaacatgtctggatgtctcccttacatgctgcccccaaaatgcccaaacacttgcctggcgaacaaatacaggcccatcacaggagcttgcaacaacagagaccaccccagatggggcgcctccaacacggccctggcacgatggctccctccagtctatgaggacggcttcagtcagccccgaggctggaaccccggcttcttgtacaacgggttcccactgcccccggtccgggaggtgacaagacatgtcattcaagtttcaaatgaggttgtcacagatgatgaccgctattctgacctcctgatggcatggggacaatacatcgaccacgacatcgcgttcacaccacagagcaccagcaaagctgccttcgggggaggggctgactgccagatgacttgtgagaaccaaaacccatgttttcccatacaactcccggaggaggcccggccggccgcgggcaccgcctgtctgcccttctaccgctcttcggccgcctgcggcaccggggaccaaggcgcgctctttgggaacctgtccacggccaacccgcggcagcagatgaacgggttgacctcgttcctggacgcgtccaccgtgtatggcagctccccggccctagagaggcagctgcggaactggaccagtgccgaagggctgctccgcgtccacgcgcgcctccgggactccggccgcgcctacctgcccttcgtgccgccacgcgcgcctgcggcctgtgcgcccgagcccggcatccccggagagacccgcgggccctgcttcctggccggagacggccgcgccagcgaggtcccctccctgacggcactgcacacgctgtggctgcgcgagcacaaccgcctggccgcggcgctcaaggccctcaatgcgcactggagcgcggacgccgtgtaccaggaggcgcgcaaggtcgtgggcgctctgcaccagatcatcaccctgagggattacatccccaggatcctgggacccgaggccttccagcagtacgtgggtccctatgaaggctatgactccaccgccaaccccactgtgtccaacgtgttctccacagccgccttccgcttcggccatgccacgatccacccgctggtgaggaggctggacgccagcttccaggagcaccccgacctgcccgggctgtggctgcaccaggctttcttcagcccatggacattactccgtggaggtggtttggacccactaatacgaggccttcttgcaagaccagccaaactgcaggtgcaggatcagctgatgaacgaggagctgacggaaaggctctttgtgctgtccaattccagcaccttggatctggcgtccatcaacctgcagaggggccgggaccacgggctgccaggttacaatgagtggagggagttctgcggcctgcctcgcctggagacccccgctgacctgagcacagccatcgccagcaggagcgtggccgacaagatcctggacttgtacaagcatcctgacaacatcgatgtctggctgggaggcttagctgaaaacttcctccccagggctcggacagggcccctgtttgcctgtctcattgggaagcagatgaaggctctgcgggacggtgactggttttggtgggagaacagccacgtcttcacggatgcacagaggcgtgagctggagaagcactccctgtctcgggtcatctgtgacaacactggcctcaccagggtgcccatggatgccttccaagtcggcaaattccccgaagactttgagtcttgtgacagcatcactggcatgaacctggaggcctggagggaaacctttcctcaagacgacaagtgtggcttcccagagagcgtggagaatggggactttgtgcactgtgaggagtctgggaggcgcgtgctggtgtattcctgccggcacgggtatgagctccaaggccgggagcagctcacttgcacccaggaaggatgggatttccagcctcccctctgcaaagactccgggaggctccctcgggtgacttggatctccatgtcgctggctgctctgctgatcggaggcttcgcaggtctcacctcgacggtgatttgcaggtggacacgcactggcactaaatccacactgcccatctcggagacaggcggaggaactcccgagctgagatgcggaaagcaccaggccgtagggacctcaccgcagcgggccgcagctcaggactcggagcaggtgggccacaccatgccgcatgtttccagctgccaccgcagtggttggacaggatctgggtgtcggagcagctctgctggggctccctgcatatttctgtttactccgtgtttcctagtccgttctgcaccttcctccgggaggttttatttacaagctaatgacagtgagccagaatgtgagcctgcttagtgagaggaatgaagatgccttccatttgtacaaaccggttccaaaactaagggctcactttcaggcgtttgcttccacttaatctgaggatcggctggaagcacaggagaggaaggagaagctgaagcaaaaccctgacttttaaattctgatttttaagtggaatagttataatcagtgtggaaaaatgtgtatgtttatgttttacccccttaccttgtatgcagaaccccaagggaggccatatcaaaaactcacttgtgtaagtctgacttttgaactgagagaagcagagagcagaacagtggcctccagaggggagtggggaggtgctggtcacaggcacaaagtctcaggcaggaggagggcgcctcaggtctgctgcacggcatggggcgcacgcttcctcataatgatcgcatgtttcaaaattgctaaaacaataggtttttttttttttgagatagagtcttgctctgtcgcccagactggagtgcagtggcacaaacatagctcactgcagcttcgaccctcctgctcaagcaatcctcttgcctcagcctcttgcgtggctgggtctacaggcgctcaccaccatgcctggctaatttttaaattttttacagagatgcagcctcgctatgctgcccaggctggtgttgagcccttaggcccaagagatcctccagtctgaaactcccaaagtgctgggaccacagccacccactaaaataatagattttaaatgttctaactgccaaaaaaagatgtgaggtgatatgttaattaatttgatataatctctccacaatgtaaaggtatcaaaaccatgtttaaaacataaatatatgcagttagtatttgtcaactaaaaatacaaattttaatttaaacaaagtcacttacttgcatacaggaggggggcattgccaacatgatcggtctcccttctgaaattcagtgtgagattagatcctgtcctcggagataagcagagcccagggtcgttctgctgagagcacattcgtctttgcacctggctcccacgcatggaaccaaaaggacctggcctggaagtgaggctctttgtgaatttaaatagcttttccagccacagcaagggcagtgccagcaagtcccctgggcccctaattagtctgactgacaccaggggcaaggccaggcgttctgttcatctgtggtcgcagggacctgtgtgctcagcacggcttcttcctgaaggaccctgcctgcggattgcagatcccactctgtgagtaggaacctttgccacgtggatcctctgtggcctcctgcaaacaagcatttgtccggaagccagaaacttccctccagcatgacaagcaagaaggatggctcatctcgccagcggtcctttgtgaaaagagctcctgtccaggcccttctgtcttgtatcaagtgtgtgctgttactggagcagtcagaattcagacgttattaatgtttgttctgcatttttgcaggagagtgctgggatggaaggccgggatactcacaggctgccgagagccctctgagggcaaagtggcaggacactgcagaacagcttcatgttcccaaaatcaccgtacgactcttttccaaacacaggcaaatccgaaatcagcaggacgactgttttcccaacacgggtaaatctagtaccatgtcgtagttactctcaggcatggatgaataaatgttatagctgcatttgtctggccttttcttgtaaacattgcctgatttgttccttctggggctttgccattaaaatgtatttacagattacacatctttattttgtgaaccctggaaacaccactcttgcaatcctcctgtctccaccttctggcatctctgatgccgtgctcgtctgcactctgccccggcggtccctccagcactggtttttccacaccccctgcccatcaccaggtgtccacagggcctacatctggcttccctcttctcctgggaagagcactcctggcttcctgcagggccggtgggaggaggaaagtgattctgagggagaggctggagccttaaggaccaacaaggcaaagtgacttgtctcatcctccagagattcaccaacacatgagcctcagaccccaggcttctgcctccagcagccgccctgccgcacactgctcttactcctccttataccctcactcacggggaacacagcccagtgatcccggaggaaactcactccctccctgactcaacaaggcagtctcgggggcaccgttagccacgcgaccctgtaaagctgccgtcctcatttcacatgtgaagcagctgaattccagagtgctgggtcccagcccaggcagccctcagcctcacgcaaggcaatagttaggagtccttcggcattgaaagcaaactcagacacatctgacctggagttctacctgcactaagagaagagagtggtaactaattcatggataaaacagaccatcgaggcagcactgaatgatctcacccacgaatgacaacagtggcacaggagggctatgaacattttgcttcaggatgttttatttcgctctactgttatgtagagaaagcatggtttgctttttataacttttgtgacccaaaaataccagactgttgttttccctaggtgccaggccatcctgttctgtgtgttcccaaactcttagttttgttcatgtaaaactcatgatttcataattaaaacaatattaaaataaaactcatgaatgatttcataattaaaacaatattaaaaat

SEQ ID NO: 191283 - DNA, 1267 bp, Homo sapiens
  Payload ID: 17781
  Gene Name: thyroid peroxidase
  ENST ID: ENST00000469607
  CDS Start-End: 1-1092
tatgaaggctatgactccaccgccaaccccactgtgtccaacgtgttctccacagccgccttccgcttcggccatgccacgatccacccgctggtgaggaggctggacgccagcttccaggagcaccccgacctgcccgggctgtggctgcaccaggctttcttcagcccatggacattactccgtggaggttacaatgagtggagggagttctgcggcctgcctcgcctggagacccccgctgacctgagcacagccatcgccagcaggagcgtggccgacaagatcctggacttgtacaagcatcctgacaacatcgatgtctggctgggaggcttagctgaaaacttcctccccagggctcggacagggcccctgtttgcctgtctcattgggaagcagatgaaggctctgcgggacggtgactggttttggtgggagaacagccacgtcttcacggatgcacagaggcgtgagctggagaagcactccctgtctcgggtcatctgtgacaacactggcctcaccagggtgcccatggatgccttccaagtcggcaaattccccgaagactttgagtcttgtgacagcatcactggcatgaacctggaggcctggagggaaacctttcctcaagacgacaagtgtggcttcccagagagcgtggagaatggggactttgtgcactgtgaggagtctgggaggcgcgtgctggtgtattcctgccggcacgggtatgagctccaaggccgggagcagctcacttgcacccaggaaggatgggatttccagcctcccctctgcaaagactccgggaggctccctcgggtgacttggatctccatgtcgctggctgctctgctgatcggaggcttcgcaggtctcacctcgacggtgatttgcaggtggacacgcactggcactaaatccacactgcccatctcggagacaggcggaggaactcccgagctgagatgcggaaagcaccaggccgtagggacctcaccgcagcgggccgcagctcaggactcggagcaggagagtgctgggatggaaggccgggatactcacaggctgccgagagccctctgagggcaaagtggcaggacactgcagaacagcttcatgttcccaaaatcaccgtacgactcttttccaaacacaggcaaatccgaaatcagcaggacgactgttttcccaacacgggtaaatctagtaccatgtcgtagttactctcaggcatggatgaataaatgttatagctgca

SEQ ID NO: 191284 - DNA, 1157 bp, Homo sapiens
  Payload ID: 17781
  Gene Name: thyroid peroxidase
  ENST ID: ENST00000539820
  CDS Start-End: 92-616
ggaaggcaattaaggcgcccatttcagaagagttacagccgtgaaaattactcagcagtgcagttggctgagaagaggaaaaaaggtcagaatgagagcgctcgctgtgctgtctgtcacgctggttatggcctgcacagaagccttcttccccttcatctcgagagggaaagaactcctttggggaaagcctgaggagtctcgtgtctctagcgtcttggaggaaagcaagcgcctggtggacaccgccatgtacgccacgatgcagagaaacctcaagaaaagaggaatcctttctccagctcagcttctgtctttttccaaacttcctgagccaacaagcggagtgattgcccgagcagcagagataatggaaacatcaatacaagcgatgaaaagaaaagtcaacctgaaaactcaacaatcacagcatccaacggatgctttatcagaagatctgctgagcatcattgcaaacatgtctggatgtctcccttacatgctgcccccaaaatgcccaaacacttgcctggcgaacaaatacaggcccatcacaggagcttgcaacaacagaaaaatgaaatataagcccgaccattccgaaactgccaactaacctgtttaactaggaaccttccagcaggacagaccaaataatgcgaaactgaagccagtcaaagcttttctccaatgacgtctacatccacctgcaaagcctgcccctgggtcctgcagtagagcctgaacctttctttggtttgatgcttcctgattcataaatcatgatcactcaaaaaaaactctttaaaaaatgtattgtgcctaagtttacattttaacaacctcaagaccagggcctcagccggcagcagtgagttcctgctcggcccttctgaaaggccctgctgctgtcttgggcgcctctgccccagctgctgggcgggctccactgacgctcctgggagaatctctgctgaccacacaatgacattggcactgggagctgtgatctggggacacttagatctgagctggtttctctccttctgtggtaacagctacagttttcattaagaattcacagcatctggatctaaaatctcctacgttcaaggcttcacacattgtattccaccaaaaataaaacatctgctcag

SEQ ID NO: 191285 - DNA, 1157 bp, Homo sapiens
  Payload ID: 17781
  Gene Name: thyroid peroxidase
  ENST ID: ENST00000617910
  CDS Start-End: 92-616
ggaaggcaattgaggcgcccatttcagaagagttacagccgtgaaaattactcagcagtgcagttggctgagaagaggaaaaaaggtcagaatgagagcgctggctgtgctgtctgtcacgctggttatggcctgcacagaagccttcttccccttcatctcgagagggaaagaactcctttggggaaagcctgaggagtctcgtgtctctagcgtcttggaggaaagcaagcgcctggtggacaccgccatgtacgccacgatgcagagaaacctcaagaaaagaggaatcctttctccagctcagcttctgtctttttccaaacttcctgagccaacaagcggagtgattgcccgagcagcagagataatggaaacatcaatacaagcgatgaaaagaaaagtcaacctgaaaactcaacaatcacagcatccaacggatgctttatcagaagatctgctgagcatcattgcaaacatgtctggatgtctcccttacatgctgcccccaaaatgcccaaacacttgcctggcgaacaaatacaggcccatcacaggagcttgcaacaacagaaaaatgaaatataagcccgaccattccgaaactgccaactaacctgtttaactaggaaccttccagcaggacagaccaaataatgcgaaactgaagccagtcaaagcttttctccaatgacgtctacatccacctgcaaagcctgcccctgggtcctgcagtagagcctgaacctttctttggtttgatgcttcctgattcataaatcatgatcactcaaaaaaaactctttaaaaaatgtattgtgcctaagtttacattttaacaacctcaagaccagggcctcagccggcagcagtgagttcctgctcggcccttctgaaaggccctgctgctgtcttgggcgtctctgccccagctgctgggcgggctccactgacgctcctgggagaatctctgctgaccacacaatgacattggcactgggagctgtgatctggggacacttagatctgagctggtttctctccttctgtggtgacagctacagttttcattaagaattcacagcatctggatctaaaatctcctacgttcaaggcttcacacattgtattccaccaaaaataaaacatctgctcag

SEQ ID NO: 191286 - DNA, 2761 bp, Homo sapiens
  Payload ID: 17781
  Gene Name: thyroid peroxidase
  ENST ID: ENST00000622050
  CDS Start-End: 92-2761
ggaaggcaattgaggcgcccatttcagaagagttacagccgtgaaaattactcagcagtgcagttggctgagaagaggaaaaaaggtcagaatgagagcgctggctgtgctgtctgtcacgctggttatggcctgcacagaagccttcttccccttcatctcgagagggaaagaactcctttggggaaagcctgaggagtctcgtgtctctagcgtcttggaggaaagcaagcgcctggtggacaccgccatgtacgccacgatgcagagaaacctcaagaaaagaggaatcctttctccagctcagcttctgtctttttccaaacttcctgagccaacaagcggagtgattgcccgagcagcagagataatggaaacatcaatacaagcgatgaaaagaaaagtcaacctgaaaactcaacaatcacagcatccaacggatgctttatcagaagatctgctgagcatcattgcaaacatgtctggatgtctcccttacatgctgcccccaaaatgcccaaacacttgcctggcgaacaaatacaggcccatcacaggagcttgcaacaacagagaccaccccagatggggcgcctccaacacggccctggcacgatggctccctccagtctatgaggacggcttcagtcagccccgaggctggaaccccggcttcttgtacaacgggttcccactgcccccggtccgggaggtgacaagacatgtcattcaagtttcaaatgaggttgtcacagatgatgaccgctattctgacctcctgatggcatggggacaatacatcgaccacgacatcgcgttcacaccacagagcaccagcaaagctgccttcgggggagggtctgactgccagatgacttgtgagaaccaaaacccatgttttcccatacaactcccggaggaggcccggccggccgcgggcaccgcctgtctgcccttctaccgctcttcggccgcctgcggcaccggggaccaaggcgcgctctttgggaacctgtccacggccaacccgcggcagcagatgaacgggttgacctcgttcctggacgcgtccaccgtgtatggcagctccccggccctagagaggcagctgcggaactggaccagtgccgaagggctgctccgcgtccacgcgcgcctccgggactccggccgcgcctacctgcccttcgtgccgccacgcgcgcctgcggcctgtgcgcccgagcccggcatccccggagagacccgcgggccctgcttcctggccggagacggccgcgccagcgaggtcccctccctgacggcactgcacacgctgtggctgcgcgagcacaaccgcctggccgcggcgctcaaggccctcaatgcgcactggagcgcggacgccgtgtaccaggaggcgcgcaaggtcgtgggcgctctgcaccagatcatcaccctgagggattacatccccaggatcctgggacccgaggccttccagcagtacgtgggtccctatgaaggctatgactccaccgccaaccccactgtgtccaacgtgttctccacagccgccttccgcttcggccatgccacgatccacccgctggtgaggaggctggacgccagcttccaggagcaccccgacctgcccgggctgtggctgcaccaggctttcttcagcccatggacattactccgtggaggtggtttggacccactaatacgaggccttcttgcaagaccagccaaactgcaggtgcaggatcagctgatgaacgaggagctgacggaaaggctctttgtgctgtccaattccagcaccttggatctggcgtccatcaacctgcagaggggccgggaccacgggctgccaggttacaatgagtggagggagttctgcggcctgcctcgcctggagacccccgctgacctgagcacagccatcgccagcaggagcgtggccgacaagatcctggacttgtacaagcatcctgacaacatcgatgtctggctgggaggcttagctgaaaacttcctccccagggctcggacagggcccctgtttgcctgtctcattgggaagcagatgaaggctctgcgggacggtgactggttttggtgggagaacagccacgtcttcacggatgcacagaggcgtgagctggagaagcactccctgtctcgggtcatctgtgacaacactggcctcaccagggtgcccatggatgccttccaagtcggcaaattccccgaagactttgagtcttgtgacagcatcactggcatgaacctggaggcctggagggaaacctttcctcaagacgacaagtgtggcttcccagagagcgtggagaatggggactttgtgcactgtgaggagtctgggaggcgcgtgctggtgtattcctgccggcacgggtatgagctccaaggccgggagcagctcacttgcacccaggaaggatgggatttccagcctcccctctgcaaagactccgggaggctccctcgggtgacttggatctccatgtcgctggctgctctgctgatcggaggcttcgcaggtctcacctcgacggtgatttgcaggtggacacgcactggcactaaatccacactgcccatctcggagacaggcggaggaactcccgagctgagatgcggaaagcaccaggccgtagggacctcaccgcagcgggccgcagctcaggactcggagcaggagagtgctgggatggaaggccgggatactcacaggctgccgagagccctctga

SEQ ID NO: 191287 - DNA, 2893 bp, Homo sapiens
  Payload ID: 17781
  Gene Name: thyroid peroxidase
  ENST ID: ENST00000613631
  CDS Start-End: 92-2893
ggaaggcaattgaggcgcccatttcagaagagttacagccgtgaaaattactcagcagtgcagttggctgagaagaggaaaaaaggtcagaatgagagcgctggctgtgctgtctgtcacgctggttatggcctgcacagaagccttcttccccttcatctcgagagggaaagaactcctttggggaaagcctgaggagtctcgtgtctctagcgtcttggaggaaagcaagcgcctggtggacaccgccatgtacgccacgatgcagagaaacctcaagaaaagaggaatcctttctccagctcagcttctgtctttttccaaacttcctgagccaacaagcggagtgattgcccgagcagcagagataatggaaacatcaatacaagcgatgaaaagaaaagtcaacctgaaaactcaacaatcacagcatccaacggatgctttatcagaagatctgctgagcatcattgcaaacatgtctggatgtctcccttacatgctgcccccaaaatgcccaaacacttgcctggcgaacaaatacaggcccatcacaggagcttgcaacaacagagaccaccccagatggggcgcctccaacacggccctggcacgatggctccctccagtctatgaggacggcttcagtcagccccgaggctggaaccccggcttcttgtacaacgggttcccactgcccccggtccgggaggtgacaagacatgtcattcaagtttcaaatgaggttgtcacagatgatgaccgctattctgacctcctgatggcatggggacaatacatcgaccacgacatcgcgttcacaccacagagcaccagcaaagctgccttcgggggagggtctgactgccagatgacttgtgagaaccaaaacccatgttttcccatacaactcccggaggaggcccggccggccgcgggcaccgcctgtctgcccttctaccgctcttcggccgcctgcggcaccggggaccaaggcgcgctctttgggaacctgtccacggccaacccgcggcagcagatgaacgggttgacctcgttcctggacgcgtccaccgtgtatggcagctccccggccctagagaggcagctgcggaactggaccagtgccgaagggctgctccgcgtccacgcgcgcctccgggactccggccgcgcctacctgcccttcgtgccgccacgcgcgcctgcggcctgtgcgcccgagcccggcatccccggagagacccgcgggccctgcttcctggccggagacggccgcgccagcgaggtcccctccctgacggcactgcacacgctgtggctgcgcgagcacaaccgcctggccgcggcgctcaaggccctcaatgcgcactggagcgcggacgccgtgtaccaggaggcgcgcaaggtcgtgggcgctctgcaccagatcatcaccctgagggattacatccccaggatcctgggacccgaggccttccagcagtacgtgggtccctatgaaggctatgactccaccgccaaccccactgtgtccaacgtgttctccacagccgccttccgcttcggccatgccacgatccacccgctggtgaggaggctggacgccagcttccaggagcaccccgacctgcccgggctgtggctgcaccaggctttcttcagcccatggacattactccgtggaggtggtttggacccactaatacgaggccttcttgcaagaccagccaaactgcaggtgcaggatcagctgatgaacgaggagctgacggaaaggctctttgtgctgtccaattccagcaccttggatctggcgtccatcaacctgcagaggggccgggaccacgggctgccaggttacaatgagtggagggagttctgcggcctgcctcgcctggagacccccgctgacctgagcacagccatcgccagcaggagcgtggccgacaagatcctggacttgtacaagcatcctgacaacatcgatgtctggctgggaggcttagctgaaaacttcctccccagggctcggacagggcccctgtttgcctgtctcattgggaagcagatgaaggctctgcgggacggtgactggttttggtgggagaacagccacgtcttcacggatgcacagaggcgtgagctggagaagcactccctgtctcgggtcatctgtgacaacactggcctcaccagggtgcccatggatgccttccaagtcggcaaattccccgaagactttgagtcttgtgacagcatcactggcatgaacctggaggcctggagggaaacctttcctcaagacgacaagtgtggcttcccagagagcgtggagaatggggactttgtgcactgtgaggagtctgggaggcgcgtgctggtgtattcctgccggcacgggtatgagctccaaggccgggagcagctcacttgcacccaggaaggatgggatttccagcctcccctctgcaaagatgtgaacgagtgtgcagacggtgcccaccccccctgccacgcctctgcgaggtgcagaaacaccaaaggcggcttccagtgtctctgcgcggacccctacgagttaggagacgatgggagaacctgcgtagactccgggaggctccctcgggtgacttggatctccatgtcgctggctgctctgctgatcggaggcttcgcaggtctcacctcgacggtgatttgcaggtggacacgcactggcactaaatccacactgcccatctcggagacaggcggaggaactcccgagctgagatgcggaaagcaccaggccgtagggacctcaccgcagcgggccgcagctcaggactcggagcaggagagtgctgggatggaaggccgggatactcacaggctgccgagagccctctga

SEQ ID NO: 191288 - DNA, 2649 bp, Homo sapiens
  Payload ID: 17781
  Gene Name: thyroid peroxidase
  ENST ID: ENST00000627917
  CDS Start-End: 73-2649
catttcagaagagttacagccgtgaaaattactcagcagtgcagttggctgagaagaggaaaaaaggtcagaatgagagcgctggctgtgctgtctgtcacgctggttatggcctgcacagaagccttcttccccttcatctcgagagggaaagaactcctttggggaaagcctgaggagtctcgtgtctctagcgtcttggaggaaagcaagcgcctggtggacaccgccatgtacgccacgatgcagagaaacctcaagaaaagaggaatcctttctccagctcagcttctgtctttttccaaacttcctgagccaacaagcggagtgattgcccgagcagcagagataatggaaacatcaatacaagcgatgaaaagaaaagtcaacctgaaaactcaacaatcacagcatccaacggatgctttatcagaagatctgctgagcatcattgcaaacatgtctggatgtctcccttacatgctgcccccaaaatgcccaaacacttgcctggcgaacaaatacaggcccatcacaggagcttgcaacaacagagaccaccccagatggggcgcctccaacacggccctggcacgatggctccctccagtctatgaggacggcttcagtcagccccgaggctggaaccccggcttcttgtacaacgggttcccactgcccccggtccgggaggtgacaagacatgtcattcaagtttcaaatgaggttgtcacagatgatgaccgctattctgacctcctgatggcatggggacaatacatcgaccacgacatcgcgttcacaccacagagcaccagcaaagctgccttcgggggagggtctgactgccagatgacttgtgagaaccaaaacccatgttttcccatacaactcccggaggaggcccggccggccgcgggcaccgcctgtctgcccttctaccgctcttcggccgcctgcggcaccggggaccaaggcgcgctctttgggaacctgtccacggccaacccgcggcagcagatgaacgggttgacctcgttcctggacgcgtccaccgtgtatggcagctccccggccctagagaggcagctgcggaactggaccagtgccgaagggctgctccgcgtccacgcgcgcctccgggactccggccgcgcctacctgcccttcgtgccgccacgcgcgcctgcggcctgtgcgcccgagcccggcatccccggagagacccgcgggccctgcttcctggccggagacggccgcgccagcgaggtcccctccctgacggcactgcacacgctgtggctgcgcgagcacaaccgcctggccgcggcgctcaaggccctcaatgcgcactggagcgcggacgccgtgtaccaggaggcgcgcaaggtcgtgggcgctctgcaccagatcatcaccctgagggattacatccccaggatcctgggacccgaggccttccagcagtacgtgggtccctatgaaggctatgactccaccgccaaccccactgtgtccaacgtgttctccacagccgccttccgcttcggccatgccacgatccacccgctggtgaggaggctggacgccagcttccaggagcaccccgacctgcccgggctgtggctgcaccaggctttcttcagcccatggacattactccgtggaggttacaatgagtggagggagttctgcggcctgcctcgcctggagacccccgctgacctgagcacagccatcgccagcaggagcgtggccgacaagatcctggacttgtacaagcatcctgacaacatcgatgtctggctgggaggcttagctgaaaacttcctccccagggctcggacagggcccctgtttgcctgtctcattgggaagcagatgaaggctctgcgggacggtgactggttttggtgggagaacagccacgtcttcacggatgcacagaggcgtgagctggagaagcactccctgtctcgggtcatctgtgacaacactggcctcaccagggtgcccatggatgccttccaagtcggcaaattccccgaagactttgagtcttgtgacagcatcactggcatgaacctggaggcctggagggaaacctttcctcaagacgacaagtgtggcttcccagagagcgtggagaatggggactttgtgcactgtgaggagtctgggaggcgcgtgctggtgtattcctgccggcacgggtatgagctccaaggccgggagcagctcacttgcacccaggaaggatgggatttccagcctcccctctgcaaagatgtgaacgagtgtgcagacggtgcccaccccccctgccacgcctctgcgaggtgcagaaacaccaaaggcggcttccagtgtctctgcgcggacccctacgagttaggagacgatgggagaacctgcgtagactccgggaggctccctcgggtgacttggatctccatgtcgctggctgctctgctgatcggaggcttcgcaggtctcacctcgacggtgatttgcaggtggacacgcactggcactaaatccacactgcccatctcggagacaggcggaggaactcccgagctgagatgcggaaagcaccaggccgtagggacctcaccgcagcgggccgcagctcaggactcggagcag

SEQ ID NO: 191289 - DNA, 2934 bp, Homo sapiens
  Payload ID: 17781
  Gene Name: thyroid peroxidase
  ENST ID: ENST00000625793
  CDS Start-End: 1-2595
cagcttctgtctttttccaaacttcctgagccaacaagcggagtgattgcccgagcagcagagataatggaaacatcaatacaagcgatgaaaagaaaagtcaacctgaaaactcaacaatcacagcatccaacggatgctttatcagaagatctgctgagcatcattgcaaacatgtctggatgtctcccttacatgctgcccccaaaatgcccaaacacttgcctggcgaacaaatacaggcccatcacaggagcttgcaacaacagagaccaccccagatggggcgcctccaacacggccctggcacgatggctccctccagtctatgaggacggcttcagtcagccccgaggctggaaccccggcttcttgtacaacgggttcccactgcccccggtccgggaggtgacaagacatgtcattcaagtttcaaatgaggttgtcacagatgatgaccgctattctgacctcctgatggcatggggacaatacatcgaccacgacatcgcgttcacaccacagagcaccagcaaagctgccttcgggggagggtctgactgccagatgacttgtgagaaccaaaacccatgttttcccatacaactcccggaggaggcccggccggccgcgggcaccgcctgtctgcccttctaccgctcttcggccgcctgcggcaccggggaccaaggcgcgctctttgggaacctgtccacggccaacccgcggcagcagatgaacgggttgacctcgttcctggacgcgtccaccgtgtatggcagctccccggccctagagaggcagctgcggaactggaccagtgccgaagggctgctccgcgtccacgcgcgcctccgggactccggccgcgcctacctgcccttcgtgccgccacgcgcgcctgcggcctgtgcgcccgagcccggcatccccggagagacccgcgggccctgcttcctggccggagacggccgcgccagcgaggtcccctccctgacggcactgcacacgctgtggctgcgcgagcacaaccgcctggccgcggcgctcaaggccctcaatgcgcactggagcgcggacgccgtgtaccaggaggcgcgcaaggtcgtgggcgctctgcaccagatcatcaccctgagggattacatccccaggatcctgggacccgaggccttccagcagtacgtgggtccctatgaaggctatgactccaccgccaaccccactgtgtccaacgtgttctccacagccgccttccgcttcggccatgccacgatccacccgctggtgaggaggctggacgccagcttccaggagcaccccgacctgcccgggctgtggctgcaccaggctttcttcagcccatggacattactccgtggaggtggtttggacccactaatacgaggccttcttgcaagaccagccaaactgcaggtgcaggatcagctgatgaacgaggagctgacggaaaggctctttgtgctgtccaattccagcaccttggatctggcgtccatcaacctgcagaggggccgggaccacgggctgccaggttacaatgagtggagggagttctgcggcctgcctcgcctggagacccccgctgacctgagcacagccatcgccagcaggagcgtggccgacaagatcctggacttgtacaagcatcctgacaacatcgatgtctggctgggaggcttagctgaaaacttcctccccagggctcggacagggcccctgtttgcctgtctcattgggaagcagatgaaggctctgcgggacggtgactggttttggtgggagaacagccacgtcttcacggatgcacagaggcgtgagctggagaagcactccctgtctcgggtcatctgtgacaacactggcctcaccagggtgcccatggatgccttccaagtcggcaaattccccgaagactttgagtcttgtgacagcatcactggcatgaacctggaggcctggagggaaacctttcctcaagacgacaagtgtggcttcccagagagcgtggagaatggggactttgtgcactgtgaggagtctgggaggcgcgtgctggtgtattcctgccggcacgggtatgagctccaaggccgggagcagctcacttgcacccaggaaggatgggatttccagcctcccctctgcaaagactccgggaggctccctcgggtgacttggatctccatgtcgctggctgctctgctgatcggaggcttcgcaggtctcacctcgacggtgatttgcaggtggacacgcactggcactaaatccacactgcccatctcggagacaggcggaggaactcccgagctgagatgcggaaagcaccaggccgtagggacctcaccgcagcgggccgcagctcaggactcggagcaggtgggccacaccatgccgcatgtttccagctgccaccgcagtggttggacaggatctgggtgtcggagcagctctgctggggctccctgcatatttctgtttactccgtgtttcctagtccgttctgcaccttcctccgggaggttttatttacaagctaatgacagtgagccagaatgtgagcctgcttagtgagaggaatgaagatgccttccatttgtacaaaccggttccaaaactaagggctcactttcaggcgtttgcttccacttaatctgaggatcggctggaagcacaggagaggaaggagaagctgaagcaaaaccctgacttttaaattctgatttttaagtggaatagttataatcagtgtggaaaaatgtgtatgtttatgttttacccccttaccttgtatgcagaaccccaagggaggccatatcaaaaactcacttgtgtaagtctgacttttgaactgagagaagcagagagcagaacagtggcctccagaggggagtggggaggtgctggtca

SEQ ID NO: 191290 - DNA, 2229 bp, Homo sapiens
  Payload ID: 17781
  Gene Name: thyroid peroxidase
  ENST ID: ENST00000625313
  CDS Start-End: 1-2229
atgagagcgctggctgtgctgtctgtcacgctggttatggcctgcacagaagccttcttccccttcatctcgagagggaaagaactcctttggggaaagcctgaggagtctcgtgtctctagcgtcttggaggaaagcaagcgcctggtggacaccgccatgtacgccacgatgcagagaaacctcaagaaaagaggaatcctttctccagctcagcttctgtctttttccaaacttcctgagccaacaagcggagtgattgcccgagcagcagagataatggaaacatcaatacaagcgatgaaaagaaaagtcaacctgaaaactcaacaatcacagcatccaacggatgctttatcagaagatctgctgagcatcattgcaaacatgtctggatgtctcccttacatgctgcccccaaaatgcccaaacacttgcctggcgaacaaatacaggcccatcacaggagcttgcaacaacagagaccaccccagatggggcgcctccaacacggccctggcacgatggctccctccagtctatgaggacggcttcagtcagccccgaggctggaaccccggcttcttgtacaacgggttcccactgcccccggtccgggaggtgacaagacatgtcattcaagtttcaaatgaggttgtcacagatgatgaccgctattctgacctcctgatggcatggggacaatacatcgaccacgacatcgcgttcacaccacagagcaccagcaaagctgccttcgggggagggtctgactgccagatgacttgtgagaaccaaaacccatgttttcccatacaaatcatcaccctgagggattacatccccaggatcctgggacccgaggccttccagcagtacgtgggtccctatgaaggctatgactccaccgccaaccccactgtgtccaacgtgttctccacagccgccttccgcttcggccatgccacgatccacccgctggtgaggaggctggacgccagcttccaggagcaccccgacctgcccgggctgtggctgcaccaggctttcttcagcccatggacattactccgtggaggtggtttggacccactaatacgaggccttcttgcaagaccagccaaactgcaggtgcaggatcagctgatgaacgaggagctgacggaaaggctctttgtgctgtccaattccagcaccttggatctggcgtccatcaacctgcagaggggccgggaccacgggctgccaggttacaatgagtggagggagttctgcggcctgcctcgcctggagacccccgctgacctgagcacagccatcgccagcaggagcgtggccgacaagatcctggacttgtacaagcatcctgacaacatcgatgtctggctgggaggcttagctgaaaacttcctccccagggctcggacagggcccctgtttgcctgtctcattgggaagcagatgaaggctctgcgggacggtgactggttttggtgggagaacagccacgtcttcacggatgcacagaggcgtgagctggagaagcactccctgtctcgggtcatctgtgacaacactggcctcaccagggtgcccatggatgccttccaagtcggcaaattccccgaagactttgagtcttgtgacagcatcactggcatgaacctggaggcctggagggaaacctttcctcaagacgacaagtgtggcttcccagagagcgtggagaatggggactttgtgcactgtgaggagtctgggaggcgcgtgctggtgtattcctgccggcacgggtatgagctccaaggccgggagcagctcacttgcacccaggaaggatgggatttccagcctcccctctgcaaagatgtgaacgagtgtgcagacggtgcccaccccccctgccacgcctctgcgaggtgcagaaacaccaaaggcggcttccagtgtctctgcgcggacccctacgagttaggagacgatgggagaacctgcgtagactccgggaggctccctcgggtgacttggatctccatgtcgctggctgctctgctgatcggaggcttcgcaggtctcacctcgacggtgatttgcaggtggacacgcactggcactaaatccacactgcccatctcggagacaggcggaggaactcccgagctgagatgcggaaagcaccaggccgtagggacctcaccgcagcgggccgcagctcaggactcggagcag

SEQ ID NO: 191291 - DNA, 542 bp, Homo sapiens
  Payload ID: 17781
  Gene Name: thyroid peroxidase
  ENST ID: ENST00000628844
  CDS Start-End: 28-542
actctgtctccttccgttaattttagaatgagagcgctggctgtgctgtctgtcacgctggttatggcctgcacagaagccttcttccccttcatctcgagagggaaagaactcctttggggaaagcctgaggagtctcgtgtctctagcgtcttggaggaaagcaagcgcctggtggacaccgccatgtacgccacgatgcagagaaacctcaagaaaagaggaatcctttctccagctcagcttctgtctttttccaaacttcctgagccaacaagcggagtgattgcccgagcagcagagataatggaaacatcaatacaagcgatgaaaagaaaagtcaacctgaaaactcaacaatcacagcatccaacggatgctttatcagaagatctgctgagcatcattgcaaacatgtctggatgtctcccttacatgctgcccccaaaatgcccaaacacttgcctggcgaacaaatacaggcccatcacaggagcttgcaacaacagagaccaccccagatggggcgcctccaacacggc

SEQ ID NO: 191292 - DNA, 1042 bp, Homo sapiens
  Payload ID: 17781
  Gene Name: thyroid peroxidase
  ENST ID: ENST00000626753
  CDS Start-End: 1-1042
cctatgaaggctatgactccaccgccaaccccactgtgtccaacgtgttctccacagccgccttccgcttcggccatgccacgatccacccgctggtgaggaggctggacgccagcttccaggagcaccccgacctgcccgggctgtggctgcaccaggctttcttcagcccatggacattactccgtggaggttacaatgagtggagggagttctgcggcctgcctcgcctggagacccccgctgacctgagcacagccatcgccagcaggagcgtggccgacaagatcctggacttgtacaagcatcctgacaacatcgatgtctggctgggaggcttagctgaaaacttcctccccagggctcggacagggcccctgtttgcctgtctcattgggaagcagatgaaggctctgcgggacggtgactggttttggtgggagaacagccacgtcttcacggatgcacagaggcgtgagctggagaagcactccctgtctcgggtcatctgtgacaacactggcctcaccagggtgcccatggatgccttccaagtcggcaaattccccgaagactttgagtcttgtgacagcatcactggcatgaacctggaggcctggagggaaacctttcctcaagacgacaagtgtggcttcccagagagcgtggagaatggggactttgtgcactgtgaggagtctgggaggcgcgtgctggtgtattcctgccggcacgggtatgagctccaaggccgggagcagctcacttgcacccaggaaggatgggatttccagcctcccctctgcaaagatgtgaacgagtgtgcagacggtgcccaccccccctgccacgcctctgcgaggtgcagaaacaccaaaggcggcttccagtgtctctgcgcggacccctacgagttaggagacgatgggagaacctgcgtagactccgggaggctccctcgggtgacttggatctccatgtcgctggctgctctgctgatcggaggcttcgcaggtctcacctcgacggtgatttgcaggtg

SEQ ID NO: 191293 - DNA, 2831 bp, Homo sapiens
  Payload ID: 17781
  Gene Name: thyroid peroxidase
  ENST ID: ENST00000627010
  CDS Start-End: 84-2831
aggcaattgaggcgcccatttcagaagagttacagccgtgaaaattactcagcagtgcagttggctgagaagaggaaaaaagaatgagagcgctggctgtgctgtctgtcacgctggttatggcctgcacagaagccttcttccccttcatctcgagagggaaagaactcctttggggaaagcctgaggagtctcgtgtctctagcgtcttggaggaaagcaagcgcctggtggacaccgccatgtacgccacgatgcagagaaacctcaagaaaagaggaatcctttctccagctcagcttctgtctttttccaaacttcctgagccaacaagcggagtgattgcccgagcagcagagataatggaaacatcaatacaagcgatgaaaagaaaagtcaacctgaaaactcaacaatcacagcatccaacggatgctttatcagaagatctgctgagcatcattgcaaacatgtctggatgtctcccttacatgctgcccccaaaatgcccaaacacttgcctggcgaacaaatacaggcccatcacaggagcttgcaacaacagagaccaccccagatggggcgcctccaacacggccctggcacgatggctccctccagtctatgaggacggcttcagtcagccccgaggctggaaccccggcttcttgtacaacgggttcccactgcccccggtccgggaggtgacaagacatgtcattcaagtttcaaatgaggttgtcacagatgatgaccgctattctgacctcctgatggcatggggacaatacatcgaccacgacatcgcgttcacaccacagagcaccagcaaagctgccttcgggggagggtctgactgccagatgacttgtgagaaccaaaacccatgttttcccatacaactcccggaggaggcccggccggccgcgggcaccgcctgtctgcccttctaccgctcttcggccgcctgcggcaccggggaccaaggcgcgctctttgggaacctgtccacggccaacccgcggcagcagatgaacgggttgacctcgttcctggacgcgtccaccgtgtatggcagctccccggccctagagaggcagctgcggaactggaccagtgccgaagggctgctccgcgtccacgcgcgcctccgggactccggccgcgcctacctgcccttcgtgccgccacgcgcgcctgcggcctgtgcgcccgagcccggcatccccggagagacccgcgggccctgcttcctggccggagacggccgcgccagcgaggtcccctccctgacggcactgcacacgctgtggctgcgcgagcacaaccgcctggccgcggcgctcaaggccctcaatgcgcactggagcgcggacgccgtgtaccaggaggcgcgcaaggtcgtgggcgctctgcaccagatcatcaccctgagggattacatccccaggatcctgggacccgaggccttccagcagtacgtgggtccctatgaaggctatgactccaccgccaaccccactgtgtccaacgtgttctccacagccgccttccgcttcggccatgccacgatccacccgctggtgaggaggctggacgccagcttccaggagcaccccgacctgcccgggctgtggctgcaccaggctttcttcagcccatggacattactccgtggaggtggtttggacccactaatacgaggccttcttgcaagaccagccaaactgcaggtgcaggatcagctgatgaacgaggagctgacggaaaggctctttgtgctgtccaattccagcaccttggatctggcgtccatcaacctgcagaggggccgggaccacgggctgccaggttacaatgagtggagggagttctgcggcctgcctcgcctggagacccccgctgacctgagcacagccatcgccagcaggagcgtggccgacaagatcctggacttgtacaagcatcctgacaacatcgatgtctggctgggaggcttagctgaaaacttcctccccagggctcggacagggcccctgtttgcctgtctcattgggaagcagatgaaggctctgcgggacggtgactggttttggtgggagaacagccacgtcttcacggatgcacagaggcgtgagctggagaagcactccctgtctcgggtcatctgtgacaacactggcctcaccagggtgcccatggatgccttccaagtcggcaaattccccgaagactttgagtcttgtgacagcatcactggcatgaacctggaggcctggagggaaacctttcctcaagacgacaagtgtggcttcccagagagcgtggagaatggggactttgtgcactgtgaggagtctgggaggcgcgtgctggtgtattcctgccggcacgggtatgagctccaaggccgggagcagctcacttgcacccaggaaggatgggatttccagcctcccctctgcaaagatgtgaacgagtgtgcagacggtgcccaccccccctgccacgcctctgcgaggtgcagaaacaccaaaggcggcttccagtgtctctgcgcggacccctacgagttaggagacgatgggagaacctgcgtagactccgggaggctccctcgggtgacttggatctccatgtcgctggctgctctgctgatcggaggcttcgcaggtctcacctcgacggtgatttgcaggtggacacgcactggcactaaatccacactgcccatctcggagacaggcggaggaactcccgagctgagatgcggaaagcaccaggccgtagggacctcaccgcagcgggccgcagctcaggactcggagcag

SEQ ID NO: 191294 - DNA, 1038 bp, Homo sapiens
  Payload ID: 17781
  Gene Name: thyroid peroxidase
  ENST ID: ENST00000626995
  CDS Start-End: 1-1038
tatgaaggctatgactccaccgccaaccccactgtgtccaacgtgttctccacagccgccttccgcttcggccatgccacgatccacccgctggtgaggaggctggacgccagcttccaggagcaccccgacctgcccgggctgtggctgcaccaggctttcttcagcccatggacattactccgtggaggttacaatgagtggagggagttctgcggcctgcctcgcctggagacccccgctgacctgagcacagccatcgccagcaggagcgtggccgacaagatcctggacttgtacaagcatcctgacaacatcgatgtctggctgggaggcttagctgaaaacttcctccccagggctcggacagggcccctgtttgcctgtctcattgggaagcagatgaaggctctgcgggacggtgactggttttggtgggagaacagccacgtcttcacggatgcacagaggcgtgagctggagaagcactccctgtctcgggtcatctgtgacaacactggcctcaccagggtgcccatggatgccttccaagtcggcaaattccccgaagactttgagtcttgtgacagcatcactggcatgaacctggaggcctggagggaaacctttcctcaagacgacaagtgtggcttcccagagagcgtggagaatggggactttgtgcactgtgaggagtctgggaggcgcgtgctggtgtattcctgccggcacgggtatgagctccaaggccgggagcagctcacttgcacccaggaaggatgggatttccagcctcccctctgcaaagactccgggaggctccctcgggtgacttggatctccatgtcgctggctgctctgctgatcggaggcttcgcaggtctcacctcgacggtgatttgcaggtggacacgcactggcactaaatccacactgcccatctcggagacaggcggaggaactcccgagctgagatgcggaaagcaccaggccgtagggacctcaccgcagcgggccgcagctcaggactcggagcag

SEQ ID NO: 191295 - DNA, 1155 bp, Homo sapiens
  Payload ID: 17781
  Gene Name: thyroid peroxidase
  ENST ID: ENST00000629774
  CDS Start-End: 87-611
ggaaggcaattgaggcgcccatttcagaagagttacagccgtgaaaattactcagcagtgcagttggctgagaagaggaaaaaagaatgagagcgctggctgtgctgtctgtcacgctggttatggcctgcacagaagccttcttccccttcatctcgagagggaaagaactcctttggggaaagcctgaggagtctcgtgtctctagcgtcttggaggaaagcaagcgcctggtggacaccgccatgtacgccacgatgcagagaaacctcaagaaaagaggaatcctttctccagctcagcttctgtctttttccaaacttcctgagccaacaagcggagtgattgcccgagcagcagagataatggaaacatcaatacaagcgatgaaaagaaaagtcaacctgaaaactcaacaatcacagcatccaacggatgctttatcagaagatctgctgagcatcattgcaaacatgtctggatgtctcccttacatgctgcccccaaaatgcccaaacacttgcctggcgaacaaatacaggcccatcacaggagcttgcaacaacagaaaaatgaaatataagcccgaccattccgaaactgccaactaacctgtttaactaggaaccttccagcaggacagaccaaataatgcgaaactgaagccagtcaaagcttttctccaatgacgtctacatccacctgcaaagcctgcccctgggtcctgcagtagagcctgaacctttctttggtttgatgcttcctgattcataaatcatgatcactcaaaaaaaactctttaaaaaatgtattgtgcctaagtttacattttaacaacctcaagaccagggcctcagccggcagcagtgagttcctgctcggcccttctgaaaggccctgctgctgtcttgggcgtctctgccccagctgctgggcgggctccactgacgctcctgggagaatctctgctgaccacacaatgacattggcactgggagctgtgatctggggacacttagatctgagctggtttctctccttctgtggtgacagctacagttttcattaagaattcacagcatctggatctaaaatctcctacgttcaaggcttcacacattgtattccaccaaaaataaaacatctgctcagaaa

SEQ ID NO: 191296 - DNA, 4400 bp, Homo sapiens
  Payload ID: 17782
  Gene Name: thyroid stimulating hormone receptor
  ENST ID: ENST00000298171
  CDS Start-End: 157-2451
cctcctccacagtggtgaggtcacagccccttggagccctccctcttcccacccctcccgctcccgggtctcctttggcctggggtaacccgaggtgcagagctgagaatgaggcgatttcggaggatggagaaatagccccgagtcccgtggaaaatgaggccggcggacttgctgcagctggtgctgctgctcgacctgcccagggacctgggcggaatggggtgttcgtctccaccctgcgagtgccatcaggaggaggacttcagagtcacctgcaaggatattcaacgcatccccagcttaccgcccagtacgcagactctgaagcttattgagactcacctgagaactattccaagtcatgcattttctaatctgcccaatatttccagaatctacgtatctatagatgtgactctgcagcagctggaatcacactccttctacaatttgagtaaagtgactcacatagaaattcggaataccaggaacttaacttacatagaccctgatgccctcaaagagctccccctcctaaagttccttggcattttcaacactggacttaaaatgttccctgacctgaccaaagtttattccactgatatattctttatacttgaaattacagacaacccttacatgacgtcaatccctgtgaatgcttttcagggactatgcaatgaaaccttgacactgaagctgtacaacaatggctttacttcagtccaaggatatgctttcaatgggacaaagctggatgctgtttacctaaacaagaataaatacctgacagttattgacaaagatgcatttggaggagtatacagtggaccaagcttgctggacgtgtctcaaaccagtgtcactgcccttccatccaaaggcctggagcacctgaaggaactgatagcaagaaacacctggactcttaagaaacttccactttccttgagtttccttcacctcacacgggctgacctttcttacccaagccactgctgtgcttttaagaatcagaagaaaatcagaggaatccttgagtccttgatgtgtaatgagagcagtatgcagagcttgcgccagagaaaatctgtgaatgccttgaatagccccctccaccaggaatatgaagagaatctgggtgacagcattgttgggtacaaggaaaagtccaagttccaggatactcataacaacgctcattattacgtcttctttgaagaacaagaggatgagatcattggttttggccaggagctcaaaaacccccaggaagagactctacaagcttttgacagccattatgactacaccatatgtggggacagtgaagacatggtgtgtacccccaagtccgatgagttcaacccgtgtgaagacataatgggctacaagttcctgagaattgtggtgtggttcgttagtctgctggctctcctgggcaatgtctttgtcctgcttattctcctcaccagccactacaaactgaacgtcccccgctttctcatgtgcaacctggcctttgcggatttctgcatggggatgtacctgctcctcatcgcctctgtagacctctacactcactctgagtactacaaccatgccatcgactggcagacaggccctgggtgcaacacggctggtttcttcactgtctttgcaagcgagttatcggtgtatacgctgacggtcatcaccctggagcgctggtatgccatcaccttcgccatgcgcctggaccggaagatccgcctcaggcacgcatgtgccatcatggttgggggctgggtttgctgcttccttctcgccctgcttcctttggtgggaataagtagctatgccaaagtcagtatctgcctgcccatggacaccgagacccctcttgctctggcatatattgtttttgttctgacgctcaacatagttgccttcgtcatcgtctgctgctgttatgtgaagatctacatcacagtccgaaatccgcagtacaacccaggggacaaagataccaaaattgccaagaggatggctgtgttgatcttcaccgacttcatatgcatggccccaatctcattctatgctctgtcagcaattctgaacaagcctctcatcactgttagcaactccaaaatcttgctggtactcttctatccacttaactcctgtgccaatccattcctctatgctattttcaccaaggccttccagagggatgtgttcatcctactcagcaagtttggcatctgtaaacgccaggctcaggcataccgggggcagagggttcctccaaagaacagcactgatattcaggttcaaaaggttacccacgagatgaggcagggtctccacaacatggaagatgtctatgaactgattgaaaactcccatctaaccccaaagaagcaaggccaaatctcagaagagtatatgcaaacggttttgtaagttaacactacactactcacaatggtaggggaacttacaaaataatagtttcttgaatatgcattccaatcccatgacacccccaacacatagctgccctcactcttgtgcaggcgatgtttcaatgtttcatggggcaagagtttatctctggagagtgattagtattaacctaatcattgcccccaagaaggaagttaggctaccagcatatttgaatgccaggtgaaatcaaaataatctacactatctagaagactttcttgatgccaagtccagagatgtcattgtgtaggatgttcagtaaatattaactgagctatgtcaatatagagcttctcagttttgtataacatttcatactaaagattcagcaaatggaaaatgctattaatttggttggtgaccacaagataaaatcagtcccacgttggctcagttcaactagatgttccctgatacaaagagaacttgatttccttaaaactgaaaagccaaacacagctagctgtcatacaagaaacagctattatgagacatgaaggagggtaagaattagctttaagttttgttttgctttgttttgttttttaactcaacctattaatcatctcttcacaagaatccacctgatgtgaccaagctattatgtgttgcctggaaaaactggcaagatttcagcttatgtggcctagcaaactaagaattgctcttcttggccagcctcatagcataaaagatgtgaactctaggaagtctttctgagtagcaataagtgggaattatgggcagagcacactcaatcccctgttgattaataaaacaggctggacactaattaactatgggacttaaatctgtagaaatgaaggagtccaatagcttcttccaattttaaaactctagtacatccctttccctcaaatatatatttctaagataaagagaaagaagagcactaagtaagtagaatctgtttttcctattttgtagggctgctgactcctagtccttgaagcctagacacatgacccaggaaatttttcctttgtttcacttttgattatgatgtctgagccaaaaattcaattaagtaaacatactcgcctggatctgaatcattcatttaattactagatctacccagctgttatatcaggccaaaaacagattcgtgtttatataaaagagtaaacgatggttgcaaattttggctatttagagttgctacttcactatgaagagtcacttcaaaacacttcgcttgtctttagggatgatttttgccatttccagtccacggtatgatactaaagctgtcaagagaggtttcttcttttctgaaactgccagctctttccagccctgttgatcactggacataaagcttcttttccccaataattcttctttacttaaaatagtcaggatctttatctacagatgtactctccaggttacctgtgatgatagccccctaatgtcctgctagaaaagtctccaagcagagatgacattacttctgaatgctcataaaccacaccatgaaataaaagctctttgttgttttaagattgtgaagtgtcgttaatgggtccccacagatggtccctgctggactcacctggaatctctccacagccatacccactcatcactatcattgagacctgcacatcttaatagaaatattataaacatcgaaaatcatgacttacctagaagttcgcttgtaactaatgaaattaaacaaatgtgttgccttttgtcatgtgtttctctcctgtgacatttcaaaatatcacatcttgataaataatgtgtttcatcttgaatagctgaactaattgctttggaaacagagtcctagaaaagtgacttcaacagaattgttactaaaatttgcactcacaacatgaaataaattttcttcctatggaataatcgtg

SEQ ID NO: 191297 - DNA, 1281 bp, Homo sapiens
  Payload ID: 17782
  Gene Name: thyroid stimulating hormone receptor
  Uniprot ID: P16473
  ENST ID: ENST00000342443
  CDS Start-End: 251-1012
gtccagccaaggaaagtgaagcaagcagacttgtttgggtcaaggttgcctagggaagcggagcacttaagtgcctctttttccccttctccagcctcctccacagtggtgaggtcacagccccttggagccctccctcttcccacccctcccgctcccgggtctcctttggcctggggtaacccgaggtgcagagctgagaatgaggcgatttcggaggatggagaaatagccccgagtcccgtggaaaatgaggccggcggacttgctgcagctggtgctgctgctcgacctgcccagggacctgggcggaatggggtgttcgtctccaccctgcgagtgccatcaggaggaggacttcagagtcacctgcaaggatattcaacgcatccccagcttaccgcccagtacgcagactctgaagcttattgagactcacctgagaactattccaagtcatgcattttctaatctgcccaatatttccagaatctacgtatctatagatgtgactctgcagcagctggaatcacactccttctacaatttgagtaaagtgactcacatagaaattcggaataccaggaacttaacttacatagaccctgatgccctcaaagagctccccctcctaaagttccttggcattttcaacactggacttaaaatgttccctgacctgaccaaagtttattccactgatatattctttatacttgaaattacagacaacccttacatgacgtcaatccctgtgaatgcttttcagggactatgcaatgaaaccttgacactgaagctgtacaacaatggctttacttcagtccaaggatatgctttcaatgggacaaagctggatgctgtttacctaaacaagaataaatacctgacagttattgacaaagatgcatttggaggagtatacagtggaccaagcttgctgctacctcttggaagaaagtccttgtcctttgagactcagaaggccccacgctccagtatgccatcatgatgcctgctaaggcagccaccttggtgtacatgctcacagaggctctgttcatggagcagctgctgtttgaaaaattttgaaatgcaagatccacaactagatggaaggcactctagtctttgcagaaaaaaatgtacctgaatgtacattgcacaatgcctggcacaaagaaggaagaatataaatgatagttcgactcgtctgtggaagaacttacaatcatggggaaagatggaataaaaacattttttaaacagcatgaaaacata

SEQ ID NO: 191298 - DNA, 4566 bp, Homo sapiens
  Payload ID: 17782
  Gene Name: thyroid stimulating hormone receptor
  ENST ID: ENST00000541158
  CDS Start-End: 323-2617
caggggtgcagggcgacggcttcggccgcaccgcgggctagccagggctgcgtgcccgcctctgaccctcagcagaggtgtctctggccaggaggagctgaagttctgcaggacattggtccgcccgcggacagtccactccgcggggactttctctggataaggacctcctccacagtggtgaggtcacagccccttggagccctccctcttcccacccctcccgctcccgggtctcctttggcctggggtaacccgaggtgcagagctgagaatgaggcgatttcggaggatggagaaatagccccgagtcccgtggaaaatgaggccggcggacttgctgcagctggtgctgctgctcgacctgcccagggacctgggcggaatggggtgttcgtctccaccctgcgagtgccatcaggaggaggacttcagagtcacctgcaaggatattcaacgcatccccagcttaccgcccagtacgcagactctgaagcttattgagactcacctgagaactattccaagtcatgcattttctaatctgcccaatatttccagaatctacgtatctatagatgtgactctgcagcagctggaatcacactccttctacaatttgagtaaagtgactcacatagaaattcggaataccaggaacttaacttacatagaccctgatgccctcaaagagctccccctcctaaagttccttggcattttcaacactggacttaaaatgttccctgacctgaccaaagtttattccactgatatattctttatacttgaaattacagacaacccttacatgacgtcaatccctgtgaatgcttttcagggactatgcaatgaaaccttgacactgaagctgtacaacaatggctttacttcagtccaaggatatgctttcaatgggacaaagctggatgctgtttacctaaacaagaataaatacctgacagttattgacaaagatgcatttggaggagtatacagtggaccaagcttgctggacgtgtctcaaaccagtgtcactgcccttccatccaaaggcctggagcacctgaaggaactgatagcaagaaacacctggactcttaagaaacttccactttccttgagtttccttcacctcacacgggctgacctttcttacccaagccactgctgtgcttttaagaatcagaagaaaatcagaggaatccttgagtccttgatgtgtaatgagagcagtatgcagagcttgcgccagagaaaatctgtgaatgccttgaatagccccctccaccaggaatatgaagagaatctgggtgacagcattgttgggtacaaggaaaagtccaagttccaggatactcataacaacgctcattattacgtcttctttgaagaacaagaggatgagatcattggttttggccaggagctcaaaaacccccaggaagagactctacaagcttttgacagccattatgactacaccatatgtggggacagtgaagacatggtgtgtacccccaagtccgatgagttcaacccgtgtgaagacataatgggctacaagttcctgagaattgtggtgtggttcgttagtctgctggctctcctgggcaatgtctttgtcctgcttattctcctcaccagccactacaaactgaacgtcccccgctttctcatgtgcaacctggcctttgcggatttctgcatggggatgtacctgctcctcatcgcctctgtagacctctacactcactctgagtactacaaccatgccatcgactggcagacaggccctgggtgcaacacggctggtttcttcactgtctttgcaagcgagttatcggtgtatacgctgacggtcatcaccctggagcgctggtatgccatcaccttcgccatgcgcctggaccggaagatccgcctcaggcacgcatgtgccatcatggttgggggctgggtttgctgcttccttctcgccctgcttcctttggtgggaataagtagctatgccaaagtcagtatctgcctgcccatggacaccgagacccctcttgctctggcatatattgtttttgttctgacgctcaacatagttgccttcgtcatcgtctgctgctgttatgtgaagatctacatcacagtccgaaatccgcagtacaacccaggggacaaagataccaaaattgccaagaggatggctgtgttgatcttcaccgacttcatatgcatggccccaatctcattctatgctctgtcagcaattctgaacaagcctctcatcactgttagcaactccaaaatcttgctggtactcttctatccacttaactcctgtgccaatccattcctctatgctattttcaccaaggccttccagagggatgtgttcatcctactcagcaagtttggcatctgtaaacgccaggctcaggcataccgggggcagagggttcctccaaagaacagcactgatattcaggttcaaaaggttacccacgagatgaggcagggtctccacaacatggaagatgtctatgaactgattgaaaactcccatctaaccccaaagaagcaaggccaaatctcagaagagtatatgcaaacggttttgtaagttaacactacactactcacaatggtaggggaacttacaaaataatagtttcttgaatatgcattccaatcccatgacacccccaacacatagctgccctcactcttgtgcaggcgatgtttcaatgtttcatggggcaagagtttatctctggagagtgattagtattaacctaatcattgcccccaagaaggaagttaggctaccagcatatttgaatgccaggtgaaatcaaaataatctacactatctagaagactttcttgatgccaagtccagagatgtcattgtgtaggatgttcagtaaatattaactgagctatgtcaatatagagcttctcagttttgtataacatttcatactaaagattcagcaaatggaaaatgctattaatttggttggtgaccacaagataaaatcagtcccacgttggctcagttcaactagatgttccctgatacaaagagaacttgatttccttaaaactgaaaagccaaacacagctagctgtcatacaagaaacagctattatgagacatgaaggagggtaagaattagctttaagttttgttttgctttgttttgttttttaactcaacctattaatcatctcttcacaagaatccacctgatgtgaccaagctattatgtgttgcctggaaaaactggcaagatttcagcttatgtggcctagcaaactaagaattgctcttcttggccagcctcatagcataaaagatgtgaactctaggaagtctttctgagtagcaataagtgggaattatgggcagagcacactcaatcccctgttgattaataaaacaggctggacactaattaactatgggacttaaatctgtagaaatgaaggagtccaatagcttcttccaattttaaaactctagtacatccctttccctcaaatatatatttctaagataaagagaaagaagagcactaagtaagtagaatctgtttttcctattttgtagggctgctgactcctagtccttgaagcctagacacatgacccaggaaatttttcctttgtttcacttttgattatgatgtctgagccaaaaattcaattaagtaaacatactcgcctggatctgaatcattcatttaattactagatctacccagctgttatatcaggccaaaaacagattcgtgtttatataaaagagtaaacgatggttgcaaattttggctatttagagttgctacttcactatgaagagtcacttcaaaacacttcgcttgtctttagggatgatttttgccatttccagtccacggtatgatactaaagctgtcaagagaggtttcttcttttctgaaactgccagctctttccagccctgttgatcactggacataaagcttcttttccccaataattcttctttacttaaaatagtcaggatctttatctacagatgtactctccaggttacctgtgatgatagccccctaatgtcctgctagaaaagtctccaagcagagatgacattacttctgaatgctcataaaccacaccatgaaataaaagctctttgttgttttaagattgtgaagtgtcgttaatgggtccccacagatggtccctgctggactcacctggaatctctccacagccatacccactcatcactatcattgagacctgcacatcttaatagaaatattataaacatcgaaaatcatgacttacctagaagttcgcttgtaactaatgaaattaaacaaatgtgttgccttttgtcatgtgtttctctcctgtgacatttcaaaatatcacatcttgataaataatgtgtttcatcttgaatagctgaactaattgctttggaaacagagtcctagaaaagtgacttcaacagaattgttactaaaatttgcactcacaacatgaaataaattttcttcctatggaataatcgtg

SEQ ID NO: 191299 - DNA, 1089 bp, Homo sapiens
  Payload ID: 17782
  Gene Name: thyroid stimulating hormone receptor
  Uniprot ID: P16473
  ENST ID: ENST00000554435
  CDS Start-End: 27-851
agaaatagccccgagtcccgtggaaaatgaggccggcggacttgctgcagctggtgctgctgctcgacctgcccagggacctgggcggaatggggtgttcgtctccaccctgcgagtgccatcaggaggaggacttcagagtcacctgcaaggatattcaacgcatccccagcttaccgcccagtacgcagactctgaagcttattgagactcacctgagaactattccaagtcatgcattttctaatctgcccaatatttccagaatctacgtatctatagatgtgactctgcagcagctggaatcacactccttctacaatttgagtaaagtgactcacatagaaattcggaataccaggaacttaacttacatagaccctgatgccctcaaagagctccccctcctaaagttccttggcattttcaacactggacttaaaatgttccctgacctgaccaaagtttattccactgatatattctttatacttgaaattacagacaacccttacatgacgtcaatccctgtgaatgcttttcagggactatgcaatgaaaccttgacactgaagctgtacaacaatggctttacttcagtccaaggatatgctttcaatgggacaaagctggatgctgtttacctaaacaagaataaatacctgacagttattgacaaagatgcatttggaggagtatacagtggaccaagcttgctggtagaaaatgttgctgtctcgggtaaaggcttctgcaagtccctcttttcctggctgtataggctacctcttggaagaaagtccttgtcctttgagactcagaaggccccacgctccagtatgccatcatgatgcctgctaaggcagccaccttggtgtacatgctcacagaggctctgttcatggagcagctgctgtttgaaaaattttgaaatgcaagatccacaactagatggaaggcactctagtctttgcagaaaaaaatgtacctgaatgtacattgcacaatgcctggcacaaagaaggaagaatataaatgatagttcgactcgtctgtggaagaacttacaatcatggggaaagatggaat

SEQ ID NO: 191300 - DNA, 557 bp, Homo sapiens
  Payload ID: 17782
  Gene Name: thyroid stimulating hormone receptor
  ENST ID: ENST00000555326
  CDS Start-End: 53-391
gagaatgaggcgatttcggaggatggagaaatagccccgagtcccgtggaaaatgaggccggcggacttgctgcagctggtgctgctgctcgacctgcccagggacctgggcggaatggggtgttcgtctccaccctgcgagtgccatcaggaggaggacttcagagtcacctgcaaggatattcaacgcatccccagcttaccgcccagtacgcagactctgaagcttattgagactcacctgagaactattccaagtcatgcattttctaatctgcccaatatttccagaatctacgtatctatagatgtgactctgcagcagctggaatcacactccttctacaatttgagtaaagtgactcacataacagatacggatgcattatagtgactgtgttccttgtaacttatacagagaaattcggaataccaggaacttaacttacatagaccctgatgccctcaaagagctccccctcctaaagttccttggcattttcaacactggacttaaaatgttccctgacctgaccaaagtttattccactgatata

SEQ ID NO: 191301 - DNA, 1184 bp, Homo sapiens
  Payload ID: 17782
  Gene Name: thyroid stimulating hormone receptor
  ENST ID: ENST00000554263
  CDS Start-End: 27-722
agaaatagccccgagtcccgtggaaaatgaggccggcggacttgctgcagctggtgctgctgctcgacctgcccagggacctgggcggaatggggtgttcgtctccaccctgcgagtgccatcaggaggaggacttcagagtcacctgcaaggatattcaacgcatccccagcttaccgcccagtacgcagactctgaagcttattgagactcacctgagaactattccaagtcatgcattttctaatctgcccaatatttccagaatctacgtatctatagatgtgactctgcagcagctggaatcacactccttctacaatttgagtaaagtgactcacatagaaattcggaataccaggaacttaacttacatagaccctgatgccctcaaagagctccccctcctaaagttccttggcattttcaacactggacttaaaatgttccctgacctgaccaaagtttattccactgatatattctttatacttgaaattacagacaacccttacatgacgtcaatccctgtgaatgcttttcagggactatgcaatgaaaccttgacactgaagctgtacaacaatggctttacttcagtccaaggatatgctttcaatgggacaaagctggatgctgtttacctaaacaagaataaatacctgacagttattgacaaagatgcatttggaggagtatacagtggaccaagcttgctgtgagtaagacatacaaaagaatattttagtctttttttttctttttttttttttggaataaatggagacattaaggggagaatcttatgttcaagggtagaaaatgttgctgtctcgggtaaaggcttctgcaagtccctcttttcctggctgtataggctacctcttggaagaaagtccttgtcctttgagactcagaaggccccacgctccagtatgccatcatgatgcctgctaaggcagccaccttggtgtacatgctcacagaggctctgttcatggagcagctgctgtttgaaaaattttgaaatgcaagatccacaactagatggaaggcactctagtctttgcagaaaaaaatgtacctgaatgtacattgcacaatgcctggcacaaagaaggaagaatataaatgatagttcgactcgtctgtggaagaacttacaatcatggggaaagatggaa

SEQ ID NO: 191302 - DNA, 537 bp, Homo sapiens
  Payload ID: 17783
  Gene Name: thyroid stimulating hormone, beta
  Uniprot ID: P01222
  ENST ID: ENST00000256592
  CDS Start-End: 39-455
gggtcaccacagcatctgctcaccaatgcaaagtaagcatgactgctctctttctgatgtccatgctttttggccttacatgtgggcaagcgatgtctttttgtattccaactgagtatacaatgcacatcgaaaggagagagtgtgcttattgcctaaccatcaacaccaccatctgtgctggatattgtatgacacgggatatcaatggcaaactgtttcttcccaaatatgctctgtcccaggatgtttgcacatatagagacttcatctacaggactgtagaaataccaggatgcccactccatgttgctccctatttttcctatcctgttgctttaagctgtaagtgtggcaagtgcaatactgactatagtgactgcatacatgaagccatcaagacaaactactgtaccaaacctcagaagtcttatctggtaggattttctgtctaatagtgatataatttgcaatttggttaaatgtgcttgcctgaaataaagctaataaaaatattatgtttcacattatcttctg

SEQ ID NO: 191303 - DNA, 474 bp, Homo sapiens
  Payload ID: 17783
  Gene Name: thyroid stimulating hormone, beta
  Uniprot ID: P01222
  ENST ID: ENST00000369517
  CDS Start-End: 1-417
atgactgctctctttctgatgtccatgctttttggccttacatgtgggcaagcgatgtctttttgtattccaactgagtatacaatgcacatcgaaaggagagagtgtgcttattgcctaaccatcaacaccaccatctgtgctggatattgtatgacacgggatatcaatggcaaactgtttcttcccaaatatgctctgtcccaggatgtttgcacatatagagacttcatctacaggactgtagaaataccaggatgcccactccatgttgctccctatttttcctatcctgttgctttaagctgtaagtgtggcaagtgcaatactgactatagtgactgcatacatgaagccatcaagacaaactactgtaccaaacctcagaagtcttatctggtaggattttctgtctaatagtgatataatttgcaatttggttaaatgtgcttgcctgaaataaagctaataaaa

SEQ ID NO: 191304 - DNA, 4394 bp, Homo sapiens
  Payload ID: 17784
  Gene Name: thyrotrophic embryonic factor
  Uniprot ID: Q10587
  ENST ID: ENST00000266304
  CDS Start-End: 117-1028
attgggcgcctgcgcagtagctgcccgtgtcggcagctgcagcgggtcgcacggctccggcccatctcggggggcgggcgggggaggcgaggtgcgcgagccgagtccggggcacgatgtccgacgcgggcggcggaaagaagccgcctgtggacccgcaggcaggacccggtccggggccggggcgcgcagctggggaaaggggcctgtcggggtccttccccctggtcctgaagaagctgatggagaaccccccgcgcgaggcgcgcctcgataaggaaaaggggaaggaaaagctggaggaggacgaggccgcagccgccagcaccatggctgtctcagcctccctcatgccacccatctgggacaagaccatcccatatgatggcgaatctttccacctggagtacatggacctggatgagttcctgctggagaatggcatccccgccagccccacccacctggcccacaacctgctgctgcctgtagcagagctagaagggaaggagtctgccagctcttccacagcatccccaccatcctcctccactgccatctttcagccctctgaaaccgtgtccagcacagaatcttccctggagaaggagagggagactcccagtcccatcgaccccaattgtgtggaagtggatgtgaacttcaatccggaccccgccgacctggtgctctccagtgtgccaggcggggagctcttcaaccctcggaagcacaagtttgctgaggaggacctgaagccccagcctatgatcaaaaaggccaagaaggtctttgtccccgacgagcagaaggatgaaaagtactggacaagacgcaagaagaacaacgtggcagctaaacggtcacgggatgcccggcgcctgaaagagaatcagatcaccatccgggcagccttcctggagaaggagaacacagccctgcggacggaggtggccgagctacgcaaggaggtgggcaagtgcaagaccatcgtgtccaagtatgagaccaaatacgggcccttgtaacccgtgccccccgcccgggcggggtactgcctgcacctcagacctctgcctgggggctccctgtaacccctcacacgcgtggagacttatgactcgtcgtgggcgcatggcggcgcacctgctgcaggagcggccacgtctcagcttcattataccatggcctgcgcacgtggcgacgtccctgaggggccagtctcctcactggtggggaacgcaagagaatctgcgtagatgggtgactcagccttagtttctattcttggatgtcccagttgaatcagaaggggacctctggagtacacacctctctcctgggcgctcagggtccctggactctccctcagtctccagcctgggctgccgagggctatctctgcagaatgagttgtgatcattgtcaccctatgtcttctcaggtagcagggcgcgtttccacttaaggtgtgtctgtcacgcacctcattctccccagacagtctttgagtaacatctgttcccatcttccttggaagcaggacacaccagctcctccgtcagtgtctgcatgggtagcaggctgcaggagtggggtctctgcacagcctgggatggggcttggggctggggcctgcagcagaagtgtgcccagcgtttctcggctcccgcaccccttttcccttatggctctgaggccatcggctgtctctgcatttcattggctgtggaggagagactcctaggatggctgctgtctgagccatgagtgccagggctgagagaggcctcttcatttcctctccaggctactcagaggccatgtgaagctcgtttgtcccactagaccaggcctctgggcctgctctttctttccacccaatgtccagtcttggatcatagatttaaaaggaaaacccctcttatctaggaggctttaacttcctggaccccaggattcaccttcctagtggtgtttagaaaatgcctccacagcccccttccaccatgggcatgagagctggggtgtgtttcttgagaagctcccttttttcttgctctgctcaccggtgtggcctgggctggagtgcactctccctgggggcagctggggcctcgcaattcttgcttcaggatctctcccatgcgagctgcccggagggtgtcagcagggcaagacacctagtctagagtcaccaaggtcacagtgccactttcacgggatagcaggctcttgggacttttacacaggcctagggtcccctcagtcttggtcccaggagatgggggccactcgtgaggctggccatgctgtggcttctcacagctgtggtctcccctgcctcacaacgactcctttctcttgtgtggcgggactcgcccttttgctgtgctcagaagattcactgaggaaactcatggaagcctctgctcatttgggtcactgggacacccctgagatgggtgtgtttatttgctcagggcgggcagcctatggtgaagaggagacagaggcgatgggcgtgcttcgtcctccgtaacactggctttatttaccgtggtggttcagagtcccaggccctgacctctaaagacttttcataacagacgttaagaccaagccgtggacctcaccccaggggaatgccacggccctttggggacctgcacacccacctctccgggggacttgacaaggggccctgaggccaagggaggtcactcctccctccaggcccctgacttttactttgtggttctctaaaaaccatgtacacactttcactctattgtaaccacacagggcaggcgcatccagcatgtcagtgtcctgccccgggcagctctccctcccgggcacgctccctctggcctggtggatcaccaagagggcggttctcattttgttattagtggaagagccttgagcttaaaagctcttcattttctttgccggaaagtatatggtttgtgtttttgcagttttatttttttaaggatggacactaaatctctggtgtccatgttccgagcccggtggctgggatggtggctcgatgtgtctcctctttatcccgccctctgcctgtttggtgccctcccttctttcccccaggcagtgggtatcgggttctttcccaaagtgcttacttggaaagagtgtggctgctggactcttttcgaaatgcccctctgagtcaggagcctggtggggacaagatggaggatgtccacagaggctgacctgtgggggaaaagaagtgctcaggtaaggttgtctcctctcctgtcctaaaaaaatccatgcttgcaggagagggttggtgcctgctcagtttctgtcgagggaatgggagtctcctcggctccctcctgggccctctgcttcttggaggccgaccgctggagactgcggctcctgtgcttggatctttgacatctgtcagtcactggaggctagagaagttgactttaccttggctttctgtgggttcccgatgggcttggaagtgccgtctacttcctaagcatcctgtctaaagctttgtggcaccctcagtgcaacctcagaacagacaaatcatgaatgagctggaactttgcaagaatattcatattataaatgtctcatctgatggaggaacgtgtgcatttagagagagggagagttttcaaggtttatggcaactttgtggaggacctgggtaactcttacccttggccaaaggaagaggttttcctgtctggcttctgaggttggagggggcacttagcagtgaaccttaagtctgggtacatgtaaccctgctgaggggctgtgcaggccgctcctacggtcctttggcctgaggcagggcgggaggcatgcaagccagtgggggaaaacccctctgaagctgggcagccctctacctgggccccgggagccgtgctccttggaacgcaaagggccgaggagcatctggttttcatggcaaagctctactccagagctcctttaacatctgctaattaagtgcaataaatttttctagaaaatggcaaagatgacttccaggtggatattgctctcttacggtgttggggatgccagaacaccacttggttttatttttctaagtgcatgtgatgtgatagagtgtgtggggctctgtgtccttccctgggagctggcattccagcgggcccctctctttacctttgttgggggaaggaggcaagagagaaattccttcttcccagccagagagggcagaagcagaccgtagcccattggccttatgtgcgtgtgtgcgtgcgagtgtgtcactgctggtgggccggagtgatgtggtgggagggaagccgggaatgtatccttttcagacaaaattaaatattttgaaatgagaa

SEQ ID NO: 191305 - DNA, 4386 bp, Homo sapiens
  Payload ID: 17784
  Gene Name: thyrotrophic embryonic factor
  Uniprot ID: Q10587
  ENST ID: ENST00000406644
  CDS Start-End: 201-1022
agctggcaggtggccgagccgggggtggacgggcgggctgggactggtgctggccattggctgcctcaaggctcccaccccgcctgcctccctagcctgcggctggcggcccctgcctctccagctgcctctgaactccctggagcaagcacctcctgctgggctgtgtgagctgcgactggttctcagtggcccctgccatggacatgcctgaggtcctcaagtccctgctggagcactctctgccttggccagagaagagaacagataaggaaaaggggaaggaaaagctggaggaggacgaggccgcagccgccagcaccatggctgtctcagcctccctcatgccacccatctgggacaagaccatcccatatgatggcgaatctttccacctggagtacatggacctggatgagttcctgctggagaatggcatccccgccagccccacccacctggcccacaacctgctgctgcctgtagcagagctagaagggaaggagtctgccagctcttccacagcatccccaccatcctcctccactgccatctttcagccctctgaaaccgtgtccagcacagaatcttccctggagaaggagagggagactcccagtcccatcgaccccaattgtgtggaagtggatgtgaacttcaatccggaccccgccgacctggtgctctccagtgtgccaggcggggagctcttcaaccctcggaagcacaagtttgctgaggaggacctgaagccccagcctatgatcaaaaaggccaagaaggtctttgtccccgacgagcagaaggatgaaaagtactggacaagacgcaagaagaacaacgtggcagctaaacggtcacgggatgcccggcgcctgaaagagaatcagatcaccatccgggcagccttcctggagaaggagaacacagccctgcggacggaggtggccgagctacgcaaggaggtgggcaagtgcaagaccatcgtgtccaagtatgagaccaaatacgggcccttgtaacccgtgccccccgcccgggcggggtactgcctgcacctcagacctctgcctgggggctccctgtaacccctcacacgcgtggagacttatgactcgtcgtgggcgcatggcggcgcacctgctgcaggagcggccacgtctcagcttcattataccatggcctgcgcacgtggcgacgtccctgaggggccagtctcctcactggtggggaacgcaagagaatctgcgtagatgggtgactcagccttagtttctattcttggatgtcccagttgaatcagaaggggacctctggagtacacacctctctcctgggcgctcagggtccctggactctccctcagtctccagcctgggctgccgagggctatctctgcagaatgagttgtgatcattgtcaccctatgtcttctcaggtagcagggcgcgtttccacttaaggtgtgtctgtcacgcacctcattctccccagacagtctttgagtaacatctgttcccatcttccttggaagcaggacacaccagctcctccgtcagtgtctgcatgggtagcaggctgcaggagtggggtctctgcacagcctgggatggggcttggggctggggcctgcagcagaagtgtgcccagcgtttctcggctcccgcaccccttttcccttatggctctgaggccatcggctgtctctgcatttcattggctgtggaggagagactcctaggatggctgctgtctgagccatgagtgccagggctgagagaggcctcttcatttcctctccaggctactcagaggccatgtgaagctcgtttgtcccactagaccaggcctctgggcctgctctttctttccacccaatgtccagtcttggatcatagatttaaaaggaaaacccctcttatctaggaggctttaacttcctggaccccaggattcaccttcctagtggtgtttagaaaatgcctccacagcccccttccaccatgggcatgagagctggggtgtgtttcttgagaagctcccttttttcttgctctgctcaccggtgtggcctgggctggagtgcactctccctgggggcagctggggcctcgcaattcttgcttcaggatctctcccatgcgagctgcccggagggtgtcagcagggcaagacacctagtctagagtcaccaaggtcacagtgccactttcacgggatagcaggctcttgggacttttacacaggcctagggtcccctcagtcttggtcccaggagatgggggccactcgtgaggctggccatgctgtggcttctcacagctgtggtctcccctgcctcacaacgactcctttctcttgtgtggcgggactcgcccttttgctgtgctcagaagattcactgaggaaactcatggaagcctctgctcatttgggtcactgggacacccctgagatgggtgtgtttatttgctcagggcgggcagcctatggtgaagaggagacagaggcgatgggcgtgcttcgtcctccgtaacactggctttatttaccgtggtggttcagagtcccaggccctgacctctaaagacttttcataacagacgttaagaccaagccgtggacctcaccccaggggaatgccacggccctttggggacctgcacacccacctctccgggggacttgacaaggggccctgaggccaagggaggtcactcctccctccaggcccctgacttttactttgtggttctctaaaaaccatgtacacactttcactctattgtaaccacacagggcaggcgcatccagcatgtcagtgtcctgccccgggcagctctccctcccgggcacgctccctctggcctggtggatcaccaagagggcggttctcattttgttattagtggaagagccttgagcttaaaagctcttcattttctttgccggaaagtatatggtttgtgtttttgcagttttatttttttaaggatggacactaaatctctggtgtccatgttccgagcccggtggctgggatggtggctcgatgtgtctcctctttatcccgccctctgcctgtttggtgccctcccttctttcccccaggcagtgggtatcgggttctttcccaaagtgcttacttggaaagagtgtggctgctggactcttttcgaaatgcccctctgagtcaggagcctggtggggacaagatggaggatgtccacagaggctgacctgtgggggaaaagaagtgctcaggtaaggttgtctcctctcctgtcctaaaaaaatccatgcttgcaggagagggttggtgcctgctcagtttctgtcgagggaatgggagtctcctcggctccctcctgggccctctgcttcttggaggccgaccgctggagactgcggctcctgtgcttggatctttgacatctgtcagtcactggaggctagagaagttgactttaccttggctttctgtgggttcccgatgggcttggaagtgccgtctacttcctaagcatcctgtctaaagctttgtggcaccctcagtgcaacctcagaacagacaaatcatgaatgagctggaactttgcaagaatattcatattataaatgtctcatctgatggaggaacgtgtgcatttagagagagggagagttttcaaggtttatggcaactttgtggaggacctgggtaactcttacccttggccaaaggaagaggttttcctgtctggcttctgaggttggagggggcacttagcagtgaaccttaagtctgggtacatgtaaccctgctgaggggctgtgcaggccgctcctacggtcctttggcctgaggcagggcgggaggcatgcaagccagtgggggaaaacccctctgaagctgggcagccctctacctgggccccgggagccgtgctccttggaacgcaaagggccgaggagcatctggttttcatggcaaagctctactccagagctcctttaacatctgctaattaagtgcaataaatttttctagaaaatggcaaagatgacttccaggtggatattgctctcttacggtgttggggatgccagaacaccacttggttttatttttctaagtgcatgtgatgtgatagagtgtgtggggctctgtgtccttccctgggagctggcattccagcgggcccctctctttacctttgttgggggaaggaggcaagagagaaattccttcttcccagccagagagggcagaagcagaccgtagcccattggccttatgtgcgtgtgtgcgtgcgagtgtgtcactgctggtgggccggagtgatgtggtgggagggaagccgggaatgtatccttttcagacaaaattaaatattttgaaatgag

SEQ ID NO: 191306 - DNA, 551 bp, Homo sapiens
  Payload ID: 17784
  Gene Name: thyrotrophic embryonic factor
  ENST ID: ENST00000413942
  CDS Start-End: 1-551
gcttcatctttttgcctaggccaggaacgtcactggggcgtatacggaaagcagataaggaaaaggggaaggaaaagctggaggaggacgaggccgcagccgccagcaccatggctgtctcagcctccctcatgccacccatctgggacaagaccatcccatatgatggcgaatctttccacctggagtacatggacctggatgagttcctgctggagaatggcatccccgccagccccacccacctggcccacaacctgctgctgcctgtagcagagctagaagggaaggagtctgccagctcttccacagcatccccaccatcctcctccactgccatctttcagccctctgaaaccgtgtccagcacagaatcttccctggagaaggagagggagactcccagtcccatcgaccccaattgtgtggaagtggatgtgaacttcaatccggaccccgccgacctggtgctctccagtgtgccaggcggggagctcttcaaccctcggaagcacaagtttgctgaggaggacctgaagccccagcctatg

SEQ ID NO: 191307 - DNA, 1978 bp, Homo sapiens
  Payload ID: 17785
  Gene Name: thyrotropin-releasing hormone
  Uniprot ID: P20396
  ENST ID: ENST00000302649
  CDS Start-End: 528-1256
tctgcggccgtgtccctttcgtgtgtgtctgccctgtgtttctccgtcgtctccgtgtggatctcggtctttgtctcgccctctagctctctcgtgcgcctgtgtttaatcgtgcgcttctctcaatctctctgtccctccctttgccccctacacgcgtgttctcgtcaacagatctccagaggtggtgcagaaacgaccccgcgccggcgccccatcctgcggccagtgcctccgcgccccggctccggtccccaccgtccccgccccagatttccggaggagcaggcgggcggggtcccgcggggccggctgccgtcagcgccccttcccggcggccgcgacccctccccgctgacctcactcgagccgccgcctggcgcagatataagcggcggcccatctgaagagggctcggcaggcgcccggggtcctcagcgctgcagactcctgacctgccgactgcggatcccgagtccccggatcccggacccatcctgtggagcccactcctggcagacgccgcgatgcccggcccttggttgctgctcgctctggctttgaccctgaacctgaccggtgtccccggcggccgtgctcagccagaggcggcccagcaggaggcagtgacggccgcggagcatccgggcctggatgacttcctgcgccaggtggagcgcctcctcttcctccgggaaaacatccagcggctgcaaggggaccagggtgagcactccgcgtcccagatctttcaatctgactggctctccaaacgtcagcatccaggcaaaagagaggaggaggaggaagagggagttgaagaagaggaagaggaagaagggggggctgtgggaccccacaaacggcagcaccctggccgacgagaagatgaggcttcatggtcagtcgatgtaacccagcacaagcggcagcatcctggccggcgctccccctggcttgcatatgctgtcccgaagcggcagcacccaggcagaaggctggcagatcccaaggctcaaaggagctgggaagaagaggaggaggaggaagagagagaggaagacctgatgcctgaaaaacgccagcatccgggcaagagggccctgggaggcccctgtgggccccagggagcctatggtcaagcgggccttctgctggggctcctggatgacctgagtaggagccagggagctgaggaaaagcggcagcaccctggtcggcgggcagcctgggtcagagagcccctggaggagtgaacccagttttccctgaagtcgagtttgtggtctaaggatgtcttgagccctgtgtgccccaccattcatgacctctgtattctctagttagatccctgaccataagcctgagcccctccctcccagccccatattcacacacatcccagcccctggccttgccctcttcctttaggcatgtgagaaaatcagcctagcagtttaaaccccactttcctccacttagcaccataggcaagggggcagatcccagagcccctctcaccccccccaccacaggcctgctccttccttagccttggctaagatggtccttctgtgtcttgcaaagactccccaagtgggacagggagcccctgggagggcagccagtgagggtggggtgggactgaagcgttgtgtgcaaatccagcttccatcccctccccaacctggcaggattctccatgtgtaaacttcacccccaggacccaggatcttctcctttctgggcatccctttgtgggtgggcagagccctgacccacagctgtgttactgcttggagaagcatatgtaggggcataccctgtggtgttgtgctgtgtctggctgtgggataaatgtgtgtgggaatattgaaacatcgcctaggaattgtggtttgtatataaccctctaagcccctatcccttgtcgatgacagtcatcctaatgataataaaacctgcatccagataatca

SEQ ID NO: 191308 - DNA, 1580 bp, Homo sapiens
  Payload ID: 17785
  Gene Name: thyrotropin-releasing hormone
  ENST ID: ENST00000507066
  CDS Start-End: 145-861
agatataagcggcggcccatctgaagagggctcggcaggcgcccggggtcctcagcgctgcagactcctgacctgccgactgcggatcccgagtccccggatcccggacccatcctgtggagcccactcctggcagacgccgcgatgcccggcccttggttgctgctcgctctggctttgaccctgaacctgaccggtgtccccggcggccgtgctcagccagaggcggcccagcaggaggcagtgacggccgcggagcatccgggcctggatgacttcctgcgccaggtggagcgcctcctcttcctccgggaaaacatccagcggctgcaaggggaccaggcgtcccagatctttcaatctgactggctctccaaacgtcagcatccaggcaaaagagaggaggaggaggaagagggagttgaagaagaggaagaggaagaagggggggctgtgggaccccacaaacggcagcaccctggccgacgagaagatgaggcttcatggtcagtcgatgtaacccagcacaagcggcagcatcctggccggcgctccccctggcttgcatatgctgtcccgaagcggcagcacccaggcagaaggctggcagatcccaaggctcaaaggagctgggaagaagaggaggaggaggaagagagagaggaagacctgatgcctgaaaaacgccagcatccgggcaagagggccctgggaggcccctgtgggccccagggagcctatggtcaagcgggccttctgctggggctcctggatgacctgagtaggagccagggagctgaggaaaagcggcagcaccctggtcggcgggcagcctgggtcagagagcccctggaggagtgaacccagttttccctgaagtcgagtttgtggtctaaggatgtcttgagccctgtgtgccccaccattcatgacctctgtattctctagttagatccctgaccataagcctgagcccctccctcccagccccatattcacacacatcccagcccctggccttgccctcttcctttaggcatgtgagaaaatcagcctagcagtttaaaccccactttcctccacttagcaccataggcaagggggcagatcccagagcccctctcaccccccccaccacaggcctgctccttccttagccttggctaagatggtccttctgtgtcttgcaaagactccccaagtgggacagggagcccctgggagggcagccagtgagggtggggtgggactgaagcgttgtgtgcaaatccagcttccatcccctccccaacctggcaggattctccatgtgtaaacttcacccccaggacccaggatcttctcctttctgggcatccctttgtgggtgggcagagccctgacccacagctgtgttactgcttggagaagcatatgtaggggcataccctgtggtgttgtgctgtgtctggctgtgggataaatgtgtgtgggaatattgaaacatcgcctaggaattgtggtttgtatataaccctctaagcccctatcccttgtcgatgacagtcatcctaatgataataaaacctgcatccagataa

SEQ ID NO: 191309 - DNA, 10733 bp, Homo sapiens
  Payload ID: 17786
  Gene Name: thyrotropin-releasing hormone degrading enzyme
  Uniprot ID: Q9UKU6
  ENST ID: ENST00000261180
  CDS Start-End: 97-3171
aagaaaaagaagaagaaaaagaagaggaagaagaagaaggaggaggaggaggaggaggagggggccgagaagagcagctcacccttcgcagccgcgatgggggaagacgacgccgcgcttcgggctggcagcagggggctctccgacccgtgggcagactcagtgggagtgcgaccccgcaccacggagcgccacatcgccgtacacaagcggcttgtgctggccttcgctgtgtccctcgtggcattgctcgcggtcacaatgctcgctgtgctgctcagcctgcgcttcgacgagtgcggggcgagtgccacgccaggcgccgacggtggcccctcaggctttccggagcgcggcggcaacgggagcctccctggatcggcccggcgcaaccaccacgcaggcggggactcctggcagcccgaggcgggtggggtggccagtccggggaccacgtcggcccagccgccgtcggaggaggagcgggagccgtgggagccgtggacgcagctgcgcctgtcgggccacctgaagccgctgcactacaatctgatgctcaccgccttcatggagaacttcaccttctccggggaggtcaacgtggagatcgcgtgccggaacgccacccgctacgtagtgctgcacgcttcccgagtggcggtggagaaagtgcagctggccgaggaccgggcgttcggggctgtccctgtagccggttttttcctctacccgcaaacccaggtcttagtggtggtgctgaataggacactggacgcgcagaggaattacaatctgaagattatctacaacgcgctcatcgagaatgagctcctgggcttcttccgcagctcctatgtgctccacggggagagaagattccttggtgttactcagttttcgcctacacatgccagaaaggcatttccttgttttgatgagccaatctacaaggctactttcaaaatcagcatcaagcatcaagcaacctatttatctttatctaatatgccagtggaaacttccgtgtttgaggaagatggatgggttacggatcacttttcacagacccctctcatgtccacatattatttagcctgggcaatttgcaacttcacatacagagaaactaccaccaagagtggggttgtagtacgattatatgcaagacctgatgctatcagaagaggatccggggactatgctctccatataacaaagagattaatagaattttatgaagactactttaaagtgccctattccttgccaaaactagatcttttagctgtgcctaagcatccgtatgctgctatggagaactggggactaagtatttttgtggaacaaagaatactgctggatcccagtgtttcatctatttcttatttgctggatgtcaccatggtcattgttcatgagatatgtcaccagtggtttggtgaccttgtgacgcctgtgtggtgggaagacgtgtggctgaaggaagggtttgctcactactttgaatttgttggtacagactacctctatcctggctggaacatggaaaagcagaggtttctgaccgatgttctgcatgaagtgatgctgctggacggtttggccagttcccatccagtatcacaggaagtgctgcaggcaacagatattgacagggtgtttgactggatcgcatataaaaagggtgctgctttaataagaatgctggctaattttatgggccattcagttttccagaggggtttgcaagattatttaaccattcataagtatggtaatgcagccagaaatgatctctggaatacattatcggaggctttaaaaagaaatgggaaatatgtaaatatacaagaagtaatggatcagtggacactccagatgggttatcctgttatcaccatcttgggaaacacaacagcagaaaatagaataataattacccaacagcattttatctatgatatcagtgctaaaactaaagcacttaaacttcagaataacagttacctgtggcagattccattaactattgtggtaggaaatagaagccatgtgtcttcagaagcaattatttgggtgtctaacaaatcagagcaccacagaataacttatttggacaaaggaagctggctgctggggaacatcaatcaaactggctattttagagtcaactatgacctaaggaactggagattattaattgatcaattaatccggaatcatgaggttctttctgtcagtaaccgagcgggcttgatcgatgatgccttcagcctagccagggctggctatttgcctcagaatattcctctggagattatcagatacctgtctgaggagaaggattttcttccttggcatgctgccagccgagctctttatcctctagataaattactggaccgcatggaaaactacaacattttcaatgaatatattttaaagcaagttgcaacaacatatatcaagcttgggtggccgaaaaataattttaatggatctcttgttcaagcatcctaccaacatgaagaactacgtagagaagttataatgctggcctgcagttttggcaacaagcactgtcaccaacaggcatcaacacttatttcagattggatttccagcaacaggaacagaataccactaaatgttagagacatcgtatactgtacaggagtgtcactactggatgaggatgtctgggaattcatatggatgaaattccattccaccacagcagtttctgagaagaaaatattattggaagccttaacttgcagtgatgacaggaatttattaaacaggcttctaaatctgtcactgaattctgaggtggtgctggatcaagatgcaattgatgtcataatccatgtagctcgaaatccacatggtcgagaccttgcctggaagtttttcagggataaatggaagatattaaataccaggtatggagaagcattgtttatgaattccaaactcatcagtggtgtcacagaatttcttaatactgaaggtgaactcaaagagctcaagaacttcatgaaaaactatgatggggtagctgctgcttctttctcacgagctgtggaaactgtcgaagccaatgtgcgctggaaaatgctttaccaagacgagcttttccaatggttaggaaaagctctaagacactaatatatgtatcttataaacaaacaattcaactcagaagtttatgagaagacacgctttttgtggaatgaggaaaatgtactacctagaaaatggccagattttcagtgttaacgtgtgggaggaattttttttttagtttttattttttggttttgggggatattttttatttgtttcattcattctgttctgtttctctactgggtgttcctctctaaagaaactcttgcaagtgaaactagccatgattgcttcagctgtacattccttgctgtacaggaccaaatatgatagtgatgcatgttgatgttacagtcaatttggaaaaacatattcagaatatctgtgcatggatatattgtcctgcctgtgttccagcatgcttatttcaaacgtccagtgttgtgtgtgaatatgtgttacacctaggatgggcattatgcaaaagcacaaagattatatatgacaatcagtattgcaatgaaagaaaaactaaaaacagaaatgatattctcaattttgggcaatgtgagaggtaaaatagcccttgacatgatgaacatcacttatttcagcacttggattgtctggcaatgattactgtgttgctaactcattttctttgagttaaagctgtgtatacattttaaaaggcatatagatagtgtatgcatatgtatatgtacatagggaagccccatatgtatatagtatgttgtacactgcacatgtacaaagaatgtcttcagatcaaagaaaatttatctctttttataaacttaaggacagttgcaaaaggcttcaaggaatttatctcaacattattctttctatgtcctaactaaatttctcaactgttatgaatttttcatctacttcttgaacagtggtctattctgctacatgaagatgaatacaaacaaaatttttgtataaactactattccagttctcctgtgtcagtcttgcctatagattttgccatcgttttctgtcaaagttccttttgcatgaaacaattatgcaaacttataattattagtgctgaaaaagagtttattttccatcttgtttgttttcctaccttatgctgagtagtccagagagttaaaaaaattctctgcatgttggtcttttaagtctgttttgctctaatcctccattaagcgagcatacctcaagtgggtctattagcatttaatgaccttttgtgccagttgtgccatcccttaagatgaaaagttccttttcttgtgttaatgtacaaagcttttcttttggcactgacaactgtgttctacctgggaattttgaatagccattttcatggctgtgtgttgtgtaacacaaatgtttttaaatggtattctcacccagtaggccagctctccaaacgttgcttagatgcttcaaaattagcatattttaagtttaccagtataaaataccaatgcaactactctacatagccaaatgtttgtaaatcacgtcttattttcctgaggtttttcactccaccaaatcttacaaatcattgaaagaaatatattctaacagtacgcactgaatagtgaaaataattagacattttaagaaccagagccatagaattattttaaattagtagaaaagaggagctatttccgaatctatagaataaagtaccacctaaaactgaattttatcatataagcaagtaatacctattagtcatacctaaatttttcagcacttcattcaattaaaatacatgaattttaaatattttacatgatgtgaataggcatgataatacttttagtataaaatctaaactttttccatttatcagaaatgataaaatccagttaccacatatcacgtttataaaatccttaattaaatgagtaacttctaaaatataacaatactaaatatcacactgcgatggaggtcccaaatatgtggtctatcaccactgaattcatgtaatagataagaaaaaaattagaggtggatgtcttgttttgtgtcatgaattactaaaatctcttagtagttgtggtatatttttgagtaaaattaccatttccagatttgagtttgaagggcttttatagttgtattttcctcctcactgttaataatcataatcctttttcagtattttagtggccttgaacaactggtttatctacaatctcaaatcctaagtgtataattatgtgcaatgttcaatacctcatataatacttgctcaacagtatagtggtaccaatggcattaagatggtgtttttgttctacatatttttcaataatttattctttctaatgttgaaattatatcaggctttaccggtttttttagttgtttaaataagtaatattttcaaaagaataaaataaccaatgatatctcttggaataatctgtaaaacgtagttataaaattctattttctacttagagtttttatcttttcttttttgtcggctttacaaattatatgtatgcatgaaataactaactgttgaaagtgtccaacctccagccatagcaatttgctgtgccaatatgtgtacaaaaaagtagtttcaattagaaaggacaacattatttatcacattgagtattaaacatttccaggtaactcgtaaataaaaagatttccccatttttacacattttttcttaaaatttttctataatctttgaagtttctaaaatacacaatctcaacctctaagactaacatctacaatactaggtctattcttgagtttcaataacatgtattttagttgggtcataaacttgcattattttatattatctccaggacaattatatcataggactaagatttttgtgatagtattatttacaaatattataagtataatatcttgtgaggctattattaaggttatgccatgtattgataaaatgcattgctttctcaaagaactgttacacattttgttttatttgactcatcacaaaaacataataaatgttgtgagccctaatattctgatgagaaaactggggctcaggtagcaacatgagctatttaaaactacaaaatagggctgggcacagtggctcatgcctgtaatcccagcactttgggaggctgagggtgggaggatcacttgagcccaggggtttgagaccagtctgggaaacatattgaggccccatttctataaaaataaaaatgaaaactagccaggcatggtggtgtgcacctgttgtcccagctactggggaggctgaggtgggagaattatttaagtccaaaagttcagtgctctagtgagctatgatcactgtactccagcctgggtgacagagtgagatcctgtctctaaaaaaataaaataaaatcacaatgtttgttgttattttgggaaccaatataacaacctaagtctatcacaacatcattccccaactaaaatataaatatatgttgaaaatatctctatcgattgcattaattggagattttccaaatactagaccagcatcaaaatacacagttaaatatatttgcaataattccattgtttgttaacttttgcatttctaatttgcaggatgttaaacaactggatgaaatgttatgatttaatttggtcagtataaataatcaaatattgggacaaataatttaattcatttagtttattaattatatttcctgtctgtatcttttattgaacattgtttaaacataaccttaaagtactgataatttgcttaattttcaacacaaatttatctgacaaattctgtctatagtaacagatggtcagaatgcagataaattgtgtgcatctcaatcagtaaaaataatattcagtaaaatgtctataaatctatgcagattaagttgtgaaaaacaatgcaattttagtactactggattagatgcagtaaaggaatccctaaggaagtttacaataatatatttaattaaaatctactggcaattagaattttaaggaattcttttctaagaagttggagaacctaaaatagcttgcttattcgcctgggtactctcatgaagtaaccatgtacacctaataaagaaatagtaaaagcacatataatgaaaaataattaagatttcttacacctgattttttcattatcagagataattatcagagataatttttcattatcagagatcatagctgaattatcatttgacaatacataagaatatatattgtatagatacaatatataactatacttaaagaaatatttattgagcatcttttatttcacaaggcacttagtgagggaaaggaatacagagatgaatatggcctgaaggaatgaactcatattacaataaatgaaaaagaaaaagaaataatgaaccaagggaatgagggcaacaggaaaaataattccttgctacagacgggaagtcaatcatttttaggtatacataatattatacaactatttttgtacactagttctcaaaacatttatgatacctagtataatttttattgtttgatttcctagtgcttacttgtgttttacagaaatatgttacattttgaaattataataaaataatagagtttaaactctaataattggaatataaattgggatggaatttatccttaagaaaagctgtttaaacaatttagtagtattagtaagttgcaggaatactttaatctacttacgaaaaagtagttcaagttttctaaaatggtttcagcatactatcggtatctcacaatgtgttaattttaagttaattatatattctttaaagcagattaaataatacttgtcctaagcataatttatttgttgaaattagtatatgtgaacttatgaaaaaatgttcttgtaaattattctagaatcccaaattttaattatataagaacaaccttttgttcaattgctttgaactaatgatgaagttttttaaaatattaagtattttatttaatgtgatatagattcaggaaaagtctaacaaaaatgtacttcagtagttttatttttattttgtgaaattttattttaaagtttaggtaaggaaagtttttaaactgtcttaaatatttaataaaagcagttgttaaaaatatatgttctaatgttaactatatgacatatatgccattgcatgcattttgttttttaaataggtttttcaccactggccccactagtagatgattttaccccagattttgaaaacataccactttaatggcctttatttcaaatacttcgtactttagggatagtattttgaagatgtttatcttttgtacattcctagttcatttattaatgtactaagaaaaagaaaacaaaatgactgattcttttgttttgaattaaatgtttgtgctgtattaatgttaagtgagttaagataaagggaagctacaaaaatttgaatgcctactaaatgctaggcactttataggtgtcttctaatatatgtctattggtatcacatcaattaataaccctgtgaaatgtcattagctctaattcaccaaagagtagatggaggcagagttgttatcagtttacataattaattagtggtattcacttggattcaaaactctgcaaactgaagccttatatagctcaaactagtcattaatctgccctcagcatgtatgaaaacataatgtttatccgtacagaccattctctatagcagatttgaataggtacttagcacactttatcattgtcactggctctttcgaaagaagtattaatttgtgcattctggtttaccattcatttcttaacaaagttgctttatacgttccataaaaagttttcatgaaaacattttacattagcatgttgtgtagtgggttttaagttataacaggtaattaacagatatttcggccaacgagacacacacacacatgaaaaaaataagtgaaaagacagaataaattgcaaaggttttacgagtggaccacaaagttaaggttaaacttctgtctttgcatgtggaggagacatattagtctagccagaactttccttttgcttagcagtgaggtcagagaagtatctctgtcattctgcttagaagtatacatggactgcaattgcttaatttacttaaacttaacattttcaatgggtttgctgtgtgaagatacagtctaagataagtgctttgacttgcctctgcagaggtcaacttatttctcatcacacacatttttcttatgtcatataagtaaaggaaagagtgaaacgttttatagaaaatattacagtggagttaagaacatctgcctcaaatgtacagtgcatttactttttaagttaatcatttagtagctacccttttaacctctactatgttcacagtattgcatttgctcttgtaaacaattttgttcccacctttacatagcgtatgacctactcagtgagaacattcattattaagtttttgctattaattttcatttaaaataggtttattaactagcaaatctcaaatgcaaaacatttttgagtgaatttttcctcaaatgttgtattctacctttcaaaatattgtgtaacagcaattccacattatccttttgaatgctacctatatattgccacatataaagatatttttcatttttcatttttcattgctatcttttaatccctttgcattttgataatatcgaaaacagattagggctgaaaaactaaaaaagattagggcttgtattatgcattgtctagttacttgaacaataagagaaattctatctttgagctttcataattggctttctggacaccactgagtttattagataatctttaaaaatattatgaactattttgagtggacctaaatttattcagtaataaagtttactttcctaaatccattccccaagtgaacaggcttatttaaaatatgtcatataaaagcacttttcctttctaacattttatgatttaggaattaaaaagtagctgttctttcagtaaataagtgttaataaagcagtgaccaaataaataaccttttgttagtttagcagataaatgttttcaatgtatgcctttaaaattattcagtaaaaattgaattagtacgtattcaacatgaaatttttagtcttttctgaccaagcactaataaaattgatttccctaaatgagaaaatttgtcttctgtattttaagcagaaaaaatatgaattctgcctctgataatcaaattttgtacagcaatgtgtaatgtgtcacaatttaaaaagttttaattttctgacatgcagataaggccaaaataaataataccatctgtttttttcacttgaaaatacatttttaaaattttgagtatatatattatagaggtccatgcaaatggaaaaaaattattctcttctgacatggactttttcatgactatacacatgctgaggctagaataaaaacatatatttgtgctatattgtaaaaataaaaacaatttgttctcctttctaattatatgcctttagaataaatgaaatgatctgc

SEQ ID NO: 191310 - DNA, 582 bp, Homo sapiens
  Payload ID: 17786
  Gene Name: thyrotropin-releasing hormone degrading enzyme
  ENST ID: ENST00000547300
  CDS Start-End: 1-582
tatctacaacgcgctcatcgagaatgagctcctgggcttcttccgcagctcctatgtgctccacggggagagaagattccttggtgttactcagttttcgcctacacatgccagaaaggcatttccttgttttgatgagccaatctacaaggctactttcaaaatcagcatcaagcatcaagcaacctatttatctttatctaatatgccagtggaaacttccgtgtttgaggaagatggatgggttacggatcacttttcacagacccctctcatgtccacatattatttagcctgggcaatttgcaacttcacatacagagaaactaccaccaagagtggggttgtaggtgctgctttaataagaatgctggctaattttatgggccattcagttttccagaggggtttgcaagattatttaaccattcataagtatggtaatgcagccagaaatgatctctggaatacattatcggaggctttaaaaagaaatgggaaatatgtaaatatacaagaagtaatggatcagtggacactccagatgggttatcctgttatcaccatcttgggaaacacaac

SEQ ID NO: 191311 - DNA, 1415 bp, Homo sapiens
  Payload ID: 17787
  Gene Name: thyrotropin-releasing hormone receptor
  Uniprot ID: P34981
  ENST ID: ENST00000311762
  CDS Start-End: 90-1286
gggggatggaactgctgcaataaaggtgggcgctggaaagaagatgttttgagaagtcagtgtttccgagaaactttaagcttctaaagatggaaaacgagacagtcagtgaactgaaccaaacacagcttcagccacgagcagtggtggccttagaataccaggtggtcaccatcttacttgtactcattatttgtggcctgggcattgtaggcaacatcatggtagtcctggttgtcatgagaaccaagcacatgaggacccccacaaactgctacctggtgagcctggcagtagctgatctcatggtcttggtggccgcaggcctccccaacataacagacagtatctacggttcctgggtctatggctatgttggatgcctctgcattacttacctccagtatttgggaattaatgcatcctcttgttcaataacagcctttaccattgagaggtacatagcaatctgtcaccccatcaaagcccagtttctctgcacattttccagagccaaaaagattatcatctttgtctgggctttcacatctctttactgtatgctctggttcttcttgctggatctcaatattagcacctacaaagatgctattgtgatatcctgtggctacaagatctccaggaattactactcacctatttacctaatggactttggtgtcttttatgttgtgccaatgatcctggctaccgtcctctatggattcatagctagaatccttttcttaaatcccattccttcagatcctaaagaaaactctaagacatggaaaaatgattcaacccatcagaacacaaatctgaatgtaaatacctctaatagatgtttcaacagcacagtatcttcaaggaagcaggtcaccaagatgctggcagtggttgtaattctgtttgcccttttatggatgccctacaggactctagtggttgtcaactcatttctctccagtcctttccaagaaaattggtttttgctcttttgcagaatttgcatttatctcaacagtgccatcaacccggtgatttacaatctcatgtcccagaaattccgtgcagccttcagaaagctctgcaactgcaagcagaagccaacagagaaacctgctaactacagtgtggccctaaattacagcgtcatcaaggagtcagaccatttcagcacagagcttgatgatatcactgtcactgacacttacctgtctgccacaaaagtgtcttttgatgacacctgcttggcttctgaggtatcctttagccaaagttgattcatgaattagaagaaaatggatgacaaagaaaatgagaatctgtgcagtcatcaacaaaagggagaacatggccaatagtcatatgtgaagacagagcagatcagtctttgtcaatgctctaacaaa

SEQ ID NO: 191312 - DNA, 1660 bp, Homo sapiens
  Payload ID: 17787
  Gene Name: thyrotropin-releasing hormone receptor
  Uniprot ID: P34981
  ENST ID: ENST00000518632
  CDS Start-End: 352-1548
tgttctcattaggggacgatctatgatttgacagcctcactgctgctgctcctgctgctgcttctgcttctgccgcggctgtatggtttgtcattagttggaaagggctgtgagggtttggagaaactgcagttttaaagactgagcactgctaagtggtctccctctcaaatagagtagacaagattttctgcaagattagaaacttggaactattaccacttcatctacccagaaaatcaggcagcgctacagaggataagggggatggaactgctgcaataaaggtgggcgctggaaagaagatgttttgagaagtcagtgtttccgagaaactttaagcttctaaagatggaaaacgagacagtcagtgaactgaaccaaacacagcttcagccacgagcagtggtggccttagaataccaggtggtcaccatcttacttgtactcattatttgtggcctgggcattgtaggcaacatcatggtagtcctggttgtcatgagaaccaagcacatgaggacccccacaaactgctacctggtgagcctggcagtagctgatctcatggtcttggtggccgcaggcctccccaacataacagacagtatctacggttcctgggtctatggctatgttggatgcctctgcattacttacctccagtatttgggaattaatgcatcctcttgttcaataacagcctttaccattgagaggtacatagcaatctgtcaccccatcaaagcccagtttctctgcacattttccagagccaaaaagattatcatctttgtctgggctttcacatctctttactgtatgctctggttcttcttgctggatctcaatattagcacctacaaagatgctattgtgatatcctgtggctacaagatctccaggaattactactcacctatttacctaatggactttggtgtcttttatgttgtgccaatgatcctggctaccgtcctctatggattcatagctagaatccttttcttaaatcccattccttcagatcctaaagaaaactctaagacatggaaaaatgattcaacccatcagaacacaaatctgaatgtaaatacctctaatagatgtttcaacagcacagtatcttcaaggaagcaggtcaccaagatgctggcagtggttgtaattctgtttgcccttttatggatgccctacaggactctagtggttgtcaactcatttctctccagtcctttccaagaaaattggtttttgctcttttgcagaatttgcatttatctcaacagtgccatcaacccggtgatttacaatctcatgtcccagaaattccgtgcagccttcagaaagctctgcaactgcaagcagaagccaacagagaaacctgctaactacagtgtggccctaaattacagcgtcatcaaggagtcagaccatttcagcacagagcttgatgatatcactgtcactgacacttacctgtctgccacaaaagtgtcttttgatgacacctgcttggcttctgaggtatcctttagccaaagttgattcatgaattagaagaaaatggatgacaaagaaaatgagaatctgtgcagtcatcaacaaaagggagaacatggccaatagtcatatgtgaagacagagcagatcagtcttt

SEQ ID NO: 191313 - DNA, 3823 bp, Homo sapiens
  Payload ID: 17788
  Gene Name: TIA1 cytotoxic granule-associated RNA binding protein
  ENST ID: ENST00000282574
  CDS Start-End: 151-1308
ttagtgtaattgccgccggaggaggaggcggagtaacctctggtcagccgagaaaccccactatcctgtagccataaccgcttaaacgatttgggaggtagtgaagggcagggagctggacctggaggcgccgccgcgacagcagcagccatggaggacgagatgcccaagactctatacgtcggtaacctttccagagatgtgacagaagctctaattctgcaactctttagccagattggaccttgtaaaaactgcaaaatgattatggatacagctggaaatgatccctattgttttgtggagtttcatgagcatcgtcatgcagctgcagcattagctgctatgaatggacggaagataatgggtaaggaagtcaaagtgaattgggcaacaacccctagcagtcaaaagaaagatacaagcagtagtaccgttgtcagcacacagcgttcacaagatcatttccatgtctttgttggtgatctcagcccagaaattacaactgaagatataaaagctgcttttgcaccatttggaagaatatcagatgcccgagtggtaaaagacatggcaacaggaaagtctaagggatatggctttgtctcctttttcaacaaatgggatgctgaaaacgccattcaacagatgggtggccagtggcttggtggaagacaaatcagaactaactgggcaacccgaaagcctcccgctccaaagagtacatatgagtcaaataccaaacagctatcatatgatgaggttgtaaatcagtctagtccaagcaactgtactgtatactgtggaggtgttacttctgggctaacagaacaactaatgcgtcagactttttcaccatttggacaaataatggaaattcgagtctttccagataaaggatattcatttgttcggttcaattcccatgaaagtgcagcacatgcaattgtttctgttaatggtactaccattgaaggtcatgttgtgaaatgctattggggcaaagaaactcttgatatgataaatcccgtgcaacagaatcaaattggatatccccaaccttatggccagtggggccagtggtatggaaatgcacaacaaattggccagtatatgcctaatggttggcaagttcctgcatatggaatgtatggccaggcatggaaccagcaaggatttaatcagacacagtcttctgcaccatggatgggaccaaattatggagtgcaaccgcctcaagggcaaaatggcagcatgttgcccaatcagccttctgggtatcgagtggcagggtatgaaacccagtgaataaggactccagaatctaaagccagtggcttgaggctacagggagtgtagtaaagccgttgtttacttaaagatttatcaaatcagtcagtgcaaatgtcagatacaatgtatttatttaaaagattcatttttaatcatgaaattacttatcatccacattgttttaaaaagaaacaagatgctggatgtctgccaatttttgccttcattaccttttttgataaagtttctcagatccttgtttcaaacacaaatgcagggattgctgccactttttaactattaagaggcagaaaattgcacaatattgaacttttttccactgaagtagtgtgcagttctagtttgcattcctgatatgatttaaaacatgtaatataaagatgttaaaaaaaaaaaccaaaactgtgcagagtctagaagttgtttgtcatcttcagcttgtgcacaattctgttttaggttaaaaaaaggcattgtttgagctgtcccatctccactgttatccctttggggttttttaatataaattattagtttacatcatttttgtatctacatcttttttcacaaatttgtcttgccttattaaagttctgtaaaatatacttaaatggaaaaaatgatgttcatttagattgaaaacttttctcagatggattgataattgcattcatcttgtgttttatatgagaaggtgcctcaagaatttcctgttggatttgtttaaaaggatttttatctttcgtgataaactttgctgtgtaccaggaactataaaaacaaaaacttgttactaaagaaaatatctgaaatgtgataagttcttatgccatgttaatttcatgtgtcaacttcaacatttacatgtattatttcattatgtaaaatgttttagcaatttaatattttgcacagttagcaaactttgtatgtcatttccttcaaggcatcatgcagagttgacatgagatttataaggttttaagttgtttgcatgtgaaaatcaaatacatactttggtagtctttgaatacaaagtcatctgctcttgtttttcaagaattttgagacacaaagttgtatgtaaaggaatatattaatttgccgttttctaggtagatttgctcaaaaagagtgaatcaacttaatatgtacaaatgatagctgtgaaactgtagaatatctttgtgtcaggcttggagttcattgtgacctccaaattttgcctgaaggaccagctgggcaaagcatcttttaaatgttcagaggccaaaagataaacaaaaaaaaaaccttaaaatcctacctctttaaacagccttcagataagagaatcctcagtgcaatcattattttgattcgtttggtacctgttttcctggagttcccgattttattattttggggtggctccaagcattaagaggtttaatctttgatggcattgttctagttttgaaatttctagtatatttcagagtctcttagaagacttgtgtgggaagtttcactttgttttcagtgaagatcacaaacctccttcttcctttactcaagaggaaaggtcccagtatacatatttgaatggttgatggttttcaagaccttcagggagctccctgcattttacctagaaacagaaaaggcccgcaaaatcttaagtttcctggcctgcatttcccgggtaggggcaaatgactccaagctggtctctaagccaatacccttataaaccagagcccaggaaagacagctcgagtgtataattctctggagctcaattctatgcagttgtgctgatatttcattaagtcactgtgtatttttaagtgttgatacattaaaagtcgctttatggaagatgagtaaattttttaaatacttggaaattttatttccttgttaacttctacagatcagggcatgcaaccaaaagcagcttaaatgaaatattttaaaataaaatatcaggaagctatttttagatttcttctggcttatgtttctactttaggaccctcattgttctcttattaaaaaaaattatttcctgtgcatctcatggactgcagggtaaattatttgggcataaataatttaaatagttttctttcattttgactatctccagtaataacagtttttattatccagcatattggcttattgcacaaatcttaaaatgtacattgactactttctgagaagaaagtggtatcagtactcatgatgaaaaggttactactgaacaaattcacatttcaggaacacctctatctttggtttaaatcttactcttagtttttccgtctaaaaatcatactggtattagtatcaggtaaggaaattaaagtttttaaaatggtttcattctctgcaatatgcaaaatttagattttactttctggtactgtaaagaacctgaagtgatttacacttaatgggtgattaatccagtattctttaccctgaatgtttggatattaaagttcctttatgttttctataa

SEQ ID NO: 191314 - DNA, 543 bp, Homo sapiens
  Payload ID: 17788
  Gene Name: TIA1 cytotoxic granule-associated RNA binding protein
  ENST ID: ENST00000361692
  CDS Start-End: 1-457
atacgtcggtaacctttccagagatgtgacagaagctctaattctgcaactctttagccagattggaccttgtaaaaactgcaaaatgattatggatacagctggaaatgatccctattgttttgtggagtttcatgagcatcgtcatgcagctgcagcattagctgctatgaatggacggaagataatgggtaaggaagtcaaagtgaattgggcaacaacccctagcagtcaaaagaaagatacaagcaatcatttccatgtctttgttggtgatctcagcccagaaattacaactgaagatataaaagctgcttttgcaccatttggaagaatatcagatgcccgagtggtaaaagacatggcaacaggaaagtctaagggatatggctttgtctcctttttcaacaaatgggtgagctcagtgagaagtgcatggataatgcttaaagagtaaagaatggaaacactccgttttaattactaatctttttttcgtctgctgtttattttactgatgattaaaataaaccctcactagaa

SEQ ID NO: 191315 - DNA, 1440 bp, Homo sapiens
  Payload ID: 17788
  Gene Name: TIA1 cytotoxic granule-associated RNA binding protein
  ENST ID: ENST00000445587
  CDS Start-End: 181-1038
ggtttcattgttcccgctgggccgggcggtttagtgtaattgccgccggaggaggaggcggagtaacctctggtcagccgagaaaccccactatcctgtagccataaccgcttaaacgatttgggaggtagtgaagggcagggagctggacctggaggcgccgccgcgacagcagcagccatggaggacgagatgcccaagactctatacgtcggtaacctttccagagatgtgacagaagctctaattctgcaactctttagccagattggaccttgtaaaaactgcaaaatgattatggatacagctggaaatgatccctattgttttgtggagtttcatgagcatcgtcatgcagctgcagcattagctgctatgaatggacggaagataatgggtaaggaagtcaaagtgaattgggcaacaacccctagcagtcaaaagaaagatacaagcaatcatttccatgtctttgttggtgatctcagcccagaaattacaactgaagatataaaagctgcttttgcaccatttggaagaatatcagatgcccgagtggtaaaagacatggcaacaggaaagtctaagggatatggctttgtctcctttttcaacaaatgggatgctgaaaacgccattcaacagatgggtggccagtggcttggtggaagacaaatcagaactaactgggcaacccgaaagcctcccgctccaaagagtacatatgagtcaaataccaaacagctatcatatgatgaggttgtaaatcagtctagtccaagcaactgtactgtatactgtggaggtgttacttctgggctaacagaacaactaatgcgtcagactttttcaccatttggacaaataatggaaattcgagtctttccagataaaggatattcatttgttcgtcagacacagtcttctgcaccatggatgggaccaaattatggagtgcaaccgcctcaagggcaaaatggcagcatgttgcccaatcagccttctgggtatcgagtggcagggtatgaaacccagtgaataaggactccagaatctaaagccagtggcttgaggctacagggagtgtagtaaagccgttgtttacttaaagatttatcaaatcagtcagtgcaaatgtcagatacaatgtatttatttaaaagattcatttttaatcatgaaattacttatcatccacattgttttaaaaagaaacaagatgctggatgtctgccaatttttgccttcattaccttttttgataaagtttctcagatccttgtttcaaacacaaatgcagggattgctgccactttttaactattaagaggcagaaaattgcacaatattgaacttttttccactgaagtagtgtgcagttctagtttgcattcctgatatgatttaaaacatgtaatataaagatgttaaaaaaaaaaa

SEQ ID NO: 191316 - DNA, 4647 bp, Homo sapiens
  Payload ID: 17788
  Gene Name: TIA1 cytotoxic granule-associated RNA binding protein
  Uniprot ID: P31483
  ENST ID: ENST00000433529
  CDS Start-End: 212-1372
aggctcccggctcgccgccatcttgtattggggtttcattgttcccgctgggccgggcggtttagtgtaattgccgccggaggaggaggcggagtaacctctggtcagccgagaaaccccactatcctgtagccataaccgcttaaacgatttgggaggtagtgaagggcagggagctggacctggaggcgccgccgcgacagcagcagccatggaggacgagatgcccaagactctatacgtcggtaacctttccagagatgtgacagaagctctaattctgcaactctttagccagattggaccttgtaaaaactgcaaaatgattatggatacagctggaaatgatccctattgttttgtggagtttcatgagcatcgtcatgcagctgcagcattagctgctatgaatggacggaagataatgggtaaggaagtcaaagtgaattgggcaacaacccctagcagtcaaaagaaagatacaagcagtagtaccgttgtcagcacacagcgttcacaagatcatttccatgtctttgttggtgatctcagcccagaaattacaactgaagatataaaagctgcttttgcaccatttggaagaatatcagatgcccgagtggtaaaagacatggcaacaggaaagtctaagggatatggctttgtctcctttttcaacaaatgggatgctgaaaacgccattcaacagatgggtggccagtggcttggtggaagacaaatcagaactaactgggcaacccgaaagcctcccgctccaaagagtacatatgagtcaaataccaaacagctatcatatgatgaggttgtaaatcagtctagtccaagcaactgtactgtatactgtggaggtgttacttctgggctaacagaacaactaatgcgtcagactttttcaccatttggacaaataatggaaattcgagtctttccagataaaggatattcatttgttcggttcaattcccatgaaagtgcagcacatgcaattgtttctgttaatggtactaccattgaaggtcatgttgtgaaatgctattggggcaaagaaactcttgatatgataaatcccgtgcaacagcagaatcaaattggatatccccaaccttatggccagtggggccagtggtatggaaatgcacaacaaattggccagtatatgcctaatggttggcaagttcctgcatatggaatgtatggccaggcatggaaccagcaaggatttaatcagacacagtcttctgcaccatggatgggaccaaattatggagtgcaaccgcctcaagggcaaaatggcagcatgttgcccaatcagccttctgggtatcgagtggcagggtatgaaacccagtgaataaggactccagaatctaaagccagtggcttgaggctacagggagtgtagtaaagccgttgtttacttaaagatttatcaaatcagtcagtgcaaatgtcagatacaatgtatttatttaaaagattcatttttaatcatgaaattacttatcatccacattgttttaaaaagaaacaagatgctggatgtctgccaatttttgccttcattaccttttttgataaagtttctcagatccttgtttcaaacacaaatgcagggattgctgccactttttaactattaagaggcagaaaattgcacaatattgaacttttttccactgaagtagtgtgcagttctagtttgcattcctgatatgatttaaaacatgtaatataaagatgttaaaaaaaaaaaccaaaactgtgcagagtctagaagttgtttgtcatcttcagcttgtgcacaattctgttttaggttaaaaaaaggcattgtttgagctgtcccatctccactgttatccctttggggttttttaatataaattattagtttacatcatttttgtatctacatcttttttcacaaatttgtcttgccttattaaagttctgtaaaatatacttaaatggaaaaaatgatgttcatttagattgaaaacttttctcagatggattgataattgcattcatcttgtgttttatatgagaaggtgcctcaagaatttcctgttggatttgtttaaaaggatttttatctttcgtgataaactttgctgtgtaccaggaactataaaaacaaaaacttgttactaaagaaaatatctgaaatgtgataagttcttatgccatgttaatttcatgtgtcaacttcaacatttacatgtattatttcattatgtaaaatgttttagcaatttaatattttgcacagttagcaaactttgtatgtcatttccttcaaggcatcatgcagagttgacatgagatttataaggttttaagttgtttgcatgtgaaaatcaaatacatactttggtagtctttgaatacaaagtcatctgctcttgtttttcaagaattttgagacacaaagttgtatgtaaaggaatatattaatttgccgttttctaggtagatttgctcaaaaagagtgaatcaacttaatatgtacaaatgatagctgtgaaactgtagaatatctttgtgtcaggcttggagttcattgtgacctccaaattttgcctgaaggaccagctgggcaaagcatcttttaaatgttcagaggccaaaagataaacaaaaaaaaaaccttaaaatcctacctctttaaacagccttcagataagagaatcctcagtgcaatcattattttgattcgtttggtacctgttttcctggagttcccgattttattattttggggtggctccaagcattaagaggtttaatctttgatggcattgttctagttttgaaatttctagtatatttcagagtctcttagaagacttgtgtgggaagtttcactttgttttcagtgaagatcacaaacctccttcttcctttactcaagaggaaaggtcccagtatacatatttgaatggttgatggttttcaagaccttcagggagctccctgcattttacctagaaacagaaaaggcccgcaaaatcttaagtttcctggcctgcatttcccgggtaggggcaaatgactccaagctggtctctaagccaatacccttataaaccagagcccaggaaagacagctcgagtgtataattctctggagctcaattctatgcagttgtgctgatatttcattaagtcactgtgtatttttaagtgttgatacattaaaagtcgctttatggaagatgagtaaattttttaaatacttggaaattttatttccttgttaacttctacagatcagggcatgcaaccaaaagcagcttaaatgaaatattttaaaataaaatatcaggaagctatttttagatttcttctggcttatgtttctactttaggaccctcattgttctcttattaaaaaaaattatttcctgtgcatctcatggactgcagggtaaattatttgggcataaataatttaaatagttttctttcattttgactatctccagtaataacagtttttattatccagcatattggcttattgcacaaatcttaaaatgtacattgactactttctgagaagaaagtggtatcagtactcatgatgaaaaggttactactgaacaaattcacatttcaggaacacctctatctttggtttaaatcttactcttagtttttccgtctaaaaatcatactggtattagtatcaggtaaggaaattaaagtttttaaaatggtttcattctctgcaatatgcaaaatttagattttactttctggtactgtaaagaacctgaagtgatttacacttaatgggtgattaatccagtattctttaccctgaatgtttggatattaaagttcctttatgttttctataacctgtgggatcttcttgcagtgattattgtgtgtgagattttttttctttttggtctatccatattgttatattcactcaggtattttttttttaatcttattccagaatcagtggtttatattgggttactgtttaacaccaaatggaattggcattctgcagatttaattaattatgaaaccagggtctcattttccttgctgatacttgttgaaaatgagattcacattctagtctttattttcctcctgttttgtccctgtgcttgtacatcttccttttatttgtgtgttatagttctattccatttgagaaggcagttggtaagaactagattgcatgtacaaagacaggtttactaagtgctgtacagtggtcctgaggttacagttgaattagaaaaacgaaatgtacttacaggaaataagaaagcaaacctttcaaatgagagtgatgatttctttaaaaaaaatcagtttttttctctcaaataatgttctttatttcacgaaatcgtcaatcttaagcatgagcagggataaacaactcctagaaggaactcaattcattcttcctggattttctctgttgttaaatcacaaaaatgatagtccccaatcgtttctttataggaggttattacatttcattacagtcactgcattttgactgttgtgtttagaatttgaatgtacatccaaaatgatgagtttcaatttaagagccttaataaaatgtgtgagtgtgtctcaattgaa

SEQ ID NO: 191317 - DNA, 911 bp, Homo sapiens
  Payload ID: 17788
  Gene Name: TIA1 cytotoxic granule-associated RNA binding protein
  ENST ID: ENST00000454815
  CDS Start-End: 568-911
gaagtcaaagtgaattgggcaacaacccctagcagtcaaaagaaagatacaagcagtagtaccgttgtcagcacacagcgttcacaagcccagaaattacaactgaagatataaaagctgcttttgcaccatttggaagaatatcagatgcccgagtggtaaaagacatggcaacaggaaagtctaagggatatggctttgtctcctttttcaacaaatgggatgctgaaaacgccattcaacagatgggtggccagtggcttggtggaagacaaatcagaactaactgggcaacccgaaagcctcccgctccaaagagtacatatgagtgtaggtgtattggagaagaaaaggaaatgtggaattttggagaaaaatacgctagattttaaatgttagagctgttcccggagacttattgcagaaatagatgagaagcaaatcaagactactattcaaaaatcaaataccaaacagctatcatatgatgaggttgtaaatcagtctagtccaagcaactgtactgtatactgtggaggtgttacttctgggctaacagaacaactaatgcgtcagactttttcaccatttggacaaataatggaaattcgagtctttccagataaaggatattcatttgttcggttcaattcccatgaaagtgcagcacatgcaattgtttctgttaatggtactaccattgaaggtcatgttgtgaaatgctattggggcaaagaaactcttgatatgataaatcccgtgcaacagcagaatcaaattggatatccccaaccttatggccagtggggccagtggtatggaaatgcacaacaaattggccagtatatgcctaatggttggcaagttcctgcatatggaatgtatggccaggcatggaaccagcaaggatt

SEQ ID NO: 191318 - DNA, 4633 bp, Homo sapiens
  Payload ID: 17788
  Gene Name: TIA1 cytotoxic granule-associated RNA binding protein
  Uniprot ID: P31483
  ENST ID: ENST00000415783
  CDS Start-End: 231-1358
aactttgctggctgctcctaggctcccggctcgccgccatcttgtattggggtttcattgttcccgctgggccgggcggtttagtgtaattgccgccggaggaggaggcggagtaacctctggtcagccgagaaaccccactatcctgtagccataaccgcttaaacgatttgggaggtagtgaagggcagggagctggacctggaggcgccgccgcgacagcagcagccatggaggacgagatgcccaagactctatacgtcggtaacctttccagagatgtgacagaagctctaattctgcaactctttagccagattggaccttgtaaaaactgcaaaatgattatggatacagctggaaatgatccctattgttttgtggagtttcatgagcatcgtcatgcagctgcagcattagctgctatgaatggacggaagataatgggtaaggaagtcaaagtgaattgggcaacaacccctagcagtcaaaagaaagatacaagcaatcatttccatgtctttgttggtgatctcagcccagaaattacaactgaagatataaaagctgcttttgcaccatttggaagaatatcagatgcccgagtggtaaaagacatggcaacaggaaagtctaagggatatggctttgtctcctttttcaacaaatgggatgctgaaaacgccattcaacagatgggtggccagtggcttggtggaagacaaatcagaactaactgggcaacccgaaagcctcccgctccaaagagtacatatgagtcaaataccaaacagctatcatatgatgaggttgtaaatcagtctagtccaagcaactgtactgtatactgtggaggtgttacttctgggctaacagaacaactaatgcgtcagactttttcaccatttggacaaataatggaaattcgagtctttccagataaaggatattcatttgttcggttcaattcccatgaaagtgcagcacatgcaattgtttctgttaatggtactaccattgaaggtcatgttgtgaaatgctattggggcaaagaaactcttgatatgataaatcccgtgcaacagcagaatcaaattggatatccccaaccttatggccagtggggccagtggtatggaaatgcacaacaaattggccagtatatgcctaatggttggcaagttcctgcatatggaatgtatggccaggcatggaaccagcaaggatttaatcagacacagtcttctgcaccatggatgggaccaaattatggagtgcaaccgcctcaagggcaaaatggcagcatgttgcccaatcagccttctgggtatcgagtggcagggtatgaaacccagtgaataaggactccagaatctaaagccagtggcttgaggctacagggagtgtagtaaagccgttgtttacttaaagatttatcaaatcagtcagtgcaaatgtcagatacaatgtatttatttaaaagattcatttttaatcatgaaattacttatcatccacattgttttaaaaagaaacaagatgctggatgtctgccaatttttgccttcattaccttttttgataaagtttctcagatccttgtttcaaacacaaatgcagggattgctgccactttttaactattaagaggcagaaaattgcacaatattgaacttttttccactgaagtagtgtgcagttctagtttgcattcctgatatgatttaaaacatgtaatataaagatgttaaaaaaaaaaaccaaaactgtgcagagtctagaagttgtttgtcatcttcagcttgtgcacaattctgttttaggttaaaaaaaggcattgtttgagctgtcccatctccactgttatccctttggggttttttaatataaattattagtttacatcatttttgtatctacatcttttttcacaaatttgtcttgccttattaaagttctgtaaaatatacttaaatggaaaaaatgatgttcatttagattgaaaacttttctcagatggattgataattgcattcatcttgtgttttatatgagaaggtgcctcaagaatttcctgttggatttgtttaaaaggatttttatctttcgtgataaactttgctgtgtaccaggaactataaaaacaaaaacttgttactaaagaaaatatctgaaatgtgataagttcttatgccatgttaatttcatgtgtcaacttcaacatttacatgtattatttcattatgtaaaatgttttagcaatttaatattttgcacagttagcaaactttgtatgtcatttccttcaaggcatcatgcagagttgacatgagatttataaggttttaagttgtttgcatgtgaaaatcaaatacatactttggtagtctttgaatacaaagtcatctgctcttgtttttcaagaattttgagacacaaagttgtatgtaaaggaatatattaatttgccgttttctaggtagatttgctcaaaaagagtgaatcaacttaatatgtacaaatgatagctgtgaaactgtagaatatctttgtgtcaggcttggagttcattgtgacctccaaattttgcctgaaggaccagctgggcaaagcatcttttaaatgttcagaggccaaaagataaacaaaaaaaaaaccttaaaatcctacctctttaaacagccttcagataagagaatcctcagtgcaatcattattttgattcgtttggtacctgttttcctggagttcccgattttattattttggggtggctccaagcattaagaggtttaatctttgatggcattgttctagttttgaaatttctagtatatttcagagtctcttagaagacttgtgtgggaagtttcactttgttttcagtgaagatcacaaacctccttcttcctttactcaagaggaaaggtcccagtatacatatttgaatggttgatggttttcaagaccttcagggagctccctgcattttacctagaaacagaaaaggcccgcaaaatcttaagtttcctggcctgcatttcccgggtaggggcaaatgactccaagctggtctctaagccaatacccttataaaccagagcccaggaaagacagctcgagtgtataattctctggagctcaattctatgcagttgtgctgatatttcattaagtcactgtgtatttttaagtgttgatacattaaaagtcgctttatggaagatgagtaaattttttaaatacttggaaattttatttccttgttaacttctacagatcagggcatgcaaccaaaagcagcttaaatgaaatattttaaaataaaatatcaggaagctatttttagatttcttctggcttatgtttctactttaggaccctcattgttctcttattaaaaaaaattatttcctgtgcatctcatggactgcagggtaaattatttgggcataaataatttaaatagttttctttcattttgactatctccagtaataacagtttttattatccagcatattggcttattgcacaaatcttaaaatgtacattgactactttctgagaagaaagtggtatcagtactcatgatgaaaaggttactactgaacaaattcacatttcaggaacacctctatctttggtttaaatcttactcttagtttttccgtctaaaaatcatactggtattagtatcaggtaaggaaattaaagtttttaaaatggtttcattctctgcaatatgcaaaatttagattttactttctggtactgtaaagaacctgaagtgatttacacttaatgggtgattaatccagtattctttaccctgaatgtttggatattaaagttcctttatgttttctataacctgtgggatcttcttgcagtgattattgtgtgtgagattttttttctttttggtctatccatattgttatattcactcaggtattttttttttaatcttattccagaatcagtggtttatattgggttactgtttaacaccaaatggaattggcattctgcagatttaattaattatgaaaccagggtctcattttccttgctgatacttgttgaaaatgagattcacattctagtctttattttcctcctgttttgtccctgtgcttgtacatcttccttttatttgtgtgttatagttctattccatttgagaaggcagttggtaagaactagattgcatgtacaaagacaggtttactaagtgctgtacagtggtcctgaggttacagttgaattagaaaaacgaaatgtacttacaggaaataagaaagcaaacctttcaaatgagagtgatgatttctttaaaaaaaatcagtttttttctctcaaataatgttctttatttcacgaaatcgtcaatcttaagcatgagcagggataaacaactcctagaaggaactcaattcattcttcctggattttctctgttgttaaatcacaaaaatgatagtccccaatcgtttctttataggaggttattacatttcattacagtcactgcattttgactgttgtgtttagaatttgaatgtacatccaaaatgatgagtttcaatttaagagccttaataaaatgtgtgagtgtgtctcaattgaa

SEQ ID NO: 191319 - DNA, 821 bp, Homo sapiens
  Payload ID: 17788
  Gene Name: TIA1 cytotoxic granule-associated RNA binding protein
  Uniprot ID: P31483
  ENST ID: ENST00000416149
  CDS Start-End: 25-669
ggcgccgccgcgacagcagcagccatggaggacgagatgcccaagactctatacgtcggtaacctttccagagatgtgacagaagctctaattctgcaactctttagccagattggaccttgtaaaaactgcaaaatgattatggatacagctggaaatgatccctattgttttgtggagtttcatgagcatcgtcatgcagctgcagcattagctgctatgaatggacggaagataatgggtaaggaagtcaaagtgaattgggcaacaacccctagcagtcaaaagaaagatacaagcagtagtaccgttgtcagcacacagcgttcacaagatcatttccatgtctttgttggtgatctcagcccagaaattacaactgaagatataaaagctgcttttgcaccatttggaagaatatcagatgcccgagtggtaaaagacatggcaacaggaaagtctaagggatatggctttgtctcctttttcaacaaatgggatgctgaaaacgccattcaacagatgggtggccagtggcttggtggaagacaaatcagaactaactgggcaacccgaaagcctcccgctccaaagagtacatatgagtgtaggtgtattggagaagaaaaggaaatgtggaattttggagaaaaatacgctagattttaaatgttagagctgttcccggagacttattgcagaaatagatgagaagcaaatcaagactactattcaaaaatgtacttagttttcatttttgtaattataaataatattatttctaatgtcaagtctcctattaaatagaaaatactgggtaa

SEQ ID NO: 191320 - DNA, 904 bp, Homo sapiens
  Payload ID: 17788
  Gene Name: TIA1 cytotoxic granule-associated RNA binding protein
  ENST ID: ENST00000477044
  CDS Start-End: 182-667
gggtttcattgttcccgctgggccgggcggtttagtgtaattgccgccggaggaggaggcggagtaacctctggtcagccgagaaaccccactatcctgtagccataaccgcttaaacgatttgggaggtagtgaagggcagggagctggacctggaggcgccgccgcgacagcagcagccatggaggacgagatgcccaagactctatacgtcggtaacctttccagagatgtgacagaagctctaattctgcaactctttagccagattggaccttgtaaaaactgcaaaatgattatggatacagctggaaatgatccctattgttttgtggagtttcatgagcatcgtcatgcagctgcagcattagctgctatgaatggacggaagataatgggtaaggaagtcaaagtgaattgggcaacaacccctagcagtcaaaagaaagatacaagcagtagtaccgttgtcagcacacagcgttcacaagtcttagttcacttgcacatggattcacataaactgaatggtgtaatgtctgggcaaccaaaactgttggcttttgagaaaactgtcaaatactttaacatcaaactgttgcaatgcaagatcatttccatgtctttgttggtgatctcagcccagaaattacaactgaagatataaaagctgcttttgcaccatttggaagaatatcagatgcccgagtggtaaaagacatggcaacaggaaagtctaagggatatggctttgtctcctttttcaacaaatgggtgagctcagtgagaagtgcatggataatgcttaaagagtaaagaatggaaacactccgttttaattactaatctttttttcgtctgctgtttattttactgatgattaaaataaaccctcactagaaga

SEQ ID NO: 191321 - DNA, 915 bp, Homo sapiens
  Payload ID: 17788
  Gene Name: TIA1 cytotoxic granule-associated RNA binding protein
  ENST ID: ENST00000474809
  CDS Start-End: 229-663
ctttgctggctgctcctaggctcccggctcgccgccatcttgtattggggtttcattgttcccgctgggccgggcggtttagtgtaattgccgccggaggaggaggcggagtaacctctggtcagccgagaaaccccactatcctgtagccataaccgcttaaacgatttgggaggtagtgaagggcagggagctggacctggaggcgccgccgcgacagcagcagccatggaggacgagatgcccaagactctatacgtcggtaacctttccagagatgtgacagaagctctaattctgcaactctttagccagattggaccttgtaaaaactgcaaaatgattatggatacagctggaaatgatccctattgttttgtggagtttcatgagcatcgtcatgcagctgcagcattagctgctatgaatggacggaagataatgggtaaggaagtcaaagtgaattgggcaacaacccctagcagtcaaaagaaagatacaagcagtagtaccgttgtcagcacacagcgttcacaagatcatttccatgtctttgttggtgatctcagcccagaaattacaactgaagatataaaagctgcttttgcaccatttggaagaatatcagtgtctctgaagaatggacagaattgccctggctaactacaagctacggttcacagtggataaatagatgcccgagtggtaaaagacatggcaacaggaaagtctaagggatatggctttgtctcctttttcaacaaatgggatgctgaaaacgccattcaacagatgggtggccagtggcttggtggaagacaaatcagaactaactgggcaacccgaaagcctcccgctccaaagagtacatatgagtgtaggtgtattggagaagaaaaggaaatgtggaatttt

SEQ ID NO: 191322 - DNA, 490 bp, Homo sapiens
  Payload ID: 17789
  Gene Name: TIA1 cytotoxic granule-associated RNA binding protein-like 1
  ENST ID: ENST00000369086
  CDS Start-End: 48-305
ttatacttcagttgttcagtcagattggaccctgtaaaagctgtaaaatgataacagagcatacaagcaatgacccatattgctttgtggaattttatgaacacagagatgcagctgctgcattagctgctatgaatgggagaaaaattttgggaaaggaggtcaaagtaaactgggcaaccacaccaagtagccagaaaaaagatacttccaatcacttccatgtgtttgttggggatttgagtccagaaattacaacagaagatatcaaatcagcatttgccccctttggtaaaatatcgtaagtatcataatcagtactacactcagtcatgataggcagaattgtatatgattaacttgtaattgaattaagattttctttctctagttagtatggttttgttttgtttcttatttttcatttatttattttggtttgttttgagtagtggatgttgttgaaaatgttaatgtcatttcagtgtct

SEQ ID NO: 191323 - DNA, 5072 bp, Homo sapiens
  Payload ID: 17789
  Gene Name: TIA1 cytotoxic granule-associated RNA binding protein-like 1
  Uniprot ID: Q01085
  ENST ID: ENST00000369093
  CDS Start-End: 31-1209
ttgtcccgggatcgctccgtcgcacccaccatgatggaagacgacgggcagccccggactctatacgtaggtaacctttccagagatgtgacagaagtccttatacttcagttgttcagtcagattggaccctgtaaaagctgtaaaatgataacagagcaacccgatagcagaagggtcaactcttctgttggattttctgttttgcagcatacaagcaatgacccatattgctttgtggaattttatgaacacagagatgcagctgctgcattagctgctatgaatgggagaaaaattttgggaaaggaggtcaaagtaaactgggcaaccacaccaagtagccagaaaaaagatacttccaatcacttccatgtgtttgttggggatttgagtccagaaattacaacagaagatatcaaatcagcatttgccccctttggtaaaatatcggatgcccgggtagttaaagacatggcaactggaaaatccaaaggctatggttttgtatctttttataacaaactggatgcagaaaatgcgattgtgcatatgggcggtcagtggttgggtggtcgtcaaatccgaaccaattgggccactcgtaaaccacctgcacctaaaagtacacaagaaaacaacactaagcagttgagatttgaagatgtagtaaaccagtcaagtccaaaaaattgtactgtgtactgtggaggaattgcgtctgggttaacagatcagcttatgagacagacattctcaccatttggacaaattatggaaataagagttttcccagaaaagggctattcatttgtcagattttcaacccatgaaagtgcagcccatgccattgtttcggtgaacggtactacgattgaaggacatgtggttaaatgctattggggtaaagaatctcctgatatgactaaaaacttccaacaggttgactatagtcaatggggccaatggagccaagtgtatggaaacccacaacagtatggacagtatatggcaaatgggtggcaagtaccgccttatggagtatacgggcaaccatggaatcaacaaggatttggagtagatcaatcaccttctgctgcttggatgggtggatttggtgctcagcctccccaaggacaagctcctccccctgtaatacctcctcctaaccaagccggatatggtatggcaagttaccaaacacagtgagccgggactctaaaaaaaaattgtaattcatgataggcttcgatttcctgtgacactctgaagacatgaaagtagacatcggaaaatgaaaatatttattttaaaaattgaaatgtttggaacctttagcacagatttgctttggtgaaggacacgtgtcttctagttctgcctttttaagtttttgttcatgatggatatgaacatgatttttctttatgtacaaaaactaaaataaagtcaataaagacaattctgactacaaattttgatataataggaaaaatggctaatacattttgattcttagatactattccatttttatcttgctgttcagtattttaactcactgtgtttttaaaagagcaaaaaagggaggatcgtgaaaacctgggaatcacatataagttcatcctgaatcctgatactcccctccccttccctgaggtggaccacatttgaagtcagcagagaaaaagtgtgatattcagaagaaatgcgtgattttggagtcgctttggaggaaatattttctttctctatgcctaaagaaactgaagccagactgaagttttgcaccctaaaaaaggaacagcattgtttgagttacttgagcaaatgttggtggtccacgttaagacatatttttaaaacttccaaaagtgtcgattattaaaattgtagtattttacatttcattttggggggaaatccaagtatggtgtttgtattgaagtcagacagtcatacttgtgcttttacatgaagtttaaatgatacatattgtaaatattcaataactacagtgtttaaaaagcatgcttcaacatagaagtagcagcaatgtaattatttgaagtaacacttaacacactccgctgcattgaatgcagtggattgatcagaatgttaagactgacatttccaaggttggctactatgtaaaattaaaattacacaaattgtgcagaaaaagccttaattttaatttcatacaatctttgatgcattagtatgttctaaaatgtcattgggaattagttttttgtttttgtttttttttttttttttttttgctttacattacttggtatgtaaataccttgattaaaaccttgtaaaccaatttcaaggttactataagttgtatagtacaagtgttttttaaaaatcttggggtgtttttaaaaattaagatatattttgcccaagaatttttttaacaagattgctaaaaacatcttatttagacacttcaatgtaccaatttataattggatattcagtttaaatagtacacagagttgtggcttttattttcaattaatttttttccttgtgggcagtgtgcatggtataataagcctgagcagaggcttaagttgtatgtgtgcagagtttgtaaaggaatcaattggaagatgcagaagaccgaggtttgctttcaaggtatttttcaggctgtgtgggtaaaatttgcctcaaatttctatcaaacaggaatgtaaaatagataaaatcctatgtatttgaattgtcagagctagggagtgcaaatgttttggcaatgtattcaaaatgctggcctgggcaccaaagagaaaatagccttttacagttacatagtaagatgcgattagtacccacaaattactgttttctaaacatttgaagttttacgattagctttaaaataatgattttataaattggtggtcacaataattttggtattactttcctccttttcccacttagcaatatagccaaatgtattcaacataaaaattcatagggtctgaaattcatagctgggccaaattttttatggcaccttagttttaccataatggtcatctattacactcttctgttataaaatatacccttatttcttttgtttatagtatctttgaggaatgtttttggaaaagttaatttatattttatagggagaacactcaataaattatgttaactgtgcccccgagttaaaaattttatgagtatatgtgaaacttgaacaactgaagactttttttaattgataaaaatgcttagtatgcctgttttggtctgccagtaaattaagtagcttattgagataactaacagctaaatatagctgtagtgtttcctgactgtatattctatgatttaataaaattatccagactagttatattgccacagtaaacatgtgactgaagtgtccttcatcttaatctgaaagagggcaaaatttcatgatcagttaatggaagttatttcatattaagtggtttttttttttttttttttttagatggagtcttgctctgtcgccaggctggagtacatgtagtgatgagaacttggctcaccgcaacctctgcttcccagattcaagcgattctcctgcctcagcctcctgagtagctgggattacagtcacgtgccaccatgcccagctaatttttttgtgtttttagtagagatgggggtttcaccatgttggccaggatggtctcgatctcctcacctcgtgatccgcccgcctcagtctcccaaagtgctgggactacaagcgtgagccacggtgtctggcttttttttttttttttttttgagacggagtcttgccctgtcgccaggctggagtgcagtggtgcaatctcggctcaccgcaacctccgcctcctgggttcaagctattctcctgcctcagcctcccgagtagctggactacagatgcatgccaccatgtctagtaaatttttgtatttttagtagagacagggtttcaccatgttggccaggatggtctcaatctcctgacctcgtgatccacccacctcggcctcccaaggtgctgggattacaggcgtgagccactgcacctggccattaagtggtttttaaaatacaaagctacttatccaaatgaaatgtaccatttaaaaactacaactgggccgggcgcagtggctcagcctgaccaacatgatgaaaccctgtctccactaaaaatacaaaattaagcgtggtggcccgtgcctgtagtctcaactactcaggaggctgaggcaggagaatctcttgaacccaggaggcggaggttgccctgagccaagattgtgctattgcactccaccctgggaaatagagcaagactccgtctcaaaaaaaaaaaaagtgcaactgttgccgggcatggtggttcacacctgtaatcccagcactttgggaagctgaggcgggtagtggatcacctaaggtcaggagtttgagaccagcccagccaacatggtgaaaccccatctctactaaaaataacaaaaaaattagctgggcgtgctggtgggcgctggtagtcccagtgacttgggaggctgaggcaggagaattgaacctgggaggtggaggttgcagtgagctgaaaatgcgccactgcactccagcctgggcgacagagcgagactccatctcaaaaaataaatgaattaattaaaagtatggctgttgagctaacagatgattttataacatgacccaatgctatcttgatccaacttaagcctaagaatcgttgctccccaccccgttcatcaaaaacatcagcagagactttttgggcatgcaaggaaatgttttttatttcataattattttgagatttattttggtgatgtgtttctgactgactgccatattctttgttctcataatttctctactagtattttcactcccaacccccgtgccattcccacttgatttttatgtctgctggcagtgagaggctaaaatggccaacttaagccaaagctgtaaacaacagttgaagtaagtctttcaataaagactagactatatgataa

SEQ ID NO: 191324 - DNA, 1401 bp, Homo sapiens
  Payload ID: 17789
  Gene Name: TIA1 cytotoxic granule-associated RNA binding protein-like 1
  Uniprot ID: Q01085
  ENST ID: ENST00000436547
  CDS Start-End: 46-1173
accctgccctcccccttgtcccgggatcgctccgtcgcacccaccatgatggaagacgacgggcagccccggactctatacgtaggtaacctttccagagatgtgacagaagtccttatacttcagttgttcagtcagattggaccctgtaaaagctgtaaaatgataacagagcatacaagcaatgacccatattgctttgtggaattttatgaacacagagatgcagctgctgcattagctgctatgaatgggagaaaaattttgggaaaggaggtcaaagtaaactgggcaaccacaccaagtagccagaaaaaagatacttccaatcacttccatgtgtttgttggggatttgagtccagaaattacaacagaagatatcaaatcagcatttgccccctttggtaaaatatcggatgcccgggtagttaaagacatggcaactggaaaatccaaaggctatggttttgtatctttttataacaaactggatgcagaaaatgcgattgtgcatatgggcggtcagtggttgggtggtcgtcaaatccgaaccaattgggccactcgtaaaccacctgcacctaaaagtacacaagaaaacaacactaagcagttgagatttgaagatgtagtaaaccagtcaagtccaaaaaattgtactgtgtactgtggaggaattgcgtctgggttaacagatcagcttatgagacagacattctcaccatttggacaaattatggaaataagagttttcccagaaaagggctattcatttgtcagattttcaacccatgaaagtgcagcccatgccattgtttcggtgaacggtactacgattgaaggacatgtggttaaatgctattggggtaaagaatctcctgatatgactaaaaacttccaacaggttgactatagtcaatggggccaatggagccaagtgtatggaaacccacaacagtatggacagtatatggcaaatgggtggcaagtaccgccttatggagtatacgggcaaccatggaatcaacaaggatttggagtagatcaatcaccttctgctgcttggatgggtggatttggtgctcagcctccccaaggacaagctcctccccctgtaatacctcctcctaaccaagccggatatggtatggcaagttaccaaacacagtgagccgggactctaaaaaaaaattgtaattcatgataggcttcgatttcctgtgacactctgaagacatgaaagtagacatcggaaaatgaaaatatttattttaaaaattgaaatgtttggaacctttagcacagatttgctttggtgaaggacacgtgtcttctagttctgcctttttaagtttttgttcatgatggatatgaacatgatttttctttatgtacaaaa

SEQ ID NO: 191325 - DNA, 515 bp, Homo sapiens
  Payload ID: 17789
  Gene Name: TIA1 cytotoxic granule-associated RNA binding protein-like 1
  ENST ID: ENST00000412524
  CDS Start-End: 118-515
aaaaaagaaagaaagaaagaaagaaagaaaagatacgtaggtaacctttccagagatgtgacagaagtccttatacttcagttgttcagtcagattggaccctgtaaaagctgtaaaatgataacagagcatacaagcaatgacccatattgctttgtggaattttatgaacacagagatgcagctgctgcattagctgctatgaatgggagaaaaattttgggaaaggaggtcaaagtaaactgggcaaccacaccaagtagccagaaaaaagatacttccaatcacttccatgtgtttgttggggatttgagtccagaaattacaacagaagatatcaaatcagcatttgccccctttggtaaaatatcggatgcccgggtagttaaagacatggcaactggaaaatccaaaggctatggttttgtatctttttataacaaactggatgcagaaaatgcgattgtgcatatgggcggtcagtggttgggtggtcgtcaaatccgaaccaattg

SEQ ID NO: 191326 - DNA, 2321 bp, Homo sapiens
  Payload ID: 17789
  Gene Name: TIA1 cytotoxic granule-associated RNA binding protein-like 1
  ENST ID: ENST00000497671
  CDS Start-End: 565-972
tcttcacgtcccagcgcgggtgggcgccggcggctcctcttaaccacaggttccagaagtcctctgcagaagtgcttccctctctcatttccaggaccacaattcccagagacttcggcttcacgacgtttctctttttgcccgatctctcccggagctggctgggcttcggccggccagaggcccacagcgacgacgtgatccgtcgtgagcgggtcccagggtttcctcggcggcccttttttctctcccctcggtcgtcccccttgcaggctgtcgcggctggcctgagcggtgacctggcgggtcgcgcctgcgctctgccctgtttcctgcctggctggtggcggcggccattttgttcatcctcctcctcctcctgctcctcctggttggagcgcagtgtccggagcgggctggggggagagagcccgagagcagggttcggtgccttttcctctgtccccagccggtgcccagagcccccctccccttcctccccaccccctcccctccccaaccctgccctcccccttgtcccgggatcgctccgtcgcacccaccatgatggaagacgacgggcagccccggactctatacgtaggtaacctttccagagatgtgacagaagtccttatacttcagttgttcagtcagattggaccctgtaaaagctgtaaaatgataacagagcatacaagcaatgacccatattgctttgtggaattttatgaacacagagatgcagctgctgcattagctgctatgaatgggagaaaaattttgggaaaggaggtcaaagtaaactgggcaaccacaccaagtagccagaaaaaagatacttccaatcacttccatgtgtttgttggggatttgagtccagaaattacaacagaagatatcaaatcagcatttgccccctttggtaaaatatcaattgctcataagaatggacaggatcttgaaggctaactgcaaggaactgtgcacactggaactcagttgtagattttttttctcatttctatttattcttattatacattatttatatatacatattttagtatttacattttaacattctatattcagtggagttctatatttccaatcatttaacttactcactaaaatttctgtgtaaatttgttgttttcgtactggtgtgcttagcattgttgttagttttttattctcctttcttaaatttctgaaaatgtcaatttttcaaaatttacagctgcccaaactccaaaatgatggtagagaattgaccaagaaaaataaagaaatctgttaacaggccatggatgcccgggtagttaaagacatggcaactggaaaatccaaaggctatggttttgtatctttttataacaaactggatgcagaaaatgcgattgtgcatatgggcggtcagtggttgggtggtcgtcaaatccgaaccaattgggccactcgtaaaccacctgcacctaaaagtacacaagaaaacaacactaagcagttgagatttgaagatgtagtaaaccagtcaagtccaaaaaattgtactgtgtactgtggaggaattgcgtctgggttaacagatcagcttatgagacagacattctcaccatttggacaaattatggaaataagagttttcccagaaaagggctattcatttgtcagattttcaacccatgaaagtgcagcccatgccattgtttcggtgaacggtactacgattgaaggacatgtggttaaatgctattggggtaaagaatctcctgatatgactaaaaacttccaacaggttgactatagtcaatggggccaatggagccaagtgtatggaaacccacaacagtatggacagtatatggcaaatgggtggcaagtaccgccttatggagtatacgggcaaccatggaatcaacaaggatttggagtagatcaatcaccttctgctgcttggatgggtggatttggtgctcagcctccccaaggacaagctcctccccctgtaatacctcctcctaaccaagccggatatggtatggcaagttaccaaacacagtgagccgggactctaaaaaaaaattgtaattcatgataggcttcgatttcctgtgacactctgaagacatgaaagtagacatcggaaaatgaaaatatttattttaaaaattgaaatgtttggaacctttagcacagatttgctttggtgaaggacacgtgtcttctagttctgcctttttaagtttttgttcatgatggatatgaacatgatttttctttatgtacaaaaactaaaataaagtcaataaagacaa

SEQ ID NO: 191327 - DNA, 485 bp, Homo sapiens
  Payload ID: 17789
  Gene Name: TIA1 cytotoxic granule-associated RNA binding protein-like 1
  ENST ID: ENST00000479729
  CDS Start-End: 168-254
gcgcagtgtccggagcgggctggggggagagagcccgagagcagggttcggtgccttttcctctgtccccagccggtgcccagagcccccctccccttcctccccaccccctcccctccccaaccctgccctcccccttgtcccgggatcgctccgtcgcacccaccatgatggaagacgacgggcagccccggactctacacacacaagctaagacatatggttctatcttcagaaaacaatatggtgtttagagcctaggtagcaattatatatttaaagacttggatctttagcttgactatttcataaccagagcagaaagaaagtgaagtgtagaagctataatttggaacgaataaagatgtcatttcaatgaactaccaagagatgatcttactagatacgtaggtaacctttccagagatgtgacagaagtccttatacttcagttgttcagtcagattggaccctgtaaaagctgt

SEQ ID NO: 191328 - DNA, 2625 bp, Homo sapiens
  Payload ID: 17790
  Gene Name: tigger transposable element derived 1
  Uniprot ID: Q96MW7
  ENST ID: ENST00000408957
  CDS Start-End: 711-2486
gcggctatctcgggacgccagctcagggcggctgcgcagagggctggactcagcggcggagctggctgctggcctcagttctgcctctgtccaggtccttgtgacccgcccgctctcctaagggagcgtgtcctggccccctcccgcagcggctcggaaaaaaggcagcaccgcgtcgttgacggcgcgggctctggactcgctgcttggtaaaaaccttcctcttcctccagtgcgggacgcactctctggtatctcttttgacctcccggaggctttcctttgtcggtcgcggcgccactgtactatggcatacctcgttttattacgcttcgcagatagggcattctgaaaacaaatggagggtttgtggcagccctgagtccagcaattgtatcagcgccatttttccaacagcatgtgctcacttggtgtctctgtgttacattttggtaattctcaaaatatttaaaactttttcatgatttctgtgtctgttatggtgatctatgatcagtgatctttgatgttgctattgtcattgttttggggtgccacatacagcgtcttttataagacgtggaacttaatgttgtgtgtgttctgaccgctccacccacagaccgttccccatctctctccctcttcttgggcctccctattccctgagacacaacaatattgagattaggcgaattaatgactctgcaatggcctctaagtgctcaagtgaaaggaagagtcgcacatctctcactttaaatcaaaaactagaaatgattaaactgagtgaggaaggtatgtcaaaagccgagataggccgaaggctaggcctcctgcggcaaacagttagccaagttgtaaatgcaaaggaaaagttcttgaaggaagttaaaagtgctactccaatgaacacacgaatgataagaaagcgaaacagccttattgctgatatggagaaggttttagtggtctggatagaagatcagaccagccgcaacattcccttaagccaaagcctaatccagaacaaagccctaactctcttcaactctatgaaagctgagagaggtgtggaagctgcagaagaaaagtttgaagctagcagaggttggttcatgaggtttaaggaaagaagccatttccataacataaaagcacaaggtgaagcagcaagtgctgatgtagaagctgcagcaagttatccagaagctttagctaagatcattgacgaaggtggctacactaaacaacagattttcaatgtagatgaaacagccttctattggaagaagatgccatctagaactttcatagctagagaggagaagtcagtgcctggcttcaaagcttcaaaggacaggctgactctcttgttaggggctaatgcagctggtgactttaagttgaagccaatgcttatttaccattctgaaaatcctagggcccttaagaattatactaaatctactctacccgtgctatataaatggaacagcaaagcccggatgacagcacatctgtttacagcgtggtttactgaatattttaaacccactgttgagacctactgctcagaaaagaagattcctttcaaaatattactgctcattgacaatgcccctagtcatccaagagctctgatggagatatacgaggagattaatgttattttcatgcctgctaacacaacatccattctgcagcccatggatcaaggggtaatttcgaccttcaagtcttattatttgagaaatacatttcataaggctctagctgccatggatagtgatgtctctgatggatctgggcaaagcaaattgaaaaccttctggaaaggattcaccattttagatgccattaaaaacattcgtgattcatgggaggaggtcaaattgtcaacattaacaggagtttggaagaagttgattcccaccctcattgatgactatgaggggttcaagacttcagtggaggaagtaagtgcagatgtggtggaaatagcaaaagaactagaattagaagtagagcctgaagatgtaactgaattgctgcaatctcatgataaaactttaacagatgaggagttgtttcttatggatgcgcaaagaaagtggtttcttgagatggaatctacacctggtgaagatgctgtgaacattgttgaaatgacaacaaaggatttagaatattacataaacttagttgataaagcagcagcagggtttgagaggattgactccaattttgaaagaagctctactgtgggcaaaatgctatcaaacagcatcgcatgctacagagaaatctttcatgaaaggaagagtcaactcatgcgaaaagcttcaccgatgtcttattttaggaaattgccacagccaccccaaccttcagcagccaccaccctgaccagtcagcaaccatcaacctcgaggcaagaccctccaccagcaaaaagagtacgactcaccgaaggctcagattgataatcagcattttttagcaataaagtatttttaaatttaggtatgtatattgttttattagacaatgctattgcactcttgctggtctacagtatagtgtaaacataacttttatatgcattgggaaaccaaaaacatt

SEQ ID NO: 191329 - DNA, 2083 bp, Homo sapiens
  Payload ID: 17791
  Gene Name: tigger transposable element derived 2
  Uniprot ID: Q4W5G0
  ENST ID: ENST00000317005
  CDS Start-End: 159-1736
gattcacgtagaccttgtcaggaaattggtcactatccatctaggccctagaagtgagaggaggaatcttacgaactcattttctagttgctttgtattcaaatcttagttgttaattatcttgttctagtaatcacctaaaatattagacacttaaaatgttggggaaacgtaagcgtgtggtgttgacaattaaggacaagcttgacattattaagaaacttgaggaaggcatctctttcaaaaaactttccgtggtgtacggaattggtgaatccacagttcgtgatattaaaaagaacaaagaaaggattataaactatgcaaacagttcagatcctaccagtggagtatccaaacgtaaatctatgaagtcatcaacatacgaggagcttgatagagttatgatagagtggtttaaccaacagaaaacagatgggattccagtgtccggaacgatttgtgcaaaacaagccaagttcttttttgatgctttgggaatggaaggtgattttaatgcatcgtcaggctggctaactcgatttaagcagcgccatggtattccaaaggctgctggtaaaggaacaaaattaaaaggagatgaaactgctgccagagaattttgtggtagctttcaggaatttgttgaaaaagagaatctacaaccagagcaaatttatggtgctgatcaaactggattgttttggaaatgtctaccatcaaggacattaactcttgaaactgaccaaagtacttctgggtgtaggtcaagcagagagagaatcatcattatgtgttgcgcaaatgccacaggtttacacaaacttaatctttgtgttgtggggaaggccaaaaagccccgagcattcaaaggcactgacctttcaaaccttcctgtgacatattacagtcaaaaaggtgcatggatagaacagtctgttttcagacagtggtttgaaaagtactttgtgccacaggtacagaagcatttgaaatccaagggacttttagaaaaagcagtgcttcttttagatttccccccagcacgtccaaatgaagaaatgttgagttcagatgatggcagaataattgtgaagtatttgccaccaaatgtcacaagtctgattcaaccaatgagccagggagttctagccactgtaaaaagatactatcgagcaggacttctccagaaatacatggatgaaggaaatgacccaaaaatattttggaagaacttgacagtgttggatgcaatttatgaagtgtcaagagcttggaacatggtaaaatcaagtaccataaccaaagcatggaaaaaacttttccctggcaatgaagagaattcaggtatgaacattgatgaaggagccattttagcagctaatttagcaacagttttacagaacacagaagaatgtgaacatgttgacattgagaatattgatcagtggttcgactctcggagcagtgactcaagctgtcaggtgctgactgacagtgaaagtgctgaggaccagaccaaggctgctgagcaaaagccttccagtaagagtagaaaaacagaactgaatccagagaagcatattagccataaagcggcacttgaatggactgaaaatttactggattatcttgaacaacaagatgacatgcttctgtctgataaattggtattaaggaggcttcggaccataataagaaaaaaacagaagatccaaaataacaaaaatcattaataaggctcttaagtatttcagtgtatctgcatctttgtgactatctgcagtgaaactttgcttgtttgaagtcctgtggattccaaagccaaatacattttataaatgattttggaattagatgtcagtttggattacttaaattacaactctttaatgttgactctagtcattgggcattgacgtgtaacttgtctttctactgtttctaatatctattaattagatcataaggtacctgaggccagggatcttgtgtctgttgtgcctgaatttggcgtgtctaataaaggcccatgcacactataggcactcaataaaacttacatttttatgatttttctttg

SEQ ID NO: 191330 - DNA, 3217 bp, Homo sapiens
  Payload ID: 17791
  Gene Name: tigger transposable element derived 2
  Uniprot ID: Q4W5G0
  ENST ID: ENST00000603357
  CDS Start-End: 1293-2870
acaacgttctgcgggggcgcgcgcgtgctctctaatcccccgccttccggctccggcggcgacgctcgtccctctccgctcgtccctcgccgctgccgggccaccagtgccagcctgcctcaggagactccatttgcgcttagtgtggtctgggcgccgcgcaggcggtcccagggcgatgcccggggccggcggactggcgttccctgtgccaagcggccgcccgctggctggctggctgcagcagtgacatcctggtcgccggcgtccaggcggaatccgggctccctccgcgggaggaaagacgtcccgcgctctgaagctcgcccagcggggagaggccctcgctaacacggcttctccctgacctcttaatttcaggaggtttcggagcctccgagtatctctacagcccccacaggaactgcttctgttggtccatcgaggatcgtctttcaccaggattattgtaacatcatcttcaccgagcctgccaccccatagcctctaccttgggtcctcatttccaccgatgcagtttttttgatgctttctttagtaatgtgacatcacatgtccactatcctcctttccagctgccaaatctagtaggtttaagtcgcttttaaagtagagttttctgcctgttccactttcaccttatttgcactgttcacttctgtccgggtcatcttctcttgcgtatgatttccacaagcactcacttgcgcaacctatagcagagtccgtgcctagagagacagcattccatacaatccactgcttgacaaagaccacatagtcagagggtgagttttcccattgtattttcctgtatgtcaagtttgcaagtcctctcttgacttaaactgtttactccctagcacatttcctaaaatacttccacctgagatttagtggctattctggcaaagaacattacctgcaaggatggcaagaattgagtatgcaatagtactgttttagaagccttaccagtacagtttctagcctctagtgtgattgcacttcatgaaagaccctgaaccctgaggaggaagaaagatagaagataagagttaattggcgctaggctttgttgtaggaagtttgtaagttttaaaatagcaagtagattcacgtagaccttgtcaggaaattggtcactatccatctaggccctagaagtgagaggaggaatcttacgaactcattttctagttgctttgtattcaaatcttagttgttaattatcttgttctagtaatcacctaaaatattagacacttaaaatgttggggaaacgtaagcgtgtggtgttgacaattaaggacaagcttgacattattaagaaacttgaggaaggcatctctttcaaaaaactttccgtggtgtacggaattggtgaatccacagttcgtgatattaaaaagaacaaagaaaggattataaactatgcaaacagttcagatcctaccagtggagtatccaaacgtaaatctatgaagtcatcaacatacgaggagcttgatagagttatgatagagtggtttaaccaacagaaaacagatgggattccagtgtccggaacgatttgtgcaaaacaagccaagttcttttttgatgctttgggaatggaaggtgattttaatgcatcgtcaggctggctaactcgatttaagcagcgccatggtattccaaaggctgctggtaaaggaacaaaattaaaaggagatgaaactgctgccagagaattttgtggtagctttcaggaatttgttgaaaaagagaatctacaaccagagcaaatttatggtgctgatcaaactggattgttttggaaatgtctaccatcaaggacattaactcttgaaactgaccaaagtacttctgggtgtaggtcaagcagagagagaatcatcattatgtgttgcgcaaatgccacaggtttacacaaacttaatctttgtgttgtggggaaggccaaaaagccccgagcattcaaaggcactgacctttcaaaccttcctgtgacatattacagtcaaaaaggtgcatggatagaacagtctgttttcagacagtggtttgaaaagtactttgtgccacaggtacagaagcatttgaaatccaagggacttttagaaaaagcagtgcttcttttagatttccccccagcacgtccaaatgaagaaatgttgagttcagatgatggcagaataattgtgaagtatttgccaccaaatgtcacaagtctgattcaaccaatgagccagggagttctagccactgtaaaaagatactatcgagcaggacttctccagaaatacatggatgaaggaaatgacccaaaaatattttggaagaacttgacagtgttggatgcaatttatgaagtgtcaagagcttggaacatggtaaaatcaagtaccataaccaaagcatggaaaaaacttttccctggcaatgaagagaattcaggtatgaacattgatgaaggagccattttagcagctaatttagcaacagttttacagaacacagaagaatgtgaacatgttgacattgagaatattgatcagtggttcgactctcggagcagtgactcaagctgtcaggtgctgactgacagtgaaagtgctgaggaccagaccaaggctgctgagcaaaagccttccagtaagagtagaaaaacagaactgaatccagagaagcatattagccataaagcggcacttgaatggactgaaaatttactggattatcttgaacaacaagatgacatgcttctgtctgataaattggtattaaggaggcttcggaccataataagaaaaaaacagaagatccaaaataacaaaaatcattaataaggctcttaagtatttcagtgtatctgcatctttgtgactatctgcagtgaaactttgcttgtttgaagtcctgtggattccaaagccaaatacattttataaatgattttggaattagatgtcagtttggattacttaaattacaactctttaatgttgactctagtcattgggcattgacgtgtaacttgtctttctactgtttctaatatctattaattagatcataaggtacctgaggccagggatcttgtgtctgttgtgcctgaatttggcgtgtctaataaaggcccatgcacactataggcactcaataaaacttacatttttatgatttttctttg

SEQ ID NO: 191331 - DNA, 2012 bp, Homo sapiens
  Payload ID: 17792
  Gene Name: tigger transposable element derived 3
  Uniprot ID: Q6B0B8
  ENST ID: ENST00000309880
  CDS Start-End: 208-1623
ccggcgcgggcggcgcgcacgggactctgctgtgcgcgcgcccgcccgcccgccgtccgcgcaggccctcggtccgctctgccctcggggtcgtggcgcccatccctcccctgttctgctgtcgccgcccggacaggggctcgggagccgggctgggggcaggggctggagccgcgggaccagcgcctgaggtgccccggagaggccatggagctgagcagcaagaagaagcttcacgccctgtccctggccgagaagatccaggtgctggaactcctggatgagtccaagatgtcccagtcggaggtggcccggcgcttccaggtttcccagccccagatctcgcgcatctgcaagaataaggagaagctgctggcggactggtgcagcggcacagccaaccgagagcgcaagcgcaagcgggagtccaagtacagcgggatcgacgaggctctgctctgctggtaccacattgcccgggccaaggcctgggacgtgacggggcccatgctgctccacaaagccaaggagctggccgatatcatgggccaggacttcgtgcccagcatcggctggctggtccgctggaaacgccgaaacaacgtcggctttggggcccgccatgttcttgcgccttcattcccccctgagccacctcccccggggctcacatcccaggctcagctgcctctttccctaaaagacttctctccagaggacgtgtttggctgtgctgaattgcccttgctgtatcgggcagtgcccggcagctttggtgcatgtgatcaagtacaggtgctgctgtgtgccaacagcaggggcaccgagaagcggcgggtactgctgggtgggctccaggctgccccgagatgcttctttgggatccgcagtgaggctctgcctgcctcctaccacccggacctgggcatcccctggttagagtggttggcacagtttgaccgggacatgggacagcagggccgacaggtggctttgctgctggctgcccgagtggtggaggagctggcaggcctgcctgggctctaccacgtgaagctcttgcctctggccgcctctagcaccacgcctcccctgcccagctcagtggtccgggcctttaaggcccattaccgacaccggctgttgggcaaactggctgccatccaaagcgagagggatggcacctcgctggccgaggccggggcaggcatcaccgtgctggacgccctgcacgtggcgtctgccgcctgggccaaggtgcctcctcagctcattttcagcagcttcattcaagaagggctggctcccggcaaaacgcccccgtcctcgcacaaaacctctgagatgccaccagtccccggcgggctgagcctggaggagttttcccgctttgtggacctggagggtgaggagccaaggtctggagtatgtaaggaggagataggcactgaagacgagaagggggacagagagggtgcctttgagcccctgcccaccaaagctgatgccctccgggccctgggcaccttgaggaggtggtttgaatgcaacagcacttctcctgagctattcgaaaaattctacgactgtgaggaggaggtggagcggctttgctgcctatgaaggcgccttcactgcttgccagagccccttcctctcttgtttcccatggaaacggcctcttcagaaggcagatcgggctgtctctttcctgtggaaatagaactgtcgtaaaggtgtagaagggagagaagttgggacaccaagtctgagcttggagtggcagtcgtccaaaccccaggaagagagctctaaagatggggcttcgggggtaggaatccaggatgcttagtttctagaccctgcttgaaagttctagagcctttgaaagggagttagtctagaggcagccacttagaaaggtggaatttgggctttttggacagactgcttccttgaactttgtgttaaaaacagttctgcttctgaaaataaagtttttaatcagaaaa

SEQ ID NO: 191332 - DNA, 2472 bp, Homo sapiens
  Payload ID: 17793
  Gene Name: tigger transposable element derived 4
  Uniprot ID: Q8IY51
  ENST ID: ENST00000304337
  CDS Start-End: 822-2360
gggtaattttctggcagcgacctaatgcgcgcggggccagaggcaccggctagagctgggagcttgcggaagggcgcccctgcctggtcttgagaggtcgaaggtctccaggaggcctccgcctccctctttttcattcacacaccctagcctcacacgttaggaggacccccccaacagaccgtgagctggtgccgggagggtggaggtagatgtacctcacctccacgctaccacagaagagcgaaagctgctttctcagccaccggagagcacgaagaagaagaagatatactggcaagttctagaaggattctaccattttcttctttaccatgaacaaacttgaaaattaatgggtaatagttgcatgaaaacttttgaacgttttttcttatctctgaggccttctatggagaattaataggaggttgaatgtgtgcatggataaaatggatcatcttaaaggattgaagttccaaaaatacatcagcaggactggacaggttttatataatgagatttctattttagcttgacttctacaactctgaataagctataaactgagctatacaaggtactaggaaggaagtttctcttctaaaatattctagttgcatataatatttttcttcagatctttgaaaaagcatattttgtcatcaagttcctacaaaataagactattagacaccaacttttagtgtataaagtaggatagaaagcagcaatctatattatactggaaaacaaatttaattaaagaaacagtcaccaggaagttaagaagagtaatctctacataagcactggctgagatggcagaagcttctgtggatgcctcaactctgcctgtaacagtgaagaaaaagaaaagcctatccattgaggaaaagatcgacatcataaatgcagtggaaagtggcaagaaaaaagcagagattgctgctgaatatggaataaagaaaaattcattgtcttctattatgaagaataaagacaaagttctagaagcctttgaatctctaagatttgatccaaagagaaaaagactgagaactgctttttacacagatctggaagaggcattaatgagatggtatcgaattgctcagtgtctaaatgtaccagttaatggtccgatgttacgtctaaaagctaatgattttgcccagaaactgggccataatgattttaagtgcagtaatggttggctggatcgttttaaatccaggtatggtttagtattcagagctcaacctgtagaagctacaggtgtaccagtagacccttcgactgtctggtaccaaaatgtacttccttattatttaaatgattatcatcctaaaaatgtttttaatataaaagagactgggctgctttatcgaatgttacctaccaatacatttgcatttaaaggcgaaacatgttcagttggaaagttatgcaaagacagaataactctggtggttggcacaaacatggatggctcagagaaacttcctttgcttgtcattggaaaaaagagaactccacattgtttcaaaggtttaaaatcattgcctgtgtgttatgaagctaacagaatggcatggatgacctccgatgtatttgaacaatggatgcgaaagcttgatgaggaatttcaagcccagcaacgaagagtggtgatttttgttgagtcttttccagcacatccagaggtaaagaacctaaaatccattgagttagcattctttccatcatgtttatcttccaaatgtatagctatgaaacaaggtgttattaaaagccttaaaatcaaatatcgacactgtcttatcaagaaatttttaagctctgttgaaggtagcaaagaatttacattttcactactagatgcagttgatacattgcatctttgctggagggctgtaaccccagagactattgttaaaagctatgaagaggcaggattcaaatctcaaaagggagaaagtgacataacaaatgcagagaaggatactggtctggatttggttgctgatgctctgggggcaggagtagaatttcctgaaggtttatctatagaagaatatgctgccctggatgatgatttggagacatgtgaagcagcaccaaatggtgattccatatgcaccaaagaaagtaaatcggatgaaactggattttacacttctgatgaagaggatgatgatggatctccaggaactgaactccctttaccatcaaaatctgaggcaataactgctttagatactctgaaaaaatttctcagaagtcaagatatgaatgacggacttcaaaattctttagcagaccttgaaaattttattaactctttatcacctaagtaactatgtattgtacatctaaagagtaatagcttttcctgatacattttattatataaggtatgtaaaggagttgtaccacaccacttaaacataaaaaatggaaaactgctaa

SEQ ID NO: 191333 - DNA, 5390 bp, Homo sapiens
  Payload ID: 17794
  Gene Name: tigger transposable element derived 5
  Uniprot ID: Q53EQ6
  ENST ID: ENST00000321385
  CDS Start-End: 70-1998
gccccgccccgagcggctgggcgtgtggctcccgcgacccgcgcggcccgggtcccccccgccgcagccatgtaccccgcgggccccccggccggcccggtaccgcgccgcggccgccgtcccctgcccgggccccccgcgcccgccccagcccccgtccccgctgcacggccgccgccccccgcgcccgggccgcggccccgcgtggccgtgaagatggccttccgcaaggcctactccatcaaggacaagctgcaggccatcgagcgcgtcaagggcggcgagcggcaggccagtgtgtgccgcgacttcggcgtgccgggcgggacgctgcgcggctggctcaaggacgagcccaagctgcgctggttcctggagcagctgggcggtgaggtgggcactcagcgcaagaagatgcggctggccaacgaggaggagatcgaccgcgccgtgtacgcctggttcctggcgctgcgccagcacggggtgccgctgtctggcccgctcatccaggcgcaggccgaggccttcgcgcgccagatctacgggcccgagtgcaccttcaaggccagccacggctggttctggcgctggcagaagcgccacggcatctccagccagcgcttctacggcgaggccgggcccccagccccgagccccgcgcccggcccgcccgtcaaggaggagcccgcgctgccctccggcgccggccccctgcccgaccgcgccccggccccgccgcccccggccgagggcggctacggggacgagcagatttacagcgccagcgtcaccggcctctactggaagctgcttccggagcaggctgcgcccccgggcgcaggggaccccggggcggggggctgtggccggcgctggcggggcgaccgcgtaacggtgctgctggccgcaaacctgaccggcagccacaagctgaagccgctggtcatcgggcggctgccggacccgcccagcctgcgccaccacaaccaggacaagttcccggcctcctaccgctacagccccgacgcctggctcagccgcccgctgctgcggggctggttctttgaggaatttgtcccaggcgtcaaacgctacctgcgccgaagctgcctgcagcagaaggccgtgctgctggtggcccacccgccctgcccaagcccagctgccagtatgcccgccctggacagcgaggatgcccccgtgcggtgcaggccggagcccctcggtcccccggaggagctgcagacaccggatggcgctgtgcgggtgctgttcctgtccaaaggcagcagccgggcacatatccccgcaccgctggagcagggcgtggtggccgccttcaaacagctgtacaagcgcgagctgctgcgactggctgtgtcctgcgccagcggctccccgctggacttcatgcgcagcttcatgctcaaggacatgctctacctggctggcctctcctgggacctggtgcaggcgggcagcattgagcgctgctggctgctgggcctgcgggctgccttcgagccccggcccggcgaggacagtgctgggcagccggcccaggccgaggaagccgccgagcacagcagggtgctcagcgacctcacccacctggcggctctggcctacaagtgcctggctccggaggaggttgcggagtggctgcacctggacgatgatgggggtccgcccgagggctgcagggaggaggtgggcccagccctgccccctgcagcgcctccggccccagccagtctgccctctgccatggggggcggagaggacgaggaggaggccaccgactatggagggacctcagtgccgactgccggggaggccgtgcgggggctagaaacagctctgcggtggctggagaaccaggaccccagagaggtggggccactgaggctggtgcagttgcgctcactcatcagcatggcccggaggctggggggcatcgggcataccccagcaggcccctatgacggtgtgtgaccaggccagcccagtgacctttctcctgctgcacttggagggaggggacatacacacagtctcccatctctcctcccctccccctggggtggcccaccgcatgggtacagggggttccaggaatccaaatccagcatggcttggaggagctctgttggtgagaggtcgccctgcctcactggcaccctgggggcacagctggaagagaggcctggcccatgctcctctcagggcaggcacatgtacggggcatacaaggcacagcgcctgttggaacaggtggctgtgttcctgctctggcccccgtggggctgggcctccgcccctgcaccagtcacatgcactggacgagggccgaaactcctgtctgctatcgagccctggtgctatgtggccccggagccacagcacaatcatctcagtggcgaagcacaccacttgattctatttttttttaacacattaaatctgtttttaaagatactcttcagaggggccgtgagaacaggggccgggtgggctggtctcgggccgccctgcggtttctctggaggtcagaggccccaggtactggagcatcactgtggagtgggaggggtggagccctgtattaggttctgggtgcagcagggaggtgtagagttccgtttccttggatttttagttttccctaagaaaactgaacagatctcttattccgtgggattggcagctgcctggctttgggccctggtgacttggccaacggcaggagagtttcccctgcttcctcatcagccacagaccattctgtccagtcccagggcctggagccacctgacttacctggaagcaggccctggcattagcccccagggcaatacgcagtgccaccctctgtgggctctcctccccaccctcagacttttctgcctctcctgggactgccaaggatgtggctgacaagctgctcctgggaggcctactttgaaaggaggaaagggccccagggcctgtcaaaccctggttctgttctgctctggccaggtctagacctacagtccttctggttggactggggccagggatgcccatgcctcctcaggtagggtgggaactgcctttgcagagatgctgcccgagctggtgtgaggggcagggagctggcctgcttgcctccaggtgttgacccctcgtccccatctgcccccagtgtcctcctaggagagggaaccttgaaaacccagagttgtggagtgcaggggtaggctggaggcctgcacggggaagggaagggctgtgcaccagcttggcagtggggcagctggagggtgtcccccaaaagtgacctttatacaggtccaggaacaaacagttccttggaactgcccgcaagtgaagaaatatatacatatatatgtatatatctatatctcaaaatctgagagctcagggaggccgtggaaatttggggaagaagaaacagactccctgagcagagctcagggcagcagctccaggcatgcctgctgagcccatcaggccaccgccacctgcaggaagagcctctggcctgaactgctggggatgggctgcagaaagcctgagacatttgggccagcaccttcccaggggcacaggcccccaaggcggggacaccacctctgctctgccaggcctgcctccagggctctgaggagaagctgacttcacggccgcggtgccagtgagggctgcatagccaggccttgtctgtagtctgggcggcccgtggcgctgcccttcagcccaactactcattgccgctgcgtctttggcgaggctttcatttccaacctttcttcccatctcagcccttttgttggcccgggtcccaggaggctggtgtcggtgagggcaggcccgctcctctcatcggggtggctgtggcctgtcccccagtccctcaatggccactttctataaacaaggcagcactaatttttgctataagataaaagaggccaggcacgttggctcacacctgtcatcccagcactttgggaggctgaggcgggtggatcacctgagattgggagttcgagaccagcctggccaacatggtgaaaaccccgtctctactaaaaatacaaaaattagctgggcgtggtggcaggtgcctgtaaccctagctactcaggaggctgaggcacgagaaatgcttgaagccagaaggcagagattgcagtgagccaagatcacaacaccgcgctccagtctgcgcgacagagcgagactctgtctcaaaaaaaaaaaaaaaaaagtgcaggtgcacgctggtggggacattaggagcctgtcaagagtgggtctgcctgctggcacttactagacgggaaataccccctaaagagggcttaaaaagcatcttctccctagcacggggcatgctggcacagggtgctgtgtgacagaggcttggccgctgggccccgctgctgagaaggctgctctgcccatgcctggccctgtgggcagtgccagccatggatccctgagaccctgggctggaacctggggccccgtcccagccctacctgcagctcactaaccctctctgggttctgctcagtgtctgaagtgatggaaagaccccagggttggtggctgtagcggcccccaggggtggcagaaccctttgggaggccaagtgttctttcccaaagctgcgcgggtgccatcgcctgccaggccctggctgtggtgacagacgtgggctggggtgaggctgcatctgcttcctctaacagccgtggctgcctgcgggctctggcctccgctctggcagattctgcacattccctgcaggcgcaggggtgggtgggggtgcctgtggcctcggaggtacagccagctgtcctcagctcagatggcccccaagagcccccagctcctgttcactgctcttccagttagtgacccccgtgtcagcatcattgtcagagttcctgggcttgtgggggctggagaagggaaggcgctgaggagggaaagatgagtgcaggttttgttgaaaccacccgacccgcgttttcagggggacgaggccactgccttggcccaaggacctgcaggcttgggggaccccctcgatgtccactgggctgcggatgaaacatcacactgtggtaggaaaggaaggggagcacccccagacgggggggtcctgcagagaccccaaccccttacctacctagttgagacacccatggggagcagccccaacagcatgtcggagtccctaggcttgtggggtcatgctctgttgagggcccttcctctaactggcgagcttgtttacagctgagctcgcctggtcagatgggcccagtggctttatctaataaaggctggacatgtccacttcatgagca

SEQ ID NO: 191334 - DNA, 5390 bp, Homo sapiens; identical to SEQ ID NO: 191333
  Payload ID: 17794
  Gene Name: tigger transposable element derived 5
  Uniprot ID: Q53EQ6
  ENST ID: ENST00000504548
  CDS Start-End: 70-1998

SEQ ID NO: 191335 - DNA, 4006 bp, Homo sapiens
  Payload ID: 17795
  Gene Name: tigger transposable element derived 6
  Uniprot ID: Q17RP2
  ENST ID: ENST00000296736
  CDS Start-End: 776-2341
gcaagctgcgccgctcacattcccggaggcgcttggcccggcggctggacgagggggatggctggcgcactcgcgctccccgctgtcggcgagaggcggctccagtcgtgacagcagcaacaaggaagtggaggcgagggctcgcgcgcgcatcccgggggctgaaggagccccggccccgcggccccgcccggcgacacacggcgcggagtcgcgacagcccctctcgcttcccctcctcggagtcgcgatatggggtcctgaagggcaagaataggagcacaggttcgctccgcaggctcctcaccgatgcctgccgagggccccgggggtcaagccccggggagctcgaggaagacggcagggacacggtcgtcaccgaggcaccggtttggcggctgcaccggcagtagcggcacaccacggatcgccagggagacccgtcccggcggccctcgcggcgcaccggaagcggtcggcagcgcgtgactgcatgcgacccctggcgcaagcgcaacagcccagccctagcttgggagcggacccacacgaactgctcaaaggcttggagcgggtctagtaaggcgaacggactgcttccggccagaggtcccgggcggaggaggaagctgtggctgccggcggtgggacgccccggccgctcagcccccgggcactgctgtggggcgttcagctttccacacttggggcaaagcaagccgcgaggaggaaccagacagtcctgttagttgtggccagccctcattccctggaaatggcaaacaaggggaacaagaagcgtcggcagttctctctggaggagaaaatgaaagttgtgggagctgtagactcaggcaagaggaaaggtgatgtggcaaaagaatttggtatcactccctctactttatctacattcttaaaggatcgcaccaaatttgaagaaaaggtgcgggaggcatccgtgggaccccagcggaaaaggatgaggagcgctctttatgatgacattgataaggctgtttttgcttggtttcaagaaatccatgccaaaaacattcttgtgactggttctgtcattcggaaaaaagcactaaacttggccaacatgcttggctatgacaattttcaagcaagtgtgggctggctgaacagatttagagatcgccacggaattgctttgaaagcagtctgtagagaagatagtgacaggttaatgaatggtctaggaatagataagattaatgagtggcatgcaggggaaattataaaactgattgctgactacagcccagatgatatctttaatgctgatgagacaggagtgtttttccagttgcttccccagcacacacttgctgctaaaggagaccactgtagagggggcaagaaagcaaagcagcggttgacagcactcttttgttgcaatgcctcggggactgaaaaaatgagaccattgattgttggtaggtcagccagcccacactgcctcaagaacattcattccctcccttgtgattaccgagccaaccagtgggcttggatgacaagggatctgtttaatgagtggctgatgcaagtggatgccaggatgaagagggcggaacgccggatcctcttgctcatagacaactgctctgctcataacatgcttccacacttggaaaggattcaggttgggtatctgccctccaactgtactgctgtcctgcagccactgaatcttggcataattcacaccatgaaagtactgtaccagagccaccttctaaaacagatcctcctcaagctcaacagcagtgaggatcaagaagaggtggacatcaagcaggccatcgacatgattgctgcagcgtggtggtcagtcaagccatccacagtggtgaaatgttggcagaaggcaggcatcgtccctatggaatttgcagaatgtgacacagaatcagcagccagtgaaccagacattgccattgaaaagttgtggcacacagtggctattgccacctgtgtcccaaatgaagtaaatttccaggactttgttactgcagatgatgatctcattatctctcaggacacagacatcatccaggacatggtggctggcgaaaataccagtgaagcaggaagtgaagatgaaggggaggtatctttaccagagcaaccaaaagtcaccatcacagaagccatatcaagtgtacagaaacttagacagttcctttccacttgtgtagacattcctgatgccatttttggacaattaaatggcatagatgaatatttaatgaaaagagtgacacaaacccttattgattccaaaattacagatttcctccaaacaaaataatgcaggaatttatttcagaaaatgtagtttacaagaataaagatttctttagataggttgttgagccaatttaagtaaagcaatgttattgtgacaacattccagtactctgaaatagccaggaaacttctttgaatggaatttgactaatatgtgtgttttcttttcttttgtttttggctgtctctggtccttgattcaagatgtattttgattcatccaagggtttccaaacttgtctgcaaattaggatcacttgagaatcctttaaaaattccaaagctcaggccatatcccaggcctattaaatcacaatctttggtgacgggtcacaggcattggtagttttgaagctctccaggtgattccaatgtgcagacaaatttgaaaactgaaccaaccacaggaacatcaagtacactgtgggcctgggtccagcttctttccagtaagtgtatctcaggggcttccaaatttagcttacatcagaatcacttggaaggcttgttaaaacccaaggctgctaggcccacccccagagtttgatacagtagacctcaggtgggacccaaaaatttgcatttctaacacattctcagctgatgcagtccaggctccatgctttgaaaaccactggtctagctttagataggatattgagccaatttaaataaagcaatatactggtctagctgagttctagaacttctctctttagctggccatctgaatactcccccatcactaattgttaaaaaaagaatcaactgttcttactctagagctcttttttcctttctgctgatttgctggaagcactacaagacttctgtttgttcgttcgtttgtttgtttgtttgtttttaaagatggggtcttgttatattgcctaggctggaatgcagtggttattcacaggcatgattataacacactactctctctaactcctggcctcaagccatcctcccaaatagatgggactactgatgcacactgccatgctggccttacgaaatgttttaataggcatttcactaatagggatctggagtacaaggaaatacagtgcatttaagacataggctgggcatggtggctcatgcctgtaatcccagcacattgggaagatcacttgaggcaaggagtttgagaccagactggccaacacagcgagacccccatctctaaaaaaaaaaaaattaataagacatggatacaaccagggagggaggttataataatagagcatcctgttaatcagaatcatgggggagaacatacagcccagcgtgcctctcactttccagaaagggtgagaggatcattagagagttcattagagagtatttattcctaataagtcagataaatgtcagtttcatttttagaagtttcacacaatacctgctaatggtgtgatgtcatttttccccctgcttcaggttaattttttggatatttcagaaacccatagcaattcagtgatttttctttttgtagtagctcagtcaaaacaggtaacagcagattaatcatagaaaatgttgcttccacattaacaaaacaatcactgaaaaacagcagatgtttaaatagattattttatagcttattttggatattttttcttttaataaactaatatgatcatttgaattaaaa

SEQ ID NO: 191336 - DNA, 2429 bp, Homo sapiens
  Payload ID: 17795
  Gene Name: tigger transposable element derived 6
  Uniprot ID: Q17RP2
  ENST ID: ENST00000515406
  CDS Start-End: 809-2374
gcaacagcccagccctagcttgggagcggacccacacgaactgctcaaaggcttggagcgggtctagtaaggcgaacggactgcttccggccagaggtcccgggcggaggaggaagctgtggctgccggcggtgggacgccccggccgctcagcccccgggcactgctgtggggcgttcaggtaacaggggcggggctgtgctgagcgtgagggatctaggccccgcctcacctttcagagccacgtcgggcgctgggaagcctacaataccaccctctcctcagcacgacgttcaaggcctgacctcagcctgtctcagtctttccctctcattcaggatcgggttcatacgtagtgccgcatcaagtagcgccttcatcactccagtgatctgccctcaatccgtctctcccactggcccacgaatagtgatggtagtgagttcctggagtgactcaagctgagctgaatgaccgtatggagagcttccgtaaatcaaatagggattggattggattgtcctttctctccagtgtcacaagttgtccacatttgtacaagttcccgcacaaccctcactgtattccagtctgcctacttctctgcatctaccgccatcaccaaccttctagccaccatcatctcctgcctggactgatgtagttctccccacatcccctctacaatccattctccacgaagcagtcagattgatcattttgcactctttccacacttggggcaaagcaagccgcgaggaggaaccagacagtcctgttagttgtggccagccctcattccctggaaatggcaaacaaggggaacaagaagcgtcggcagttctctctggaggagaaaatgaaagttgtgggagctgtagactcaggcaagaggaaaggtgatgtggcaaaagaatttggtatcactccctctactttatctacattcttaaaggatcgcaccaaatttgaagaaaaggtgcgggaggcatccgtgggaccccagcggaaaaggatgaggagcgctctttatgatgacattgataaggctgtttttgcttggtttcaagaaatccatgccaaaaacattcttgtgactggttctgtcattcggaaaaaagcactaaacttggccaacatgcttggctatgacaattttcaagcaagtgtgggctggctgaacagatttagagatcgccacggaattgctttgaaagcagtctgtagagaagatagtgacaggttaatgaatggtctaggaatagataagattaatgagtggcatgcaggggaaattataaaactgattgctgactacagcccagatgatatctttaatgctgatgagacaggagtgtttttccagttgcttccccagcacacacttgctgctaaaggagaccactgtagagggggcaagaaagcaaagcagcggttgacagcactcttttgttgcaatgcctcggggactgaaaaaatgagaccattgattgttggtaggtcagccagcccacactgcctcaagaacattcattccctcccttgtgattaccgagccaaccagtgggcttggatgacaagggatctgtttaatgagtggctgatgcaagtggatgccaggatgaagagggcggaacgccggatcctcttgctcatagacaactgctctgctcataacatgcttccacacttggaaaggattcaggttgggtatctgccctccaactgtactgctgtcctgcagccactgaatcttggcataattcacaccatgaaagtactgtaccagagccaccttctaaaacagatcctcctcaagctcaacagcagtgaggatcaagaagaggtggacatcaagcaggccatcgacatgattgctgcagcgtggtggtcagtcaagccatccacagtggtgaaatgttggcagaaggcaggcatcgtccctatggaatttgcagaatgtgacacagaatcagcagccagtgaaccagacattgccattgaaaagttgtggcacacagtggctattgccacctgtgtcccaaatgaagtaaatttccaggactttgttactgcagatgatgatctcattatctctcaggacacagacatcatccaggacatggtggctggcgaaaataccagtgaagcaggaagtgaagatgaaggggaggtatctttaccagagcaaccaaaagtcaccatcacagaagccatatcaagtgtacagaaacttagacagttcctttccacttgtgtagacattcctgatgccatttttggacaattaaatggcatagatgaatatttaatgaaaagagtgacacaaacccttattgattccaaaattacagatttcctccaaacaaaataatgcaggaatttatttcagaaaatgtagtttacaagaataaagatttctttagata

SEQ ID NO: 191337 - DNA, 3612 bp, Homo sapiens
  Payload ID: 17796
  Gene Name: tigger transposable element derived 7
  Uniprot ID: Q6NT04
  ENST ID: ENST00000396862
  CDS Start-End: 1830-3479
acctcggccagcttggcttccgtggaggccgctcctcgctttctgaggctcaaacgcaagccaccgcccgaaaggccgccgatctgaggagcgcaaccgccagcccaccgctggcctaccgcagccctgtccaggtacagagccagagcgccggccggaagtggaagtgacgctttccgagggtggcgcaggcccgccctctggctaaggcgcctgagcccggcctacttcctcgccagagaaactgctgtcttccccggcggtagggaagggttaatgccaccgagtatccagacccgctgaagcctagagggccttgtaccggctcaccgcgtggctgtcgctgtctcgtgtccccagtgggggaggcgtcgcactgccgcgtctgttctgcgtggctgtcgggcggcgtttggtcccgggagcctcgccggcacctggaatggataaaagtggcagtttttgtttcttcccatgaggttgtgtatctggactgagaaccaggaaattaatctagactaagacatttctaaggacctggaatggctttggggagcaccaggaggacccgaaaagagtatttgagggcctagagggacagaagagtttgccagtaggatttatgagaaacaattgatcagaaacagcagcagagaaaccttttagatttcttctgtggaaaagttgagtcttggttcaaattaagtaaaataaacactgaagagaaatcaaaatctcaaatataaaaagtatgttacttatagtgtaaatttaggaaaacaaatgaaaggacagatctttaaaaatttttaactatggtgaaatatttgtaaaacttttgggctcatctctgagaattgctgtgattctgaaacttgataatatctcaaatagagaacagtttcagtgaaaaatagcacttgagaataaatcagatgttcccaagaaagaagatctgagaatggtaaagtgccactgacaaataaattatttacatacttacatattaccttggcaaacacaagagacattcaagttaaagcacggtgcttgacaatactatattgaatgcaataaaagttggatttcattcatatgtacaacaaactactttcttcttcacttcaagattcggtacaactgttcctgaattccaactctccatacatcccaatgtcagggtccctgtagctcggagcccttatccaggtagatgaactgctgcccagtgaacactatgtacaaagcaatttgagcaccattctcttttctggcagtgaggtaaaatcaggtctttttggaaggggagaagccacattgcatctctgctacacacaagattactctgtcattgcctttgagtctttcacgctcccttcttctgaagcatcagtttttatggaaacttatcacacctgtcttgtgggcacatcttgctccatccctcctctcttcatattgtccgttttccggtattgagttagggaaagtatgcaggtattcctgtcattcctgactgaggctgttgtatctgtcaaaagagaggagaggtagggggcattctgaaaaatgatcactcatggcttgcaggagcaagagccagacaggactttgcaactggcagctttctgagtgcataagacctccacctctagactagctcttcagtcatggttagccccttcagtccattatcctccaatacaatgcccatgccttctggggctttcagctaagttttgtttaaaaaatgtgggttttttttttgccaattcattaaggcttttccctttgttttctcctgttggtggttcagagttaaattcagtatgaataagagagggaaatatacaacactgaatttggaggagaaaatgaaggttctaagtagaattgaagctggacgatcacttaaaagtgtaatggatgaatttggaatcagtaagtcaacattttatgacattaaaaaaaataagaagttaattctggactttgtactgaagcaggacatgccattagtaggggctgagaagagaaagaggacaacgggagccaaatatggtgatgtagatgatgcggtctacatgtggtaccaacagaaacgctcagccggtgttccggtaagaggcgtggagcttcaggctgctgcagagagatttgcacggtgttttgggcgaacagatttcaaagctagcactggttggctttttagatttcgaaatcggcatgcaattgggaaccgaaaaggatgtggggaacaagtcctaagttcagtttctgaaaatgttgagccatttcgacaaaaactgtccatgataatcaaagaggagaaactgtgtctagctcagctatacagtggggatgaaacagacctcttttggaagtcaatgccagaaaattctcaggcaagtaggaaagatatctgcctaccagggaagaaaataaacaaagaaaggttgtctgcctttttatgtgcaaatgcagacggaactcataaattaaagtcaatcattattggaaaatcaaaactgcccaaaagtgtgaaagaggacacaagtacattgcctgtgatatataaacccagtaaagatgtttggttcaccagagaattgttttcagaatggttttttcaaaactttgttcctgaggtccgacattttcaacttaatgttctaagatttcatgacgaggacgtcagggcattgttacttctggacagttgcccggctcatccttcctctgaatccctaaccagtgaggatggtcgaataaaatgtatgttcttcccccataacacttcaaccttgattcaaccaatgaatcaaggtgtgatcttgagctgcaaacggctgtatagatggaagcaacttgaagagagtcttgtaatatttgaagaaagtgatgatgagcaagagaaaggagataaaggagtttccaaaattaaaatctacaatataaaaagtgcaatttttaactgggcaaaaagttgggaagaagtaaaacaaataaccatagcaaatgcatgggaaaatcttctttacaaaaaggaacctgaatatgattttcaaggcttagaacatggggattatagagaaattcttgaaaaatgtggggagttggaaactaagttggatgatgatagggtgtggttaaatggagatgaagaaaagggttgtctcctaaaaaccaaaggtggaataacaaaggaagttgttcaaaaaggaggagaagctgagaagcagactgctgaatttaaattatctgctgtaagagagagtttggactaccttcttgactttgttgatgccacacctgagtttcagagattccacttcacactgaaagagatgcaacaagaaatagtcaagaaacagttccagagtaaaatccattctagaattggtagctttttgaaacctaggcctcataatattaaggactccttcagtgggccttcaacttctggttctaatcattagattttgtgtttaaagatttctgccattatatgatgtaggccagctgtgaattgtcttgttttagcaactgacattattttgtatatcagtgcccatttatataatggttataaaatttacagtttgaaaataa

SEQ ID NO: 191338 - DNA, 555 bp, Homo sapiens
  Payload ID: 17796
  Gene Name: tigger transposable element derived 7
  ENST ID: ENST00000573608
  CDS Start-End: 208-555
cggccgccgccgctccagcggctccagggtcgaagccataggggaagccgcttctcggttacctcggccagcttggcttccgtggaggccgctcctcgctttctgaggctcaaacgcaagccaccgcccgaaaggccgccgatctgaggagcgcaaccgccagcccaccgctggcctaccgcagccctgtccagagttaaattcagtatgaataagagagggaaatatacaacactgaatttggaggagaaaatgaaggttctaagtagaattgaagctggacgatcacttaaaagtgtaatggatgaatttggaatcagtaagtcaacattttatgacattaaaaaaaataagaagttaattctggactttgtactgaagcaggacatgccattagtaggggctgagaagagaaagaggacaacgggagccaaatatggtgatgtagatgatgcggtctacatgtggtaccaacagaaacgctcagccggtgttccggtaagaggcgtggagcttcaggctgctgcagagagatttgcacggtgttttgggcga

SEQ ID NO: 191339 - DNA, 2720 bp, Homo sapiens
  Payload ID: 17797
  Gene Name: tight junction associated protein 1 (peripheral)
  Uniprot ID: Q5JTD0
  ENST ID: ENST00000259751
  CDS Start-End: 379-2022
acccggcctgccccgcggcaagatggcggcctgaacgcagctggcagcggcggaaagcttagatcagcctttccacagctgttagcagcatctgccccaatttcagctgaagattcaggtgccccagggactggaagaaattacagtgcctacttggaaagaagaagagatagcgacttgccccagtccaaccccagagcgggagctgtggctaaaggaagtggaggggccgtgggatgcggagagccgagggctaactcccggacagcggaacagagagagctgccgacaaacagacgtccagagtccttctggccacatctctgagcctgcctccttcttgcttctcagcaggcggaggagccgtcacctcccagaatgactagtgccgcccctgctaagaaaccctaccgtaaggcaccaccagagcatcgggagctgcgtttggaaattcctggatcccggcttgagcaggaggaacccctgactgatgcagaaaggatgaagctcttacaggaggagaatgaagagcttcgccggcgcctggcctccgccaccagacgcactgaggccctggaacgtgagctggaaattgggcaggactgcctggagctggagctgggccagagccgcgaggagctggacaaatttaaggataagttccgcaggctgcagaacagctacacggcttcccagcggaccaaccaggagttggaggacaagctgcacacactgatcaagaaggctgagatggataggaagacgctggactgggagattgtggagctgaccaacaagctgctggatgccaagaacaccatcaacaagctggaagagctcaatgagcggtaccggctggactgcaacctggctgtacagctcctcaagtgcaacaagtcccacttccgaaaccacaagtttgccgatctgccctgtgagctacaggacatggttcggaaacatttgcacagtggtcaagaggccgccagcccaggtcctgctcccagcctagccccaggggctgtggtgcctacctcagtcattgcccgagtgttagagaagccggagtctctactgctcaattcagcccagtcaggcagcgccgggcgccccttggctgaggatgtctttgtgcatgtggacatgagtgagggtgtcccaggtgatccagccagtcccccggcccctggcagccccaccccacaacccaatggggagtgccactctctgggtactgccaggggctccccggaggaagagctgcccctgccagcctttgagaagctgaacccctacccaaccccgtctccaccacacccactgtatcctggccgcagggtaatagagttctctgaggataaggttcggatcccccgcaacagccccctgcccaactgcacttacgctacccgccaggccatttccctgagcctggtagaggaggggagtgagcgggcccgccccagcccagtgcccagcacccctgcctcagcccaggcctcaccccaccaccagcccagcccagcacccctaacactcagtgccccagctagctctgccagctctgaagaggacctgctggtcagctggcagcgggcatttgtggaccgtactccaccacctgctgctgtggcccagcgcacagcctttggacgcgatgccctccctgagctgcagcgccattttgcccatagccccgctgacagagatgaggtggtccaggcaccttctgcccgacccgaagagagtgagcttttgctacccacagaacctgactctggctttcccagggaggaagaagagctgaacctgcctatcagtcctgaggaagagcgccagagcctgctgcccattaacaggggcacagaggaggggccaggcacttcccacaccgagggcagggcctggccactccccagctccagtcgcccccagcgcagccccaagaggatgggggttcaccacctgcaccgcaaggacagcctgacccaggcccaggagcagggcaacctgctcaactagggcccctgctggccttcctgccattgctgcaccaggactgcaaggagtccccacaccttggcagctcagggtccccagtccaagcccttgacctctcctctatccagacccgcacagctgtttcctgtgtggatggggtcaggttgtgggccatgccaggcctgtcagctgcgttgactgactgcagcagcttgcctcatggttttccctttttcttagaatatttattcttcagaggtaacatgcagttgggtctcaagacctttcctccaatcagcccaacccagcccagactgggcttttctggggagctgaggagtttatcagtattcatcttccatcctttcatagtcacaagttttgttattttgtttttttttgggggtgatggtgtaattgttaacctcatttccgtttcctacctgtttgcttccccccccagtcctccgcatgagctgttgccctccaggggcctggcacagctggccttggggacgagggagaggactgattcagggccccctcagctgtctcctccctccctctggaaaggagggtggggctcaggggcctcaagctgggctctgtgtgaggcctggcccccactcccaaccttggctctagactgttactcttaagctttgagaaattttcacattgatgactattttaaaatcaaataaaactattttactggt

SEQ ID NO: 191340 - DNA, 2778 bp, Homo sapiens
  Payload ID: 17797
  Gene Name: tight junction associated protein 1 (peripheral)
  Uniprot ID: Q5JTD0
  ENST ID: ENST00000372444
  CDS Start-End: 434-2077
agatgacgcgacacgccaagtgcgtggggattcccgcggccctggccactacccggcctgccccgcggcaagatggcggcctgaacgcagctggcagcggcggaaagcttagatcagcctttccacagctgttagcagcatctgccccaatttcagctgaagattcaggtgccccagggactggaagaaattacagtgcctacttggaaagaagaagagatagcgacttgccccagtccaaccccagagcgggtacctgctgtcactgactcctgaattcattctcgctgtgtgtctacttttgcttttttggagctgtggctaaaggaagtggaggggccgtgggatgcggagagccgagggctaactcccggacagcggaacagagagagctgccgacaaacagacggcggaggagccgtcacctcccagaatgactagtgccgcccctgctaagaaaccctaccgtaaggcaccaccagagcatcgggagctgcgtttggaaattcctggatcccggcttgagcaggaggaacccctgactgatgcagaaaggatgaagctcttacaggaggagaatgaagagcttcgccggcgcctggcctccgccaccagacgcactgaggccctggaacgtgagctggaaattgggcaggactgcctggagctggagctgggccagagccgcgaggagctggacaaatttaaggataagttccgcaggctgcagaacagctacacggcttcccagcggaccaaccaggagttggaggacaagctgcacacactgatcaagaaggctgagatggataggaagacgctggactgggagattgtggagctgaccaacaagctgctggatgccaagaacaccatcaacaagctggaagagctcaatgagcggtaccggctggactgcaacctggctgtacagctcctcaagtgcaacaagtcccacttccgaaaccacaagtttgccgatctgccctgtgagctacaggacatggttcggaaacatttgcacagtggtcaagaggccgccagcccaggtcctgctcccagcctagccccaggggctgtggtgcctacctcagtcattgcccgagtgttagagaagccggagtctctactgctcaattcagcccagtcaggcagcgccgggcgccccttggctgaggatgtctttgtgcatgtggacatgagtgagggtgtcccaggtgatccagccagtcccccggcccctggcagccccaccccacaacccaatggggagtgccactctctgggtactgccaggggctccccggaggaagagctgcccctgccagcctttgagaagctgaacccctacccaaccccgtctccaccacacccactgtatcctggccgcagggtaatagagttctctgaggataaggttcggatcccccgcaacagccccctgcccaactgcacttacgctacccgccaggccatttccctgagcctggtagaggaggggagtgagcgggcccgccccagcccagtgcccagcacccctgcctcagcccaggcctcaccccaccaccagcccagcccagcacccctaacactcagtgccccagctagctctgccagctctgaagaggacctgctggtcagctggcagcgggcatttgtggaccgtactccaccacctgctgctgtggcccagcgcacagcctttggacgcgatgccctccctgagctgcagcgccattttgcccatagccccgctgacagagatgaggtggtccaggcaccttctgcccgacccgaagagagtgagcttttgctacccacagaacctgactctggctttcccagggaggaagaagagctgaacctgcctatcagtcctgaggaagagcgccagagcctgctgcccattaacaggggcacagaggaggggccaggcacttcccacaccgagggcagggcctggccactccccagctccagtcgcccccagcgcagccccaagaggatgggggttcaccacctgcaccgcaaggacagcctgacccaggcccaggagcagggcaacctgctcaactagggcccctgctggccttcctgccattgctgcaccaggactgcaaggagtccccacaccttggcagctcagggtccccagtccaagcccttgacctctcctctatccagacccgcacagctgtttcctgtgtggatggggtcaggttgtgggccatgccaggcctgtcagctgcgttgactgactgcagcagcttgcctcatggttttccctttttcttagaatatttattcttcagaggtaacatgcagttgggtctcaagacctttcctccaatcagcccaacccagcccagactgggcttttctggggagctgaggagtttatcagtattcatcttccatcctttcatagtcacaagttttgttattttgtttttttttgggggtgatggtgtaattgttaacctcatttccgtttcctacctgtttgcttccccccccagtcctccgcatgagctgttgccctccaggggcctggcacagctggccttggggacgagggagaggactgattcagggccccctcagctgtctcctccctccctctggaaaggagggtggggctcaggggcctcaagctgggctctgtgtgaggcctggcccccactcccaaccttggctctagactgttactcttaagctttgagaaattttcacattgatgactattttaaaatcaaataaaactattttactggtatg

SEQ ID NO: 191341 - DNA, 2751 bp, Homo sapiens
  Payload ID: 17797
  Gene Name: tight junction associated protein 1 (peripheral)
  Uniprot ID: Q5JTD0
  ENST ID: ENST00000372445
  CDS Start-End: 377-2050
agatgacgcgacacgccaagtgcgtggggattcccgcggccctggccactacccggcctgccccgcggcaagatggcggcctgaacgcagctggcagcggcggaaagcttagatcagcctttccacagctgttagcagcatctgccccaatttcagctgaagattcaggtgccccagggactggaagaaattacagtgcctacttggaaagaagaagagatagcgacttgccccagtccaaccccagagcgggagctgtggctaaaggaagtggaggggccgtgggatgcggagagccgagggctaactcccggacagcggaacagagagagctgccgacaaacagacgcaggcggaggagccgtcacctcccagaatgactagtgccgcccctgctaagaaaccctaccgtaaggcaccaccagagcatcgggagctgcgtttggaaattcctggatcccggcttgagcaggaggaacccctgactgatgcagaaaggatgaagctcttacaggaggagaatgaagagcttcgccggcgcctggcctccgccaccagacgcactgaggccctggaacgtgagctggaaattgggcaggactgcctggagctggagctgggccagagccgcgaggagctggacaaatttaaggataagttccgcaggctgcagaacagctacacggcttcccagcggaccaaccaggagttggaggacaagctgcacacactggcctctcttagccacagctggatttttgcaatcaagaaggctgagatggataggaagacgctggactgggagattgtggagctgaccaacaagctgctggatgccaagaacaccatcaacaagctggaagagctcaatgagcggtaccggctggactgcaacctggctgtacagctcctcaagtgcaacaagtcccacttccgaaaccacaagtttgccgatctgccctgtgagctacaggacatggttcggaaacatttgcacagtggtcaagaggccgccagcccaggtcctgctcccagcctagccccaggggctgtggtgcctacctcagtcattgcccgagtgttagagaagccggagtctctactgctcaattcagcccagtcaggcagcgccgggcgccccttggctgaggatgtctttgtgcatgtggacatgagtgagggtgtcccaggtgatccagccagtcccccggcccctggcagccccaccccacaacccaatggggagtgccactctctgggtactgccaggggctccccggaggaagagctgcccctgccagcctttgagaagctgaacccctacccaaccccgtctccaccacacccactgtatcctggccgcagggtaatagagttctctgaggataaggttcggatcccccgcaacagccccctgcccaactgcacttacgctacccgccaggccatttccctgagcctggtagaggaggggagtgagcgggcccgccccagcccagtgcccagcacccctgcctcagcccaggcctcaccccaccaccagcccagcccagcacccctaacactcagtgccccagctagctctgccagctctgaagaggacctgctggtcagctggcagcgggcatttgtggaccgtactccaccacctgctgctgtggcccagcgcacagcctttggacgcgatgccctccctgagctgcagcgccattttgcccatagccccgctgacagagatgaggtggtccaggcaccttctgcccgacccgaagagagtgagcttttgctacccacagaacctgactctggctttcccagggaggaagaagagctgaacctgcctatcagtcctgaggaagagcgccagagcctgctgcccattaacaggggcacagaggaggggccaggcacttcccacaccgagggcagggcctggccactccccagctccagtcgcccccagcgcagccccaagaggatgggggttcaccacctgcaccgcaaggacagcctgacccaggcccaggagcagggcaacctgctcaactagggcccctgctggccttcctgccattgctgcaccaggactgcaaggagtccccacaccttggcagctcagggtccccagtccaagcccttgacctctcctctatccagacccgcacagctgtttcctgtgtggatggggtcaggttgtgggccatgccaggcctgtcagctgcgttgactgactgcagcagcttgcctcatggttttccctttttcttagaatatttattcttcagaggtaacatgcagttgggtctcaagacctttcctccaatcagcccaacccagcccagactgggcttttctggggagctgaggagtttatcagtattcatcttccatcctttcatagtcacaagttttgttattttgtttttttttgggggtgatggtgtaattgttaacctcatttccgtttcctacctgtttgcttccccccccagtcctccgcatgagctgttgccctccaggggcctggcacagctggccttggggacgagggagaggactgattcagggccccctcagctgtctcctccctccctctggaaaggagggtggggctcaggggcctcaagctgggctctgtgtgaggcctggcccccactcccaaccttggctctagactgttactcttaagctttgagaaattttcacattgatgactattttaaaatcaaataaaactattttactggtatg

SEQ ID NO: 191342 - DNA, 2695 bp, Homo sapiens
  Payload ID: 17797
  Gene Name: tight junction associated protein 1 (peripheral)
  Uniprot ID: Q5JTD0
  ENST ID: ENST00000372449
  CDS Start-End: 324-1997
acccggcctgccccgcggcaagatggcggcctgaacgcagctggcagcggcggaaagcttagatcagcctttccacagctgttagcagcatctgccccaatttcagctgaagattcaggtgccccagggactggaagaaattacagtgcctacttggaaagaagaagagatagcgacttgccccagtccaaccccagagcgggagctgtggctaaaggaagtggaggggccgtgggatgcggagagccgagggctaactcccggacagcggaacagagagagctgccgacaaacagacggcggaggagccgtcacctcccagaatgactagtgccgcccctgctaagaaaccctaccgtaaggcaccaccagagcatcgggagctgcgtttggaaattcctggatcccggcttgagcaggaggaacccctgactgatgcagaaaggatgaagctcttacaggaggagaatgaagagcttcgccggcgcctggcctccgccaccagacgcactgaggccctggaacgtgagctggaaattgggcaggactgcctggagctggagctgggccagagccgcgaggagctggacaaatttaaggataagttccgcaggctgcagaacagctacacggcttcccagcggaccaaccaggagttggaggacaagctgcacacactggcctctcttagccacagctggatttttgcaatcaagaaggctgagatggataggaagacgctggactgggagattgtggagctgaccaacaagctgctggatgccaagaacaccatcaacaagctggaagagctcaatgagcggtaccggctggactgcaacctggctgtacagctcctcaagtgcaacaagtcccacttccgaaaccacaagtttgccgatctgccctgtgagctacaggacatggttcggaaacatttgcacagtggtcaagaggccgccagcccaggtcctgctcccagcctagccccaggggctgtggtgcctacctcagtcattgcccgagtgttagagaagccggagtctctactgctcaattcagcccagtcaggcagcgccgggcgccccttggctgaggatgtctttgtgcatgtggacatgagtgagggtgtcccaggtgatccagccagtcccccggcccctggcagccccaccccacaacccaatggggagtgccactctctgggtactgccaggggctccccggaggaagagctgcccctgccagcctttgagaagctgaacccctacccaaccccgtctccaccacacccactgtatcctggccgcagggtaatagagttctctgaggataaggttcggatcccccgcaacagccccctgcccaactgcacttacgctacccgccaggccatttccctgagcctggtagaggaggggagtgagcgggcccgccccagcccagtgcccagcacccctgcctcagcccaggcctcaccccaccaccagcccagcccagcacccctaacactcagtgccccagctagctctgccagctctgaagaggacctgctggtcagctggcagcgggcatttgtggaccgtactccaccacctgctgctgtggcccagcgcacagcctttggacgcgatgccctccctgagctgcagcgccattttgcccatagccccgctgacagagatgaggtggtccaggcaccttctgcccgacccgaagagagtgagcttttgctacccacagaacctgactctggctttcccagggaggaagaagagctgaacctgcctatcagtcctgaggaagagcgccagagcctgctgcccattaacaggggcacagaggaggggccaggcacttcccacaccgagggcagggcctggccactccccagctccagtcgcccccagcgcagccccaagaggatgggggttcaccacctgcaccgcaaggacagcctgacccaggcccaggagcagggcaacctgctcaactagggcccctgctggccttcctgccattgctgcaccaggactgcaaggagtccccacaccttggcagctcagggtccccagtccaagcccttgacctctcctctatccagacccgcacagctgtttcctgtgtggatggggtcaggttgtgggccatgccaggcctgtcagctgcgttgactgactgcagcagcttgcctcatggttttccctttttcttagaatatttattcttcagaggtaacatgcagttgggtctcaagacctttcctccaatcagcccaacccagcccagactgggcttttctggggagctgaggagtttatcagtattcatcttccatcctttcatagtcacaagttttgttattttgtttttttttgggggtgatggtgtaattgttaacctcatttccgtttcctacctgtttgcttccccccccagtcctccgcatgagctgttgccctccaggggcctggcacagctggccttggggacgagggagaggactgattcagggccccctcagctgtctcctccctccctctggaaaggagggtggggctcaggggcctcaagctgggctctgtgtgaggcctggcccccactcccaaccttggctctagactgttactcttaagctttgagaaattttcacattgatgactattttaaaatcaaataaaactattttactggt

SEQ ID NO: 191343 - DNA, 2665 bp, Homo sapiens
  Payload ID: 17797
  Gene Name: tight junction associated protein 1 (peripheral)
  Uniprot ID: Q5JTD0
  ENST ID: ENST00000372452
  CDS Start-End: 324-1967
acccggcctgccccgcggcaagatggcggcctgaacgcagctggcagcggcggaaagcttagatcagcctttccacagctgttagcagcatctgccccaatttcagctgaagattcaggtgccccagggactggaagaaattacagtgcctacttggaaagaagaagagatagcgacttgccccagtccaaccccagagcgggagctgtggctaaaggaagtggaggggccgtgggatgcggagagccgagggctaactcccggacagcggaacagagagagctgccgacaaacagacggcggaggagccgtcacctcccagaatgactagtgccgcccctgctaagaaaccctaccgtaaggcaccaccagagcatcgggagctgcgtttggaaattcctggatcccggcttgagcaggaggaacccctgactgatgcagaaaggatgaagctcttacaggaggagaatgaagagcttcgccggcgcctggcctccgccaccagacgcactgaggccctggaacgtgagctggaaattgggcaggactgcctggagctggagctgggccagagccgcgaggagctggacaaatttaaggataagttccgcaggctgcagaacagctacacggcttcccagcggaccaaccaggagttggaggacaagctgcacacactgatcaagaaggctgagatggataggaagacgctggactgggagattgtggagctgaccaacaagctgctggatgccaagaacaccatcaacaagctggaagagctcaatgagcggtaccggctggactgcaacctggctgtacagctcctcaagtgcaacaagtcccacttccgaaaccacaagtttgccgatctgccctgtgagctacaggacatggttcggaaacatttgcacagtggtcaagaggccgccagcccaggtcctgctcccagcctagccccaggggctgtggtgcctacctcagtcattgcccgagtgttagagaagccggagtctctactgctcaattcagcccagtcaggcagcgccgggcgccccttggctgaggatgtctttgtgcatgtggacatgagtgagggtgtcccaggtgatccagccagtcccccggcccctggcagccccaccccacaacccaatggggagtgccactctctgggtactgccaggggctccccggaggaagagctgcccctgccagcctttgagaagctgaacccctacccaaccccgtctccaccacacccactgtatcctggccgcagggtaatagagttctctgaggataaggttcggatcccccgcaacagccccctgcccaactgcacttacgctacccgccaggccatttccctgagcctggtagaggaggggagtgagcgggcccgccccagcccagtgcccagcacccctgcctcagcccaggcctcaccccaccaccagcccagcccagcacccctaacactcagtgccccagctagctctgccagctctgaagaggacctgctggtcagctggcagcgggcatttgtggaccgtactccaccacctgctgctgtggcccagcgcacagcctttggacgcgatgccctccctgagctgcagcgccattttgcccatagccccgctgacagagatgaggtggtccaggcaccttctgcccgacccgaagagagtgagcttttgctacccacagaacctgactctggctttcccagggaggaagaagagctgaacctgcctatcagtcctgaggaagagcgccagagcctgctgcccattaacaggggcacagaggaggggccaggcacttcccacaccgagggcagggcctggccactccccagctccagtcgcccccagcgcagccccaagaggatgggggttcaccacctgcaccgcaaggacagcctgacccaggcccaggagcagggcaacctgctcaactagggcccctgctggccttcctgccattgctgcaccaggactgcaaggagtccccacaccttggcagctcagggtccccagtccaagcccttgacctctcctctatccagacccgcacagctgtttcctgtgtggatggggtcaggttgtgggccatgccaggcctgtcagctgcgttgactgactgcagcagcttgcctcatggttttccctttttcttagaatatttattcttcagaggtaacatgcagttgggtctcaagacctttcctccaatcagcccaacccagcccagactgggcttttctggggagctgaggagtttatcagtattcatcttccatcctttcatagtcacaagttttgttattttgtttttttttgggggtgatggtgtaattgttaacctcatttccgtttcctacctgtttgcttccccccccagtcctccgcatgagctgttgccctccaggggcctggcacagctggccttggggacgagggagaggactgattcagggccccctcagctgtctcctccctccctctggaaaggagggtggggctcaggggcctcaagctgggctctgtgtgaggcctggcccccactcccaaccttggctctagactgttactcttaagctttgagaaattttcacattgatgactattttaaaatcaaataaaactattttactggt

SEQ ID NO: 191344 - DNA, 581 bp, Homo sapiens
  Payload ID: 17797
  Gene Name: tight junction associated protein 1 (peripheral)
  ENST ID: ENST00000372454
  CDS Start-End: 281-581
cactacccggcctgccccgcggcaagatggcggcctgaacgcagctggcagcggcggaaactgaagattcaggtgccccagggactggaagaaattacagtgcctacttggaaagaagaagagatagcgacttgccccagtccaaccccagagcgggagctgtggctaaaggaagtggaggggccgtgggatgcggagagccgagggctaactcccggacagcggaacagagagagctgccgacaaacagacgcaggcggaggagccgtcacctcccagaatgactagtgccgcccctgctaagaaaccctaccgtaaggcaccaccagagcatcgggagctgcgtttggaaattcctggatcccggcttgagcaggaggaacccctgactgatgcagaaaggatgaagctcttacaggaggagaatgaagagcttcgccggcgcctggcctccgccaccagacgcactgaggccctggaacgtgagctggaaattgggcaggactgcctggagctggagctgggccagagccgcgaggagctggacaaatttaaggataagttccgcaggctgcagaaca

SEQ ID NO: 191345 - DNA, 909 bp, Homo sapiens
  Payload ID: 17797
  Gene Name: tight junction associated protein 1 (peripheral)
  ENST ID: ENST00000442878
  CDS Start-End: 331-909
acccggcctgccccgcggcaagatggcggcctgaacgcagctggcagcggcggaaagtttgcttagatcagcctttccacagctgttagcagcatctgccccaatttcagctgaagattcaggtgccccagggactggaagaaattacagtgcctacttggaaagaagaagagatagcgacttgccccagtccaaccccagagcgggagctgtggctaaaggaagtggaggggccgtgggatgcggagagccgagggctaactcccggacagcggaacagagagagctgccgacaaacagacgcaggcggaggagccgtcacctcccagaatgactagtgccgcccctgctaagaaaccctaccgtaaggcaccaccagagcatcgggagctgcgtttggaaattcctggatcccggcttgagcaggaggaacccctgactgatgcagaaaggatgaagctcttacaggaggagaatgaagagcttcgccggcgcctggcctccgccaccagacgcactgaggccctggaacgtgagctggaaattgggcaggactgcctggagctggagctgggccagagccgcgaggagctggacaaatttaaggataagttccgcaggctgcagaacagctacacggcttcccagcggaccaaccaggagttggaggacaagctgcacacactggcctctcttagccacagctggatttttgcaatcaagaaggctgagatggataggaagacgctggactgggagattgtggagctgaccaacaagctgctggatgccaagaacaccatcaacaagctggaagagctcaatgagcggtaccggctggactgcaacctggctgtacagctcctcaagtgcaacaagtcccacttccgaaaccacaagtttgccgat

SEQ ID NO: 191346 - DNA, 3268 bp, Homo sapiens
  Payload ID: 17797
  Gene Name: tight junction associated protein 1 (peripheral)
  ENST ID: ENST00000454762
  CDS Start-End: 1-718
gctcttacaggaggagaatgaagagcttcgccggcgcctggcctccgccaccagacgcactgaggccctggaacgtgagctggaaattgggcaggactgcctggagctggagctgggccagagccgcgaggagctggacaaatttaaggataagttccgcaggctgcagaacagctacacggcttcccagcggaccaaccaggagttggaggacaagctgcacacactgatcaagaaggctgagatggataggaagacgctggactgggagattgtggagctgaccaacaagctgctggatgccaagaacaccatcaacaagctggaagagctcaatgagcggtaccggctggactgcaacctggctgtacagctcctcaagtgcaacaagtcccacttccgaaaccacaagtttgccgatgtgagtagaactcaccccctccctgcccacatagaccattccggccactgtaggactcctctaactccagtttctgcacctctctctgtcctcctcttcccactttgccctcctcttgcctccatgtcacctctcaagccagtcaactctgccactggttggtgtcccgtgtactgtccagggcccatcactagttctggggggccagccctgttggtttctgtaacagagacagagagagaagatcctgggcaggaaggagagggtagtcagagctatctgcccaaagagtactaagagaggattaggcccatctgatcatgttaccccaaggggtaaactctagaccccacagcttcaggcccaaggtttatgtggcctgcagaagtagaagaagtagaggtatttctttttttttttttttttgagacggagtcttgctctgtcacctaggctggagtgcagtggcacaatctcggctcactgcaacctccgcctcccggcttcaagcaattctcctgcttcagcctcccaagtagctggaattataggcgcccaccaccacgcctggctaatttttttgtctttttagtagagatggggtttcatcgtgttagccaggatggtctcgatctcctgacctcgtgatccacccgcctcggcctcccaaagtgctgggattacaggcatgagccactgtgcccggcccagaagtagaggtatttctaaggctactggtctatgcagattctccaaacttaagtatggtttgggcagaagctgggagatagaagtttgagaacatgctggctgcagcagcagatccgggtttaaatcttggccaagttaaccaaagctttgagttgtcttcccctctccaggcctatgtgtctgtgaagtgagggtatacacactggcatgctgtaagaacaggagatagcagagtgctgagtacacagaggtacttaaaggtgggagccattactttcgccatgagtcaagttatctttggctgcgatcattgatgtctctctttcctgctcttttacctcagctgccctgtgagctacaggacatggttcggaaacatttgcacagtggtcaagaggccgccagcccaggtcctgctcccagcctagccccaggggctgtggtgcctacctcagtcattgcccgagtgttagagaagccggagtctctactgctcaattcagcccagtcaggcagcgccgggcgccccttggctgaggatgtctttgtgcatgtggacatgagtgagggtgtcccaggtgatccagccagtcccccggcccctggcagccccaccccacaacccaatggggagtgccactctctgggtactgccaggggctccccggaggaagagctgcccctgccagcctttgagaagctgaacccctacccaaccccgtctccaccacacccactgtatcctggccgcagggtaatagagttctctgaggataaggttcggatcccccgcaacagccccctgcccaactgcacttacgctacccgccaggccatttccctgagcctggtagaggaggggagtgagcgggcccgccccagcccagtgcccagcacccctgcctcagcccaggcctcaccccaccaccagcccagcccagcacccctaacactcagtgccccagctagctctgccagctctgaagaggacctgctggtcagctggcagcgggcatttgtggaccgtactccaccacctgctgctgtggcccagcgcacagcctttggacgcgatgccctccctgagctgcagcgccattttgcccatagccccgctgacagagatgaggtggtccaggcaccttctgcccgacccgaagagagtgagcttttgctacccacagaacctgactctggctttcccagggaggaagaagagctgaacctgcctatcagtcctgaggaagagcgccagagcctgctgcccattaacaggggcacagaggaggggccaggcacttcccacaccgagggcagggcctggccactccccagctccagtcgcccccagcgcagccccaagaggatgggggttcaccacctgcaccgcaaggacagcctgacccaggcccaggagcagggcaacctgctcaactagggcccctgctggccttcctgccattgctgcaccaggactgcaaggagtccccacaccttggcagctcagggtccccagtccaagcccttgacctctcctctatccagacccgcacagctgtttcctgtgtggatggggtcaggttgtgggccatgccaggcctgtcagctgcgttgactgactgcagcagcttgcctcatggttttccctttttcttagaatatttattcttcagaggtaacatgcagttgggtctcaagacctttcctccaatcagcccaacccagcccagactgggcttttctggggagctgaggagtttatcagtattcatcttccatcctttcatagtcacaagttttgttattttgtttttttttgggggtgatggtgtaattgttaacctcatttccgtttcctacctgtttgcttccccccccagtcctccgcatgagctgttgccctccaggggcctggcacagctggccttggggacgagggagaggactgattcagggccccctcagctgtctcctccctccctctggaaaggagggtggggctcaggggcctcaagctgggctctgtgtgaggcctggcccccactcccaaccttggctctagactgttactcttaagctttgagaaattttcacattgatgactattttaaaatcaaataaaactattttactggt

SEQ ID NO: 191347 - DNA, 2572 bp, Homo sapiens
  Payload ID: 17797
  Gene Name: tight junction associated protein 1 (peripheral)
  Uniprot ID: Q5JTD0
  ENST ID: ENST00000436109
  CDS Start-End: 228-1871
agatgacgcgacacgccaagtgcgtggggattcccgcggccctggccactacccggcctgccccgcggcaagatggcggcctgaacgcagctggcagcggcggaaagagctgtggctaaaggaagtggaggggccgtgggatgcggagagccgagggctaactcccggacagcggaacagagagagctgccgacaaacagacggcggaggagccgtcacctcccagaatgactagtgccgcccctgctaagaaaccctaccgtaaggcaccaccagagcatcgggagctgcgtttggaaattcctggatcccggcttgagcaggaggaacccctgactgatgcagaaaggatgaagctcttacaggaggagaatgaagagcttcgccggcgcctggcctccgccaccagacgcactgaggccctggaacgtgagctggaaattgggcaggactgcctggagctggagctgggccagagccgcgaggagctggacaaatttaaggataagttccgcaggctgcagaacagctacacggcttcccagcggaccaaccaggagttggaggacaagctgcacacactgatcaagaaggctgagatggataggaagacgctggactgggagattgtggagctgaccaacaagctgctggatgccaagaacaccatcaacaagctggaagagctcaatgagcggtaccggctggactgcaacctggctgtacagctcctcaagtgcaacaagtcccacttccgaaaccacaagtttgccgatctgccctgtgagctacaggacatggttcggaaacatttgcacagtggtcaagaggccgccagcccaggtcctgctcccagcctagccccaggggctgtggtgcctacctcagtcattgcccgagtgttagagaagccggagtctctactgctcaattcagcccagtcaggcagcgccgggcgccccttggctgaggatgtctttgtgcatgtggacatgagtgagggtgtcccaggtgatccagccagtcccccggcccctggcagccccaccccacaacccaatggggagtgccactctctgggtactgccaggggctccccggaggaagagctgcccctgccagcctttgagaagctgaacccctacccaaccccgtctccaccacacccactgtatcctggccgcagggtaatagagttctctgaggataaggttcggatcccccgcaacagccccctgcccaactgcacttacgctacccgccaggccatttccctgagcctggtagaggaggggagtgagcgggcccgccccagcccagtgcccagcacccctgcctcagcccaggcctcaccccaccaccagcccagcccagcacccctaacactcagtgccccagctagctctgccagctctgaagaggacctgctggtcagctggcagcgggcatttgtggaccgtactccaccacctgctgctgtggcccagcgcacagcctttggacgcgatgccctccctgagctgcagcgccattttgcccatagccccgctgacagagatgaggtggtccaggcaccttctgcccgacccgaagagagtgagcttttgctacccacagaacctgactctggctttcccagggaggaagaagagctgaacctgcctatcagtcctgaggaagagcgccagagcctgctgcccattaacaggggcacagaggaggggccaggcacttcccacaccgagggcagggcctggccactccccagctccagtcgcccccagcgcagccccaagaggatgggggttcaccacctgcaccgcaaggacagcctgacccaggcccaggagcagggcaacctgctcaactagggcccctgctggccttcctgccattgctgcaccaggactgcaaggagtccccacaccttggcagctcagggtccccagtccaagcccttgacctctcctctatccagacccgcacagctgtttcctgtgtggatggggtcaggttgtgggccatgccaggcctgtcagctgcgttgactgactgcagcagcttgcctcatggttttccctttttcttagaatatttattcttcagaggtaacatgcagttgggtctcaagacctttcctccaatcagcccaacccagcccagactgggcttttctggggagctgaggagtttatcagtattcatcttccatcctttcatagtcacaagttttgttattttgtttttttttgggggtgatggtgtaattgttaacctcatttccgtttcctacctgtttgcttccccccccagtcctccgcatgagctgttgccctccaggggcctggcacagctggccttggggacgagggagaggactgattcagggccccctcagctgtctcctccctccctctggaaaggagggtggggctcaggggcctcaagctgggctctgtgtgaggcctggcccccactcccaaccttggctctagactgttactcttaagctttgagaaattttcacattgatgactattttaaaatcaaataaaactattttactggtatg

SEQ ID NO: 191348 - DNA, 2716 bp, Homo sapiens
  Payload ID: 17797
  Gene Name: tight junction associated protein 1 (peripheral)
  Uniprot ID: Q5JTD0
  ENST ID: ENST00000438588
  CDS Start-End: 342-2015
agctttcagagtcctggtgcagcctggcagcagtgtttggggaacaggcgagatagaggagctgagccccttctccaacagccgtcctctctttctgttgaccaaccagagaggctttttgcctgaggtcagcaagctggcctccctggttggcagggggagtgcttggcttccatctggcatggtttccggatgggagaaagcccctgagggtctggtggagctgtggctaaaggaagtggaggggccgtgggatgcggagagccgagggctaactcccggacagcggaacagagagagctgccgacaaacagacggcggaggagccgtcacctcccagaatgactagtgccgcccctgctaagaaaccctaccgtaaggcaccaccagagcatcgggagctgcgtttggaaattcctggatcccggcttgagcaggaggaacccctgactgatgcagaaaggatgaagctcttacaggaggagaatgaagagcttcgccggcgcctggcctccgccaccagacgcactgaggccctggaacgtgagctggaaattgggcaggactgcctggagctggagctgggccagagccgcgaggagctggacaaatttaaggataagttccgcaggctgcagaacagctacacggcttcccagcggaccaaccaggagttggaggacaagctgcacacactggcctctcttagccacagctggatttttgcaatcaagaaggctgagatggataggaagacgctggactgggagattgtggagctgaccaacaagctgctggatgccaagaacaccatcaacaagctggaagagctcaatgagcggtaccggctggactgcaacctggctgtacagctcctcaagtgcaacaagtcccacttccgaaaccacaagtttgccgatctgccctgtgagctacaggacatggttcggaaacatttgcacagtggtcaagaggccgccagcccaggtcctgctcccagcctagccccaggggctgtggtgcctacctcagtcattgcccgagtgttagagaagccggagtctctactgctcaattcagcccagtcaggcagcgccgggcgccccttggctgaggatgtctttgtgcatgtggacatgagtgagggtgtcccaggtgatccagccagtcccccggcccctggcagccccaccccacaacccaatggggagtgccactctctgggtactgccaggggctccccggaggaagagctgcccctgccagcctttgagaagctgaacccctacccaaccccgtctccaccacacccactgtatcctggccgcagggtaatagagttctctgaggataaggttcggatcccccgcaacagccccctgcccaactgcacttacgctacccgccaggccatttccctgagcctggtagaggaggggagtgagcgggcccgccccagcccagtgcccagcacccctgcctcagcccaggcctcaccccaccaccagcccagcccagcacccctaacactcagtgccccagctagctctgccagctctgaagaggacctgctggtcagctggcagcgggcatttgtggaccgtactccaccacctgctgctgtggcccagcgcacagcctttggacgcgatgccctccctgagctgcagcgccattttgcccatagccccgctgacagagatgaggtggtccaggcaccttctgcccgacccgaagagagtgagcttttgctacccacagaacctgactctggctttcccagggaggaagaagagctgaacctgcctatcagtcctgaggaagagcgccagagcctgctgcccattaacaggggcacagaggaggggccaggcacttcccacaccgagggcagggcctggccactccccagctccagtcgcccccagcgcagccccaagaggatgggggttcaccacctgcaccgcaaggacagcctgacccaggcccaggagcagggcaacctgctcaactagggcccctgctggccttcctgccattgctgcaccaggactgcaaggagtccccacaccttggcagctcagggtccccagtccaagcccttgacctctcctctatccagacccgcacagctgtttcctgtgtggatggggtcaggttgtgggccatgccaggcctgtcagctgcgttgactgactgcagcagcttgcctcatggttttccctttttcttagaatatttattcttcagaggtaacatgcagttgggtctcaagacctttcctccaatcagcccaacccagcccagactgggcttttctggggagctgaggagtttatcagtattcatcttccatcctttcatagtcacaagttttgttattttgtttttttttgggggtgatggtgtaattgttaacctcatttccgtttcctacctgtttgcttccccccccagtcctccgcatgagctgttgccctccaggggcctggcacagctggccttggggacgagggagaggactgattcagggccccctcagctgtctcctccctccctctggaaaggagggtggggctcaggggcctcaagctgggctctgtgtgaggcctggcccccactcccaaccttggctctagactgttactcttaagctttgagaaattttcacattgatgactattttaaaatcaaataaaactattttactggtatg

SEQ ID NO: 191349 - DNA, 4312 bp, Homo sapiens
  Payload ID: 17797
  Gene Name: tight junction associated protein 1 (peripheral)
  Uniprot ID: Q5JTD0
  ENST ID: ENST00000612912
  CDS Start-End: 1015-1146
ggcattacacagggccccacagtgtcagtgctgagcctggagcccaggtgtctccaactcccccgactggggttttcttcacgagtgttcctcagccttggcactctggatattttctattgggaatcatttgtggtgggagttgccctatggttgtgggatgaccaaagcatccccggcttctacccactaggtgccagtggcactccttccctccaggtttcgacaaccaaaaatgtctccagacacttgccagacgtccctggggaaggagagtgggcgccagacgtccctggggaaggagggtggacagagttgcctggttgagagctactgctctgtgttgctcccttttcagatttcttctcctagccctatgcctcctcattgcaaaggccggtgaccatcattatacaccaaatagccttgggcctccttctggaaatgctaggtgctctctttccatcattttctctatcttcttggatctctgtgaggctttttcctggtgttctcatttgtaacccatgttccccaaatctcttagttgtttccaaactctgagaggcttgggagatgaggaccgatgtggagtagggacaggacggaaccggacctattccagaattgggcaatgtgctgagaccatgaacacacagacacatgtatctcatctgggcctgtgacagtactgtcatggagaaaggcaggaacccagtgcttccagtcatctgcctccagccgctttcccctcaggccctctgtttcatggccttcctgccgtggttctccctggggggccttccaggtcccagactgggcagcaggcctgtagcactgacagacaggcggctgacacctggtttccactttcttcccttctctggtttcaggagctgtggctaaaggaagtggaggggccgtgggatgcggagagccgagggctaactcccggacagcggaacagagagagctgccgacaaacagacggcggaggagccgtcacctcccagaatgactagtgccgcccctgctaagaaaccctaccgtaaggcaccaccagagcatcgggagctgcgtttggaaattcctggatcccggcttgagcaggaggaacccctgactgatgcagaaaggatgaagtgagtatctgctacctgagatactgccctgcctcaactctgtccctcttagctccaggctagactgttggtacagttggactttcccttggattaggtagaaataaaggttgggatgggttgttttagggactctgggaggagtgttgatgttgtggatattttttctggaaaatgggattttattgttccatgggcttcaagagagcgtagaatcaggaggcgaatggctctgagggccctgctcttcttgctaaggagcccttccccagctcctggctcctgtaccagctgccacccttacagccctttagccacatgaggcctctggagaggagggcagtgctgggctggatttccaagagatgaataatggagaagcctgattgtgcagtggggaaactggagctgggggcttggtggccagctgacatgggctgtaaccagagacaggctgggagccatatccctacccccaattctttatttctattctccgatagtgaagggaggctggactgtcccctaccatcccctcttcctcccctgaccctccaacccaggctgtgttcccagggccagcaggcctatgaaatatgctgccttagactcagactaagactccaggagtttccctgtcctgtttgcctgtcctcatgtcatcccttccttcctgagcccactctggagctccagggcatgcccttctatctctcatacccctctgcccttgatcccacaacaccctgccaggctcttacaggaggagaatgaagagcttcgccggcgcctggcctccgccaccagacgcactgaggccctggaacgtgagctggaaattgggcaggactgcctggagctggagctgggccagagccgcgaggagctggacaaatttaaggataagttccgcaggctgcagaacagctacacggcttcccagcggaccaaccaggagttggaggacaagctgcacacactggcctctcttagccacagctggatttttgcaatcaagaaggctgagatggataggaagacgctggactgggagattgtggagctgaccaacaagctgctggatgccaagaacaccatcaacaagctggaagagctcaatgagcggtaccggctggactgcaacctggctgtacagctcctcaagtgcaacaagtcccacttccgaaaccacaagtttgccgatgtgagtagaactcaccccctccctgcccacatagaccattccggccactgtaggactcctctaactccagtttctgcacctctctctgtcctcctcttcccactttgccctcctcttgcctccatgtcacctctcaagccagtcaactctgccactggttggtgtcccgtgtactgtccagggcccatcactagttctggggggccagccctgttggtttctgtaacagagacagagagagaagatcctgggcaggaaggagagggtagtcagagctatctgcccaaagagtactaagagaggattaggcccatctgatcatgttaccccaaggggtaaactctagaccccacagcttcaggcccaaggtttatgtggcctgcagaagtagaagaagtagaggtatttctttttttttttttttttgagacggagtcttgctctgtcacctaggctggagtgcagtggcacaatctcggctcactgcaacctccgcctcccggcttcaagcaattctcctgcttcagcctcccaagtagctggaattataggcgcccaccaccacgcctggctaatttttttgtctttttagtagagatggggtttcatcgtgttagccaggatggtctcgatctcctgacctcgtgatccacccgcctcggcctcccaaagtgctgggattacaggcatgagccactgtgcccggcccagaagtagaggtatttctaaggctactggtctatgcagattctccaaacttaagtatggtttgggcagaagctgggagatagaagtttgagaacatgctggctgcagcagcagatccgggtttaaatcttggccaagttaaccaaagctttgagttgtcttcccctctccaggcctatgtgtctgtgaagtgagggtatacacactggcatgctgtaagaacaggagatagcagagtgctgagtacacagagctgccctgtgagctacaggacatggttcggaaacatttgcacagtggtcaagaggccgccagcccaggtcctgctcccagcctagccccaggggctgtggtgcctacctcagtcattgcccgagtgttagagaagccggagtctctactgctcaattcagcccagtcaggcagcgccgggcgccccttggctgaggatgtctttgtgcatgtggacatgagtgagggtgtcccaggtgatccagccagtcccccggcccctggcagccccaccccacaacccaatggggagtgccactctctgggtactgccaggggctccccggaggaagagctgcccctgccagcctttgagaagctgaacccctacccaaccccgtctccaccacacccactgtatcctggccgcagggtaatagagttctctgaggataaggttcggatcccccgcaacagccccctgcccaactgcacttacgctacccgccaggccatttccctgagcctggtagaggaggggagtgagcgggcccgccccagcccagtgcccagcacccctgcctcagcccaggcctcaccccaccaccagcccagcccagcacccctaacactcagtgccccagctagctctgccagctctgaagaggacctgctggtcagctggcagcgggcatttgtggaccgtactccaccacctgctgctgtggcccagcgcacagcctttggacgcgatgccctccctgagctgcagcgccattttgcccatagccccgctgacagagatgaggtggtccaggcaccttctgcccgacccgaagagagtgagcttttgctacccacagaacctgactctggctttcccagggaggaagaagagctgaacctgcctatcagtcctgaggcctggcccccactcccaaccttggctctagactgttactcttaagctttgagaaattttcacattgatgactattttaaaatcaaataaaactattttactggt

SEQ ID NO: 191350 - DNA, 7950 bp, Homo sapiens
  Payload ID: 17798
  Gene Name: tight junction protein 1
  Uniprot ID: Q07157
  ENST ID: ENST00000346128
  CDS Start-End: 476-5722
cgggcatgctcagtgggccgggccggcaggtttgcgtggccgctgagttgccggcgccggctgagccagcggacgccgcgttccttggcggccgccggttcccgggaagttacgtggcgaagccggcttccgaggagacgccgggaggccacgggtgctgctgacgggcgggcgaccgggcgaggccgacgtggccgggctgcgaaagctgcgggaggccgagtgggtggccgcgctcggagggaggtgccggtcgggcgcgccccgtggagaagacccgggcggggcgggcgcttcccggacttttgtccgagttgaattccctccccctgggccgggcccttccggccgcccccgcccgtgccccgctcgctctcgggagatgtttatttgggctgtggcgtgaggagcgggcgggccagcgccgcggagtttcgggtccgaggagcctcgcgcggcgctggagagagacaagatgtccgccagagctgcggccgccaagagcacagcaatggaggaaacagctatatgggaacaacatacagtgacgcttcacagggctcctggatttggatttggaattgcaatatctggtggacgagataatcctcattttcagagtggggaaacgtcaatagtgatttcagatgtgctgaaaggaggaccagctgaaggacagctacaggaaaatgaccgagttgcaatggttaacggagtttcaatggataatgttgaacatgcttttgctgttcagcaactaaggaaaagtgggaaaaatgcaaaaattacaattagaaggaagaagaaagttcaaataccagtaagtcgtcctgatcctgaaccagtatctgataatgaagaagatagttatgatgaggaaatacatgatccaagaagtggccggagtggtgtggttaacagaaggagtgagaagatttggccgagggatagaagtgcaagtagagagaggagcttgtccccgcggtcagacaggcggtcagtggcttccagccagcctgctaaacctactaaagtcacactggtgaaatcccggaaaaatgaagaatatggtcttcgattggcaagccatatatttgttaaggaaatttcacaagatagtttggcagcaagagatggcaatattcaagaaggtgatgttgtattgaagataaatggtactgtgacagaaaatatgtcattgacagatgcaaagacattgatagaaaggtctaaaggcaaattaaaaatggtagttcaaagagatgaacgggctacgctattgaatgtccctgatctttctgacagcatccactctgctaatgcctctgagagagacgacatttcagaaattcagtcactggcatcagatcattctggtcgatcacacgataggcctccccgccgcagccggtcacgatctcctgaccagcggtcagagccttctgatcattccaggcactcgccgcagcagccaagcaatggcagtctccggagtagagatgaagagagaatttctaaacctggggctgtctcaactcctgtaaagcatgctgatgatcacacacctaaaacagtggaagaagttacagttgaaagaaatgagaaacaaacaccttctcttccagaaccaaagcctgtgtatgcccaagttgggcaaccagatgtggatttacctgtcagtccatctgatggtgtcctacctaattcaactcatgaagatgggattcttcggcccagcatgaaattggtaaaattcagaaaaggagatagtgtgggtttgcggctggctggtggaaatgatgttggaatatttgtagctggcgttctagaagatagccctgcagccaaggaaggcttagaggaaggtgatcaaattctcagggtaaacaacgtagattttacaaatatcataagagaagaagccgtccttttcctgcttgacctccctaaaggagaagaagtgaccatattggctcagaagaagaaggatgtttatcgtcgcattgtagaatcagatgtaggagattctttctatattagaacccattttgaatatgaaaaggaatctccctatggacttagttttaacaaaggagaggtgttccgtgttgtggataccttgtacaatggaaaactgggctcttggcttgctattcgaattggtaaaaatcataaggaggtagaacgaggcatcatccctaataagaacagagctgagcagctagccagtgtacagtatacacttccaaaaacagcaggcggagaccgtgctgacttctggagattcagaggtcttcgcagctccaagagaaatcttcgaaaaagcagagaggatttgtccgctcagcctgttcaaacaaagtttccagcttatgaaagagtggttcttcgagaagctggatttctgaggcctgtaaccatttttggaccaatagctgatgttgccagagaaaagctggcaagagaagaaccagatatttatcaaattgcaaagagtgaaccacgagacgctggaactgaccaacgtagctctggcattattcgcctgcatacaataaagcaaatcatagatcaagacaaacatgctttattagatgtaacaccaaatgcagttgatcgtcttaactatgcccagtggtatccaattgttgtatttcttaaccctgattctaagcaaggagtaaaaacaatgagaatgaggttatgtccagaatctcggaaaagtgccaggaagttatacgagcgatctcataaacttcgtaaaaataatcaccatctttttacaactacaattaacttaaattcaatgaatgatggttggtatggtgcgctgaaagaagcaattcaacaacagcaaaaccagctggtatgggtttccgagggaaaggcggatggtgctacaagtgatgaccttgatttgcatgatgatcgtctgtcctacctgtcagctccaggtagtgaatactcaatgtatagcacggacagtagacacacttctgactatgaagacacagacacagaaggcggggcctacactgatcaagaactagatgaaactcttaatgatgaggttgggactccaccggagtctgccattacacggtcctctgagcctgtaagagaggactcctctggaatgcatcatgaaaaccaaacatatcctccttactcaccacaagcgcagccacaaccaattcatagaatagactcccctggatttaagccagcctctcaacagaaagcagaagcttcatctccagtcccttacctttcgcctgaaacaaacccagcatcatcaacctctgctgttaatcataatgtaaatttaactaatgtcagactggaggagcccaccccagctccttccacctcttactcaccacaagctgattctttaagaacaccaagtactgaggcagctcacataatgctaagagatcaagaaccatcattgtcgtcgcatgtagatccaacaaaggtgtatagaaaggatccatatcccgaggaaatgatgaggcagaaccatgttttgaaacagccagccgttagtcacccagggcacaggccagacaaagagcctaatctgacctatgaaccccaactcccatacgtagagaaacaagccagcagagacctcgagcagcccacatacagatacgagtcctcaagctatacggaccagttttctcgaaactatgaacatcgtctgcgatacgaagatcgcgtccccatgtatgaagaacagtggtcatattatgatgacaaacagccctacccatctcggccaccttttgataatcagcactctcaagaccttgactccagacagcatcccgaagagtcctcagaacgagggtactttccacgttttgaagagccagcccctctgtcttacgacagcagaccacgttacgaacaggcacctagagcatccgccctgcggcacgaagagcagccagctcctgggtatgacacacatggtagactcagaccggaagcccagccccacccttcagcagggcccaagcctgcagagtccaagcagtattttgagcaatattcacgcagttacgagcaagtaccaccccaaggatttacctctagagcaggtcattttgagcctctccatggtgctgcagctgtccctccgctgataccttcatctcagcataagccagaagctctgccttcaaacaccaaaccactgcctccacccccaactcaaaccgaagaagaggaagatccagcaatgaagccacagtctgtactcaccagagttaagatgtttgaaaacaaaagatctgcatccttagagaccaagaaggatgtaaatgacactggcagttttaagcctccagaagtagcatctaaaccttcaggtgctcccatcattggtcccaaacccacttctcagaatcaattcagtgaacatgacaaaactctgtacaggatcccagaacctcaaaaacctcaactgaagccacctgaagatattgttcggtccaatcattatgaccctgaagaagatgaagaatattatcgaaaacagctgtcatactttgaccgaagaagttttgagaataagcctcctgcacacattgccgccagccatctctccgagcctgcaaagccagcgcattctcagaatcaatcaaatttttctagttattcttcaaagggaaagcctcctgaagctgatggtgtggatagatcatttggcgagaaacgctatgaacccatccaggccactccccctcctcctccattgccctcgcagtatgcccagccatctcagcctgtcaccagcgcgtctctccacatacattctaagggagcacatggtgaaggtaattcagtgtcattggattttcagaattccttagtgtccaaaccagacccacctccatctcagaataagccagcaactttcagaccaccaaaccgagaagatactgctcaggcagctttctatccccagaaaagttttccagataaagccccagttaatggaactgaacagactcagaaaacagtcactccagcatacaatcgattcacaccaaaaccatatacaagttctgcccgaccatttgaacgcaagtttgaaagtcctaaattcaatcacaatcttctgccaagtgaaactgcacataaacctgacttgtcttcaaaaactcccacttctccaaaaactcttgtgaaatcgcacagtttggcacagcctcctgagtttgacagtggagttgaaactttctctatccatgcagagaagcctaaatatcaaataaataatatcagcacagtgcctaaagctattcctgtgagtccttcagctgtggaagaggatgaagatgaagatggtcatactgtggtggccacagcccgaggcatatttaacagcaatgggggcgtgctgagttccatagaaactggtgttagtataattatccctcaaggagccattcccgaaggagttgagcaggaaatctatttcaaggtctgccgggacaacagcatccttccacctttagataaagagaaaggtgaaacactgctgagtcctttggtgatgtgtggtccccatggcctcaagttcctgaagcctgtggagctgcgcttaccacactgtgatcctaaaacctggcaaaacaagtgtcttcccggagatccaaattatctcgttggagcaaactgtgtttctgtccttattgaccacttttaactcttgaaatataggaacttaaataatgtgaaactggattaaacttaatctaaatggaaccactctatcaagtattataccttttttagagttgatactacagtttgttagtatgaggcatttgtttgaactgataaagatgagtgagcatgcccctgaaccatggtcggaaaacatgctacacactgcatgtttgtgattgacgggactgttggtattggctagaggttcaaagatattttgctttgtgatttttgtaatttttttatcgtcactgcttaacttcacatattgatttccgttaaaataccagccagtaaatgggggtgcatttgaggtctgttctttccaaagtacactgtttcaaactttactatggccctggcctagcatacgtacacattttattttattatgcatgaagtaatatgcacacattttttaaatgcacctggaatatataaccagtgttgtggatttaacagaaatgtacagcaaggagatttacaactgggggagggtgaagtgaagacaatgacttactgtacatgaaaacacatttttcttagggaaggatacaaaagcatgtgagactggttccatggcctcttcagatctctaacttcaccatattaccacagacatactaaccagcagaaatgccttaccctcatgttcttaattcttagctcattctccttgtgttactaagtttttatggcttttgtgcattatctagatactgtatcatgacaaagactgagtacgttgtgcatttggtggtttcagaaatgtgttatcacccagaagaaaatagtggtgtgatttggggatatttttttcttttcttttcttttctttttttttttttttgacaaggggcagtggtggttttctgttctttctggctatgcatttgaaaattttgatgttttaaggatgcttgtacataatgcgtgcataccacttttgttcttggtttgtaaattaacttttataaactttaccttttttatacataaacaagaccacgtttctaaaggctacctttgtattctctcctgtacctcttgagccttgaactttgacctctgcagcaataaagcagcgtttctatgacacatgcaaggtcattttttttaagaaaaaggatgcacagagttgttacatttttaagtgctgcatttaaaagatacagttactcagaattctctagtttgattaaattcttgcaaagtatccctactgtaatttgtgatacaatgctgtgccctaaagtgtatttttttactaatagacaatttattatggcacatcagcacgatttctgtttagataatacaccactacattctgttaatcattaggtgtgactgaatttcttttgccgttattaaaaatctcaaatttctaaatctccaaaataaaactttttaaaataaagtgctggcttggtctgtttgcccactgttttctagtttcatgcagctttataatcctgttttaaaatcctgcacacaaatccctatcacccagcgtcacctaccacctcgtcgtctggtgttgcatgcagaatttctccccttggccagcatgtacagatgggtgggcagtgctcatctgaagggctcagactgaagtggggcagaaggacctggagacagagtgggagaaggcagcaggccgacttccccctgtgggtaaacacacacccctgcgtggagaaacacccctgcatggggacacacgtgcgtttgtgtgtgtgcgtgtaaccatttgtatatggttttattccccagataaatagcacgggcattgtttaatgtcacccacatttgggggaagaaaatgggtttagtgagcataaatattccattgtggacatcctacttacttaactgccacccctgttgacatttggattattgctatagtgtttcagtaaacacctttgtggactgaatccatctatgtggattttatttttttcatctttgttaaggtataatttacatagagtaagttactgtttttaaaatgtatagttcaaattttgacaaacacatactgtttatttaccacggttaatacatacaacagtttctttatcttctctaatcatttgtacccctttatactcaacccttcttccagcccctggcaggatgatctcttctgtttctatagttgcctttttgacagtgtcatataaatggaatcatacaata

SEQ ID NO: 191351 - DNA, 6747 bp, Homo sapiens
  Payload ID: 17798
  Gene Name: tight junction protein 1
  ENST ID: ENST00000356107
  CDS Start-End: 1-5307
atgtccgccagagctgcggccgccaagagcacagcaatggaggaaacagctatatgggaacaacatacagtgacgcttcacagggctcctggatttggatttggaattgcaatatctggtggacgagataatcctcattttcagagtggggaaacgtcaatagtgatttcagatgtgctgaaaggaggaccagctgaaggacagctacaggaaaatgaccgagttgcaatggttaacggagtttcaatggataatgttgaacatgcttttgctgttcagcaactaaggaaaagtgggaaaaatgcaaaaattacaattagaaggaagaagaaagttcaaataccagtaagtcgtcctgatcctgaaccagtatctgataatgaagaagatagttatgatgaggaaatacatgatccaagaagtggccggagtggtgtggttaacagaaggagtgagaagatttggccgagggatagaagtgcaagtagagagaggagcttgtccccgcggtcagacaggcggtcagtggcttccagccagcctgctaaacctactaaagtcacactggtgaaatcccggaaaaatgaagaatatggtcttcgattggcaagccatatatttgttaaggaaatttcacaagatagtttggcagcaagagatggcaatattcaagaaggtgatgttgtattgaagataaatggtactgtgacagaaaatatgtcattgacagatgcaaagacattgatagaaaggtctaaaggcaaattaaaaatggtagttcaaagagatgaacgggctacgctattgaatgtccctgatctttctgacagcatccactctgctaatgcctctgagagagacgacatttcagaaattcagtcactggcatcagatcattctggtcgatcacacgataggcctccccgccgcagccggtcacgatctcctgaccagcggtcagagccttctgatcattccaggcactcgccgcagcagccaagcaatggcagtctccggagtagagatgaagagagaatttctaaacctggggctgtctcaactcctgtaaagcatgctgatgatcacacacctaaaacagtggaagaagttacagttgaaagaaatgagaaacaaacaccttctcttccagaaccaaagcctgtgtatgcccaagttgggcaaccagatgtggatttacctgtcagtccatctgatggtgtcctacctaattcaactcatgaagatgggattcttcggcccagcatgaaattggtaaaattcagaaaaggagatagtgtgggtttgcggctggctggtggaaatgatgttggaatatttgtagctggcgttctagaagatagccctgcagccaaggaaggcttagaggaaggtgatcaaattctcagggtaaacaacgtagattttacaaatatcataagagaagaagccgtccttttcctgcttgacctccctaaaggagaagaagtgaccatattggctcagaagaagaaggatgtttatcgtcgcattgtagaatcagatgtaggagattctttctatattagaacccattttgaatatgaaaaggaatctccctatggacttagttttaacaaaggagaggtgttccgtgttgtggataccttgtacaatggaaaactgggctcttggcttgctattcgaattggtaaaaatcataaggaggtagaacgaggcatcatccctaataagaacagagctgagcagctagccagtgtacagtatacacttccaaaaacagcaggcggagaccgtgctgacttctggagattcagaggtcttcgcagctccaagagaaatcttcgaaaaagcagagaggatttgtccgctcagcctgttcaaacaaagtttccagcttatgaaagagtggttcttcgagaagctggatttctgaggcctgtaaccatttttggaccaatagctgatgttgccagagaaaagctggcaagagaagaaccagatatttatcaaattgcaaagagtgaaccacgagacgctggaactgaccaacgtagctctggcattattcgcctgcatacaataaagcaaatcatagatcaagacaaacatgctttattagatgtaacaccaaatgcagttgatcgtcttaactatgcccagtggtatccaattgttgtatttcttaaccctgattctaagcaaggagtaaaaacaatgagaatgaggttatgtccagaatctcggaaaagtgccaggaagttatacgagcgatctcataaacttcgtaaaaataatcaccatctttttacaactacaattaacttaaattcaatgaatgatggttggtatggtgcgctgaaagaagcaattcaacaacagcaaaaccagctggtatgggtttccgagggaaaggcggatggtgctacaagtgatgaccttgatttgcatgatgatcgtctgtcctacctgtcagctccaggtagtgaatactcaatgtatagcacggacagtagacacacttctgactatgaagacacagacacagaaggcggggcctacactgatcaagaactagatgaaactcttaatgatgaggttgggactccaccggagtctgccattacacggtcctctgagcctgtaagagaggactcctctggaatgcatcatgaaaaccaaacatatcctccttactcaccacaagcgcagccacaaccaattcatagaatagactcccctggatttaagccagcctctcaacagaaagcagaagcttcatctccagtcccttacctttcgcctgaaacaaacccagcatcatcaacctctgctgttaatcataatgtaaatttaactaatgtcagactggaggagcccaccccagctccttccacctcttactcaccacaagctgattctttaagaacaccaagtactgaggcagctcacataatgctaagagatcaagaaccatcattgtcgtcgcatgtagatccaacaaaggtgtatagaaaggatccatatcccgaggaaatgatgaggcagaaccatgttttgaaacagccagccgttagtcacccagggcacaggccagacaaagagcctaatctgacctatgaaccccaactcccatacgtagagaaacaagccagcagagacctcgagcagcccacatacagatacgagtcctcaagctatacggaccagttttctcgaaactatgaacatcgtctgcgatacgaagatcgcgtccccatgtatgaagaacagtggtcatattatgatgacaaacagccctacccatctcggccaccttttgataatcagcactctcaagaccttgactccagacagcatcccgaagagtcctcagaacgagggtactttccacgttttgaagagccagcccctctgtcttacgacagcagaccacgttacgaacaggcacctagagcatccgccctgcggcacgaagagcagccagctcctgggtatgacacacatggtagactcagaccggaagcccagccccacccttcagcagggcccaagcctgcagagtccaagcagtattttgagcaatattcacgcagttacgagcaagtaccaccccaaggatttacctctagagcaggtcattttgagcctctccatggtgctgcagctgtccctccgctgataccttcatctcagcataagccagaagctctgccttcaaacaccaaaccactgcctccacccccaactcaaaccgaagaagaggaagatccagcaatgaagccacagtctgtactcaccagagttaagatgtttgaaaacaaaagatctgcatccttagagaccaagaaggatgtaaatgacactggcagttttaagcctccagaagtagcatctaaaccttcaggtgctcccatcattggtcccaaacccacttctcagaatcaattcagtgaacatgacaaaactctgtacaggatcccagaacctcaaaaacctcaactgaagccacctgaagatattgttcggtccaatcattatgaccctgaagaagatgaagaatattatcgaaaacagctgtcatactttgaccgaagaagttttgagaataagcctcctgcacacattgccgccagccatctctccgagcctgcaaagccagcgcattctcagaatcaatcaaatttttctagttattcttcaaagggaaagcctcctgaagctgatggtgtggatagatcatttggcgagaaacgctatgaacccatccaggccactccccctcctcctccattgccctcgcagtatgcccagccatctcagcctgtcaccagcgcgtctctccacatacattctaagggagcacatggtgaaggtaattcagtgtcattggattttcagaattccttagtgtccaaaccagacccacctccatctcagaataagccagcaactttcagaccaccaaaccgagaagatactgctcaggcagctttctatccccagaaaagttttccagataaagccccagttaatggaactgaacagactcagaaaacagtcactccagcatacaatcgattcacaccaaaaccatatacaagttctgcccgaccatttgaacgcaagtttgaaagtcctaaattcaatcacaatcttctgccaagtgaaactgcacataaacctgacttgtcttcaaaaactcccacttctccaaaaactcttgtgaaatcgcacagtttggcacagcctcctgagtttgacagtggagttgaaactttctctatccatgcagagaagcctaaatatcaaataaataatatcagcacagtgcctaaagctattcctgtgagtccttcagctgtggaagaggatgaagatgaagatggtcatactgtggtggccacagcccgaggcatatttaacagcaatgggggcgtgctgagttccatagaaactggtgttagtataattatccctcaaggagccattcccgaaggagttgagcaggaaatctatttcaaggtctgccgggacaacagcatccttccacctttagataaagagaaaggtgaaacactgctgagtcctttggtgatgtgtggtccccatggcctcaagttcctgaagcctgtggagctgcgcttaccacactgtgcgtccatgactcctgacggttggtcttttgctctaaaatcatccgactcctcgtcgggtgatcctaaaacctggcaaaacaagtgtcttcccggagatccaaattatctcgttggagcaaactgtgtttctgtccttattgaccacttttaactcttgaaatataggaacttaaataatgtgaaactggattaaacttaatctaaatggaaccactctatcaagtattataccttttttagagttgatactacagtttgttagtatgaggcatttgtttgaactgataaagatgagtgagcatgcccctgaaccatggtcggaaaacatgctacacactgcatgtttgtgattgacgggactgttggtattggctagaggttcaaagatattttgctttgtgatttttgtaatttttttatcgtcactgcttaacttcacatattgatttccgttaaaataccagccagtaaatgggggtgcatttgaggtctgttctttccaaagtacactgtttcaaactttactatggccctggcctagcatacgtacacattttattttattatgcatgaagtaatatgcacacattttttaaatgcacctggaatatataaccagtgttgtggatttaacagaaatgtacagcaaggagatttacaactgggggagggtgaagtgaagacaatgacttactgtacatgaaaacacatttttcttagggaaggatacaaaagcatgtgagactggttccatggcctcttcagatctctaacttcaccatattaccacagacatactaaccagcagaaatgccttaccctcatgttcttaattcttagctcattctccttgtgttactaagtttttatggcttttgtgcattatctagatactgtatcatgacaaagactgagtacgttgtgcatttggtggtttcagaaatgtgttatcacccagaagaaaatagtggtgtgatttggggatatttttttcttttcttttcttttctttttttttttttttgacaaggggcagtggtggttttctgttctttctggctatgcatttgaaaattttgatgttttaaggatgcttgtacataatgcgtgcataccacttttgttcttggtttgtaaattaacttttataaactttaccttttttatacataaacaagaccacgtttctaaaggctacctttgtattctctcctgtacctcttgagccttgaactttgacctctgcagcaataaagcagcgtttctatgacacatgcaaggtcattttttttaagaaaaaggatgcacagagttgttacatttttaagtgctgcatttaaaagatacagttactcagaattctctagtttgattaaattcttgcaaagtatccctactgtaatttgtgatacaatgctgtgccctaaagtgtatttttttactaatagacaatttattatggcacatcagcacgatttctgtttagataatacaccactacattctgttaatcattaggtgtgactgaatttcttttgccgttattaaaaatctcaaatttctaaatctccaaaataaaactttttaaaat

SEQ ID NO: 191352 - DNA, 1032 bp, Homo sapiens
  Payload ID: 17798
  Gene Name: tight junction protein 1
  ENST ID: ENST00000400007
  CDS Start-End: 1-682
aaaaccatatacaagttctgcccgaccatttgaacgcaagtttgaaagtcctaaattcaatcacaatcttctgccaagtgaaactgcacataaacctgacttgtcttcaaaaactcccacttctccaaaaactcttgtgaaatcgcacagtttggcacagcctcctgagtttgacagtggagttgaaactttctctatccatgcagagaagcctaaatatcaaataaataatatcagcacagtgcctaaagctattcctgtgagtccttcagctgtggaagaggatgaagatgaagatggtcatactgtggtggccacagcccgaggcatatttaacagcaatgggggcgtgctgagttccatagaaactggtgttagtataattatccctcaaggagccattcccgaaggagttgagcaggaaatctatttcaaggtctgccgggacaacagcatccttccacctttagataaagagaaaggtgaaacactgctgagtcctttggtgatgtgtggtccccatggcctcaagttcctgaagcctgtggagctgcgcttaccacactgtgcgtccatgactcctgacggtgatcctaaaacctggcaaaacaagtgtcttcccggagatccaaattatctcgttggagcaaactgtgtttctgtccttattgaccacttttaactcttgaaatataggaacttaaataatgtgaaactggattaaacttaatctaaatggaaccactctatcaagtattataccttttttagagttgatactacagtttgttagtatgaggcatttgtttgaactgataaagatgagtgagcatgcccctgaaccatggtcggaaaacatgctacacactgcatgtttgtgattgacgggactgttggtattggctagaggttcaaagatattttgctttgtgatttttgtaatttttttatcgtcactgcttaacttcacatattgatttccgttaaaataccagccagtaaatgggggtgcatttgaggtctgttctttcc

SEQ ID NO: 191353 - DNA, 6764 bp, Homo sapiens
  Payload ID: 17798
  Gene Name: tight junction protein 1
  ENST ID: ENST00000400011
  CDS Start-End: 243-5321
gtagtttcgatctgatgtcactccctgcggtatgcgcacgccagcgataaggctttgagactgcaaaacactccactcagcctgtgaggcgtagtaggtcgggttttctttcatgctgtattacttatttaaggaggaaaggctttgtttccgtattacacagaatgtcactttgttcctgaagtgtgatctctggtacttaatatgcaagacaacacactttttaagaggttatttcaagtatggagagaaatacgttttcaatggattgccacagtaagagcacagcaatggaggaaacagctatatgggaacaacatacagtgacgcttcacagggctcctggatttggatttggaattgcaatatctggtggacgagataatcctcattttcagagtggggaaacgtcaatagtgatttcagatgtgctgaaaggaggaccagctgaaggacagctacaggaaaatgaccgagttgcaatggttaacggagtttcaatggataatgttgaacatgcttttgctgttcagcaactaaggaaaagtgggaaaaatgcaaaaattacaattagaaggaagaagaaagttcaaataccagtaagtcgtcctgatcctgaaccagtatctgataatgaagaagatagttatgatgaggaaatacatgatccaagaagtggccggagtggtgtggttaacagaaggagtgagaagatttggccgagggatagaagtgcaagtagagagaggagcttgtccccgcggtcagacaggcggtcagtggcttccagccagcctgctaaacctactaaagtcacactggtgaaatcccggaaaaatgaagaatatggtcttcgattggcaagccatatatttgttaaggaaatttcacaagatagtttggcagcaagagatggcaatattcaagaaggtgatgttgtattgaagataaatggtactgtgacagaaaatatgtcattgacagatgcaaagacattgatagaaaggtctaaaggcaaattaaaaatggtagttcaaagagatgaacgggctacgctattgaatgtccctgatctttctgacagcatccactctgctaatgcctctgagagagacgacatttcagaaattcagtcactggcatcagatcattctggtcgatcacacgataggcctccccgccgcagccggtcacgatctcctgaccagcggtcagagccttctgatcattccaggcactcgccgcagcagccaagcaatggcagtctccggagtagagatgaagagagaatttctaaacctggggctgtctcaactcctgtaaagcatgctgatgatcacacacctaaaacagtggaagaagttacagttgaaagaaatgagaaacaaacaccttctcttccagaaccaaagcctgtgtatgcccaagttgggcaaccagatgtggatttacctgtcagtccatctgatggtgtcctacctaattcaactcatgaagatgggattcttcggcccagcatgaaattggtaaaattcagaaaaggagatagtgtgggtttgcggctggctggtggaaatgatgttggaatatttgtagctggcgttctagaagatagccctgcagccaaggaaggcttagaggaaggtgatcaaattctcagggtaaacaacgtagattttacaaatatcataagagaagaagccgtccttttcctgcttgacctccctaaaggagaagaagtgaccatattggctcagaagaagaaggatgtttatcgtcgcattgtagaatcagatgtaggagattctttctatattagaacccattttgaatatgaaaaggaatctccctatggacttagttttaacaaaggagaggtgttccgtgttgtggataccttgtacaatggaaaactgggctcttggcttgctattcgaattggtaaaaatcataaggaggtagaacgaggcatcatccctaataagaacagagctgagcagctagccagtgtacagtatacacttccaaaaacagcaggcggagaccgtgctgacttctggagattcagaggtcttcgcagctccaagagaaatcttcgaaaaagcagagaggatttgtccgctcagcctgttcaaacaaagtttccagcttatgaaagagtggttcttcgagaagctggatttctgaggcctgtaaccatttttggaccaatagctgatgttgccagagaaaagctggcaagagaagaaccagatatttatcaaattgcaaagagtgaaccacgagacgctggaactgaccaacgtagctctggcattattcgcctgcatacaataaagcaaatcatagatcaagacaaacatgctttattagatgtaacaccaaatgcagttgatcgtcttaactatgcccagtggtatccaattgttgtatttcttaaccctgattctaagcaaggagtaaaaacaatgagaatgaggttatgtccagaatctcggaaaagtgccaggaagttatacgagcgatctcataaacttcgtaaaaataatcaccatctttttacaactacaattaacttaaattcaatgaatgatggttggtatggtgcgctgaaagaagcaattcaacaacagcaaaaccagctggtatgggtttccgagggaaaggcggatggtgctacaagtgatgaccttgatttgcatgatgatcgtctgtcctacctgtcagctccaggtagtgaatactcaatgtatagcacggacagtagacacacttctgactatgaagacacagacacagaaggcggggcctacactgatcaagaactagatgaaactcttaatgatgaggttgggactccaccggagtctgccattacacggtcctctgagcctgtaagagaggactcctctggaatgcatcatgaaaaccaaacatatcctccttactcaccacaagcgcagccacaaccaattcatagaatagactcccctggatttaagccagcctctcaacaggtgtatagaaaggatccatatcccgaggaaatgatgaggcagaaccatgttttgaaacagccagccgttagtcacccagggcacaggccagacaaagagcctaatctgacctatgaaccccaactcccatacgtagagaaacaagccagcagagacctcgagcagcccacatacagatacgagtcctcaagctatacggaccagttttctcgaaactatgaacatcgtctgcgatacgaagatcgcgtccccatgtatgaagaacagtggtcatattatgatgacaaacagccctacccatctcggccaccttttgataatcagcactctcaagaccttgactccagacagcatcccgaagagtcctcagaacgagggtactttccacgttttgaagagccagcccctctgtcttacgacagcagaccacgttacgaacaggcacctagagcatccgccctgcggcacgaagagcagccagctcctgggtatgacacacatggtagactcagaccggaagcccagccccacccttcagcagggcccaagcctgcagagtccaagcagtattttgagcaatattcacgcagttacgagcaagtaccaccccaaggatttacctctagagcaggtcattttgagcctctccatggtgctgcagctgtccctccgctgataccttcatctcagcataagccagaagctctgccttcaaacaccaaaccactgcctccacccccaactcaaaccgaagaagaggaagatccagcaatgaagccacagtctgtactcaccagagttaagatgtttgaaaacaaaagatctgcatccttagagaccaagaaggatgtaaatgacactggcagttttaagcctccagaagtagcatctaaaccttcaggtgctcccatcattggtcccaaacccacttctcagaatcaattcagtgaacatgacaaaactctgtacaggatcccagaacctcaaaaacctcaactgaagccacctgaagatattgttcggtccaatcattatgaccctgaagaagatgaagaatattatcgaaaacagctgtcatactttgaccgaagaagttttgagaataagcctcctgcacacattgccgccagccatctctccgagcctgcaaagccagcgcattctcagaatcaatcaaatttttctagttattcttcaaagggaaagcctcctgaagctgatggtgtggatagatcatttggcgagaaacgctatgaacccatccaggccactccccctcctcctccattgccctcgcagtatgcccagccatctcagcctgtcaccagcgcgtctctccacatacattctaagggagcacatggtgaaggtaattcagtgtcattggattttcagaattccttagtgtccaaaccagacccacctccatctcagaataagccagcaactttcagaccaccaaaccgagaagatactgctcaggcagctttctatccccagaaaagttttccagataaagccccagttaatggaactgaacagactcagaaaacagtcactccagcatacaatcgattcacaccaaaaccatatacaagttctgcccgaccatttgaacgcaagtttgaaagtcctaaattcaatcacaatcttctgccaagtgaaactgcacataaacctgacttgtcttcaaaaactcccacttctccaaaaactcttgtgaaatcgcacagtttggcacagcctcctgagtttgacagtggagttgaaactttctctatccatgcagagaagcctaaatatcaaataaataatatcagcacagtgcctaaagctattcctgtgagtccttcagctgtggaagaggatgaagatgaagatggtcatactgtggtggccacagcccgaggcatatttaacagcaatgggggcgtgctgagttccatagaaactggtgttagtataattatccctcaaggagccattcccgaaggagttgagcaggaaatctatttcaaggtctgccgggacaacagcatccttccacctttagataaagagaaaggtgaaacactgctgagtcctttggtgatgtgtggtccccatggcctcaagttcctgaagcctgtggagctgcgcttaccacactgtgcgtccatgactcctgacggttggtcttttgctctaaaatcatccgactcctcgtcgggtgatcctaaaacctggcaaaacaagtgtcttcccggagatccaaattatctcgttggagcaaactgtgtttctgtccttattgaccacttttaactcttgaaatataggaacttaaataatgtgaaactggattaaacttaatctaaatggaaccactctatcaagtattataccttttttagagttgatactacagtttgttagtatgaggcatttgtttgaactgataaagatgagtgagcatgcccctgaaccatggtcggaaaacatgctacacactgcatgtttgtgattgacgggactgttggtattggctagaggttcaaagatattttgctttgtgatttttgtaatttttttatcgtcactgcttaacttcacatattgatttccgttaaaataccagccagtaaatgggggtgcatttgaggtctgttctttccaaagtacactgtttcaaactttactatggccctggcctagcatacgtacacattttattttattatgcatgaagtaatatgcacacattttttaaatgcacctggaatatataaccagtgttgtggatttaacagaaatgtacagcaaggagatttacaactgggggagggtgaagtgaagacaatgacttactgtacatgaaaacacatttttcttagggaaggatacaaaagcatgtgagactggttccatggcctcttcagatctctaacttcaccatattaccacagacatactaaccagcagaaatgccttaccctcatgttcttaattcttagctcattctccttgtgttactaagtttttatggcttttgtgcattatctagatactgtatcatgacaaagactgagtacgttgtgcatttggtggtttcagaaatgtgttatcacccagaagaaaatagtggtgtgatttggggatatttttttcttttcttttcttttctttttttttttttttgacaaggggcagtggtggttttctgttctttctggctatgcatttgaaaattttgatgttttaaggatgcttgtacataatgcgtgcataccacttttgttcttggtttgtaaattaacttttataaactttaccttttttatacataaacaagaccacgtttctaaaggctacctttgtattctctcctgtacctcttgagccttgaactttgacctctgcagcaataaagcagcgtttctatgacacatgcaaggtcattttttttaagaaaaaggatgcacagagttgttacatttttaagtgctgcatttaaaagatacagttactcagaattctctagtttgattaaattcttgcaaagtatccctactgtaatttgtgatacaatgctgtgccctaaagtgtatttttttactaatagacaatttattatggcacatcagcacgatttctgtttagataatacaccactacattctgttaatcattaggtgtgactgaatttcttttgccgttattaaaaatctcaaatttctaaatctccaaaataaaactttttaaaataaa

SEQ ID NO: 191354 - DNA, 5007 bp, Homo sapiens
  Payload ID: 17798
  Gene Name: tight junction protein 1
  Uniprot ID: Q07157
  ENST ID: ENST00000545208
  CDS Start-End: 1-5007
atgtccgccagagctgcggccgccaagagcacagcaatggaggaaacagctatatgggaacaacatacagtgacgcttcacagggctcctggatttggatttggaattgcaatatctggtggacgagataatcctcattttcagagtggggaaacgtcaatagtgatttcagatgtgctgaaaggaggaccagctgaaggacagctacaggaaaatgaccgagttgcaatggttaacggagtttcaatggataatgttgaacatgcttttgctgttcagcaactaaggaaaagtgggaaaaatgcaaaaattacaattagaaggaagaagaaagttcaaataccagtaagtcgtcctgatcctgaaccagtatctgataatgaagaagatagttatgatgaggaaatacatgatccaagaagtggccggagtggtgtggttaacagaaggagtgagaagatttggccgagggatagaagtgcaagtagagagaggagcttgtccccgcggtcagacaggcggtcagtggcttccagccagcctgctaaacctactaaagtcacactggtgaaatcccggaaaaatgaagaatatggtcttcgattggcaagccatatatttgttaaggaaatttcacaagatagtttggcagcaagagatggcaatattcaagaaggtgatgttgtattgaagataaatggtactgtgacagaaaatatgtcattgacagatgcaaagacattgatagaaaggtctaaaggcaaattaaaaatggtagttcaaagagatgaacgggctacgctattgaatgtccctgatctttctgacagcatccactctgctaatgcctctgagagagacgacatttcagaaattcagtcactggcatcagatcattctggtcgatcacacgataggcctccccgccgcagccggtcacgatctcctgaccagcggtcagagccttctgatcattccaggcactcgccgcagcagccaagcaatggcagtctccggagtagagatgaagagagaatttctaaacctggggctgtctcaactcctgtaaagcatgctgatgatcacacacctaaaacagtggaagaagttacagttgaaagaaatgagaaacaaacaccttctcttccagaaccaaagcctgtgtatgcccaagttgggcaaccagatgtggatttacctgtcagtccatctgatggtgtcctacctaattcaactcatgaagatgggattcttcggcccagcatgaaattggtaaaattcagaaaaggagatagtgtgggtttgcggctggctggtggaaatgatgttggaatatttgtagctggcgttctagaagatagccctgcagccaaggaaggcttagaggaaggtgatcaaattctcagggtaaacaacgtagattttacaaatatcataagagaagaagccgtccttttcctgcttgacctccctaaaggagaagaagtgaccatattggctcagaagaagaaggatgtttatcgtcgcattgtagaatcagatgtaggagattctttctatattagaacccattttgaatatgaaaaggaatctccctatggacttagttttaacaaaggagaggtgttccgtgttgtggataccttgtacaatggaaaactgggctcttggcttgctattcgaattggtaaaaatcataaggaggtagaacgaggcatcatccctaataagaacagagctgagcagctagccagtgtacagtatacacttccaaaaacagcaggcggagaccgtgctgacttctggagattcagaggtcttcgcagctccaagagaaatcttcgaaaaagcagagaggatttgtccgctcagcctgttcaaacaaagtttccagcttatgaaagagtggttcttcgagaagctggatttctgaggcctgtaaccatttttggaccaatagctgatgttgccagagaaaagctggcaagagaagaaccagatatttatcaaattgcaaagagtgaaccacgagacgctggaactgaccaacgtagctctggcattattcgcctgcatacaataaagcaaatcatagatcaagacaaacatgctttattagatgtaacaccaaatgcagttgatcgtcttaactatgcccagtggtatccaattgttgtatttcttaaccctgattctaagcaaggagtaaaaacaatgagaatgaggttatgtccagaatctcggaaaagtgccaggaagttatacgagcgatctcataaacttcgtaaaaataatcaccatctttttacaactacaattaacttaaattcaatgaatgatggttggtatggtgcgctgaaagaagcaattcaacaacagcaaaaccagctggtatgggtttccgagggaaaggcggatggtgctacaagtgatgaccttgatttgcatgatgatcgtctgtcctacctgtcagctccaggtagtgaatactcaatgtatagcacggacagtagacacacttctgactatgaagacacagacacagaaggcggggcctacactgatcaagaactagatgaaactcttaatgatgaggttgggactccaccggagtctgccattacacggtcctctgagcctgtaagagaggactcctctggaatgcatcatgaaaaccaaacatatcctccttactcaccacaagcgcagccacaaccaattcatagaatagactcccctggatttaagccagcctctcaacaggtgtatagaaaggatccatatcccgaggaaatgatgaggcagaaccatgttttgaaacagccagccgttagtcacccagggcacaggccagacaaagagcctaatctgacctatgaaccccaactcccatacgtagagaaacaagccagcagagacctcgagcagcccacatacagatacgagtcctcaagctatacggaccagttttctcgaaactatgaacatcgtctgcgatacgaagatcgcgtccccatgtatgaagaacagtggtcatattatgatgacaaacagccctacccatctcggccaccttttgataatcagcactctcaagaccttgactccagacagcatcccgaagagtcctcagaacgagggtactttccacgttttgaagagccagcccctctgtcttacgacagcagaccacgttacgaacaggcacctagagcatccgccctgcggcacgaagagcagccagctcctgggtatgacacacatggtagactcagaccggaagcccagccccacccttcagcagggcccaagcctgcagagtccaagcagtattttgagcaatattcacgcagttacgagcaagtaccaccccaaggatttacctctagagcaggtcattttgagcctctccatggtgctgcagctgtccctccgctgataccttcatctcagcataagccagaagctctgccttcaaacaccaaaccactgcctccacccccaactcaaaccgaagaagaggaagatccagcaatgaagccacagtctgtactcaccagagttaagatgtttgaaaacaaaagatctgcatccttagagaccaagaaggatgtaaatgacactggcagttttaagcctccagaagtagcatctaaaccttcaggtgctcccatcattggtcccaaacccacttctcagaatcaattcagtgaacatgacaaaactctgtacaggatcccagaacctcaaaaacctcaactgaagccacctgaagatattgttcggtccaatcattatgaccctgaagaagatgaagaatattatcgaaaacagctgtcatactttgaccgaagaagttttgagaataagcctcctgcacacattgccgccagccatctctccgagcctgcaaagccagcgcattctcagaatcaatcaaatttttctagttattcttcaaagggaaagcctcctgaagctgatggtgtggatagatcatttggcgagaaacgctatgaacccatccaggccactccccctcctcctccattgccctcgcagtatgcccagccatctcagcctgtcaccagcgcgtctctccacatacattctaagggagcacatggtgaaggtaattcagtgtcattggattttcagaattccttagtgtccaaaccagacccacctccatctcagaataagccagcaactttcagaccaccaaaccgagaagatactgctcaggcagctttctatccccagaaaagttttccagataaagccccagttaatggaactgaacagactcagaaaacagtcactccagcatacaatcgattcacaccaaaaccatatacaagttctgcccgaccatttgaacgcaagtttgaaagtcctaaattcaatcacaatcttctgccaagtgaaactgcacataaacctgacttgtcttcaaaaactcccacttctccaaaaactcttgtgaaatcgcacagtttggcacagcctcctgagtttgacagtggagttgaaactttctctatccatgcagagaagcctaaatatcaaataaataatatcagcacagtgcctaaagctattcctgtgagtccttcagctgtggaagaggatgaagatgaagatggtcatactgtggtggccacagcccgaggcatatttaacagcaatgggggcgtgctgagttccatagaaactggtgttagtataattatccctcaaggagccattcccgaaggagttgagcaggaaatctatttcaaggtctgccgggacaacagcatccttccacctttagataaagagaaaggtgaaacactgctgagtcctttggtgatgtgtggtccccatggcctcaagttcctgaagcctgtggagctgcgcttaccacactgtgatcctaaaacctggcaaaacaagtgtcttcccggagatccaaattatctcgttggagcaaactgtgtttctgtccttattgaccacttttaa

SEQ ID NO: 191355 - DNA, 2890 bp, Homo sapiens
  Payload ID: 17798
  Gene Name: tight junction protein 1
  ENST ID: ENST00000495972
  CDS Start-End: 475-1626
gggcatgctcagtgggccgggccggcaggtttgcgtggccgctgagttgccggcgccggctgagccagcggacgccgcgttccttggcggccgccggttcccgggaagttacgtggcgaagccggcttccgaggagacgccgggaggccacgggtgctgctgacgggcgggcgaccgggcgaggccgacgtggccgggctgcgaaagctgcgggaggccgagtgggtggccgcgctcggagggaggtgccggtcgggcgcgccccgtggagaagacccgggcggggcgggcgcttcccggacttttgtccgagttgaattccctccccctgggccgggcccttccggccgcccccgcccgtgccccgctcgctctcgggagatgtttatttgggctgtggcgtgaggagcgggcgggccagcgccgcggagtttcgggtccgaggagcctcgcgcggcgctggagagagacaagatgtccgccagagctgcggccgccaagagcacagcaatggaggaaacagctatatgggaacaacatacagtgacgcttcacagggctcctggatttggatttggaattgcaatatctggtggacgagataatcctcattttcagagtggggaaacgtcaatagtgatttcagatgtgctgaaaggaggaccagctgaaggacagctacaggaaaatgaccgagttgcaatggttaacggagtttcaatggataatgttgaacatgcttttgctgttcagcaactaaggaaaagtgggaaaaatgcaaaaattacaattagaaggaagaagaaagttcaaataccagtaagtcgtcctgatcctgaaccagtatctgataatgaagaagatagttatgatgaggaaatacatgatccaagaagtggccggagtggtgtggttaacagaaggagtgagaagatttggccgagggatagaagtgcaagtagagagaggagcttgtccccgcggtcagacaggcggtcagtggcttccagccagcctgctaaacctactaaagtcacactggtgaaatcccggaaaaatgaagaatatggtcttcgattggcaagccatatatttgttaaggaaatttcacaagatagtttggcagcaagagatggcaatattcaagaaggtgatgttgtattgaagataaatggtactgtgacagaaaatatgtcattgacagatgcaaagacattgatagaaaggtctaaaggcaaattaaaaatggtagttcaaagagatgaacgggctacgctattgaatgtccctgatctttctgacagcatccactctgctaatgcctctgagagagacgacatttcagaaattcagtcactggcatcagatcattctggtcgatcacacgataggcctccccgccgcagccggtcacgatctcctgaccagcggtcagagccttctgatcattccaggcactcgccgcagcagccaagcaatggcagagtcacacgtacatttgagaatctgaagaaaattatgatccttctctccagaaaaatgtgcatgtgcacatacacgcagcaattgcatacaatttctggagactcccaaggctctataggccaccacctgacccatggttaactgcagtccacatgaagatcacttgaaacatgagtccagggctgaagagacagtttagaagaaaagggaacccttatacgttgttgatgagaatgtaattgatacggccattctggaaaacagtatggaggttcctcaaaaaattaaaaccagaacgaactagcacatgatccagcaattccacttctgggtacatatccaaaggaaatgaaatcactgtctcgaagagatatctgcactctcatgtttgttgcagcattattcacaatagccaaggtatggagtcaacctgaatgtcgaacacatgaatggataaagaaaatgttcacacacacaatgaaatgtgatttagcctttaaaaagaaggaaatcctgccatttggaacaacatggatgaacctggagggcattgtgctaagtgaaataaaccagacacagaaagacaaacactgcatgacctcacttactgtggaacctaagcaagttgaactcatagaaacagacagtagaatggtggttaccaggggttaggggtggggaggaatggggagatgtttgttaaagggtacacagtttcaattataagatgagtaagttctggagacctaatttacagtgtagtgacaagagttaataacgtatacttgaaatttgctaagagagtagatcttaaggcattcttttgacacacactaagaaaagtaactatgaggtatggatatgttaattaacttggtctcggtcatcatttgaatatgtatatcaaaacatcactgttgtacacctttaatagatacaatgtttatttgtcaattggacctcagtaaagctggaaagaaaaagtaaatttgggtctagatctgaagagatgatttaggattagagatgttgaattgagacttaacttgcatagaggtgttagctgaagccatagaagtcactaaaattgctaagagaaacagtttggaaagaaggcagagaactggataacagggagcacgttcttttaggaaggtgaagaggcgagggagaagtaagaaaagggaggcgtacctagccaggagagagcttttttaaagtttgtaaaaaaccgcagtgacagtggtagttaaaactgtaaagtgtttcgcattctactaaaatgggaactagtaagagaagaggataacttgtaagagctatgaatgtggttgctaattcgtatctactgtagtttttatgtatttgtgaagctgattatttctaaatttcaaacctagattta

SEQ ID NO: 191356 - DNA, 720 bp, Homo sapiens
  Payload ID: 17798
  Gene Name: tight junction protein 1
  ENST ID: ENST00000558447
  CDS Start-End: 27-720
ggcggcggatggcccagagctgatctatgcggcgcctggaggggctgtgtctgcggcggcggcggaggcggcggggccctgcccgcgagcggagcggggacaagatgaagtaccagaaatacctgacggtgctgcagatggccatcggcgtcaccccctccaaccgcggcagcctcctgccgctcaagaggaagctgtgggtaacgccatcctctgaaaatcctaatggtgctacttctagtgtcagccaaggaaaaccctctttaagacgaattaaagggagattacacagaagcaaaagccttgatagcatggatttctgtgagctcactagcacagcaatggaggaaacagctatatgggaacaacatacagtgacgcttcacagggctcctggatttggatttggaattgcaatatctggtggacgagataatcctcattttcagagtggggaaacgtcaatagtgatttcagatgtgctgaaaggaggaccagctgaaggacagctacaggaaaatgaccgagttgcaatggttaacggagtttcaatggataatgttgaacatgcttttgctgttcagcaactaaggaaaagtgggaaaaatgcaaaaattacaattagaaggaagaagaaagttcaaataccagtaagtcgtcctgatcctgaaccagtatctgataatgaagaagatagttatgatgaggaaatacatgatc

SEQ ID NO: 191357 - DNA, 6990 bp, Homo sapiens
  Payload ID: 17798
  Gene Name: tight junction protein 1
  ENST ID: ENST00000613680
  CDS Start-End: 524-5554
cccccgccgggccgggcatgctcagtgggccgggccggcaggtttgcgtggccgctgagttgccggcgccggctgagccagcggacgccgcgttccttggcggccgccggttcccgggaagttacgtggcgaagccggcttccgaggagacgccgggaggccacgggtgctgctgacgggcgggcgaccgggcgaggccgacgtggccgggctgcgaaagctgcgggaggccgagtgggtggccgcgctcggagggaggtgccggtcgggcgcgccccgtggagaagacccgggcggggcgggcgcttcccggacttttgtccgagttgaattccctccccctgggccgggcctttccggccgcccccgcccgtgccccgctcgctctcgggagatgtttatttgggctgtggcgtgaggagcgggcgggccagcgccgcggagtttcgggtccgaggagcctcgcgcggcgctggagagagacaagatgtccgccagagctgcggccgccaagagcacagcaatggaggaaacagctatatgggaacaacatacagtgacgcttcacagggctcctggatttggatttggaattgcaatatctggtggacgagataatcctcattttcagagtggggaaacgtcaatagtgatttcagatgtgctgaaaggaggaccagctgaaggacagctacaggaaaatgaccgagttgcaatggttaacggagtttcaatggataatgttgaacatgcttttgctgttcagcaactaaggaaaagtgggaaaaatgcaaaaattacaattagaaggaagaagaaagttcaaataccagtaagtcgtcctgatcctgaaccagtatctgataatgaagaagatagttatgatgaggaaatacatgatccaagaagtggccggagtggtgtggttaacagaaggagtgagaagatttggccgagggatagaagtgcaagtagagagaggagcttgtccccgcggtcagacaggcggtcagtggcttccagccagcctgctaaacctactaaagtcacactggtgaaatcccggaaaaatgaagaatatggtcttcgattggcaagccatatatttgttaaggaaatttcacaagatagtttggcagcaagagatggcaatattcaagaaggtgatgttgtattgaagataaatggtactgtgacagaaaatatgtcattgacagatgcaaagacattgatagaaaggtctaaaggcaaattaaaaatggtagttcaaagagatgaacgggctacgctattgaatgtccctgatctttctgacagcatccactctgctaatgcctctgagagagacgacatttcagaaattcagtcactggcatcagatcattctggtcgatcacacgataggcctccccgccgcagccggtcacgatctcctgaccagcggtcagagccttctgatcattccaggcactcgccgcagcagccaagcaatggcagtctccggagtagagatgaagagagaatttctaaacctggggctgtctcaactcctgtaaagcatgctgatgatcacacacctaaaacagtggaagaagttacagttgaaagaaatgagaaacaaacaccttctcttccagaaccaaagcctgtgtatgcccaagttgggcaaccagatgtggatttacctgtcagtccatctgatggtgtcctacctaattcaactcatgaagatgggattcttcggcccagcatgaaattggtaaaattcagaaaaggagatagtgtgggtttgcggctggctggtggaaatgatgttggaatatttgtagctggcgttctagaagatagccctgcagccaaggaaggcttagaggaaggtgatcaaattctcagggtaaacaacgtagattttacaaatatcataagagaagaagccgtccttttcctgcttgacctccctaaaggagaagaagtgaccatattggctcagaagaagaaggatgtttatcgtcgcattgtagaatcagatgtaggagattctttctatattagaacccattttgaatatgaaaaggaatctccctatggacttagttttaacaaaggagaggtgttccgtgttgtggataccttgtacaatggaaaactgggctcttggcttgctattcgaattggtaaaaatcataaggaggtagaacgaggcatcatccctaataagaacagagctgagcagctagccagtgtacagtatacacttccaaaaacagcaggcggagaccgtgctgacttctggagattcagaggtcttcgcagctccaagagaaatcttcgaaaaagcagagaggatttgtccgctcagcctgttcaaacaaagtttccagcttatgaaagagtggttcttcgagaagctggatttctgaggcctgtaaccatttttggaccaatagctgatgttgccagagaaaagctggcaagagaagaaccagatatttatcaaattgcaaagagtgaaccacgagacgctggaactgaccaacgtagctctggcattattcgcctgcatacaataaagcaaatcatagatcaagacaaacatgctttattagatgtaacaccaaatgcagttgatcgtcttaactatgcccagtggtatccaattgttgtatttcttaaccctgattctaagcaaggagtaaaaacaatgagaatgaggttatgtccagaatctcggaaaagtgccaggaagttatacgagcgatctcataaacttcgtaaaaataatcaccatctttttacaactacaattaacttaaattcaatgaatgatggttggtatggtgcgctgaaagaagcaattcaacaacagcaaaaccagctggtatgggtttccgagggaaaggcggatggtgctacaagtgatgaccttgatttgcatgatgatcgtctgtcctacctgtcagctccaggtagtgaatactcaatgtatagcacggacagtagacacacttctgactatgaagacacagacacagaaggcggggcctacactgatcaagaactagatgaaactcttaatgatgaggttgggactccaccggagtctgccattacacggtcctctgagcctgtaagagaggactcctctggaatgcatcatgaaaaccaaacatatcctccttactcaccacaagcgcagccacaaccaattcatagaatagactcccctggatttaagccagcctctcaacaggtgtatagaaaggatccatatcccgaggaaatgatgaggcagaaccatgttttgaaacagccagccgttagtcacccagggcacaggccagacaaagagcctaatctgacctatgaaccccaactcccatacgtagagaaacaagccagcagagacctcgagcagcccacatacagatacgagtcctcaagctatacggaccagttttctcgaaactatgaacatcgtctgcgatacgaagatcgcgtccccatgtatgaagaacagtggtcatattatgatgacaaacagccctacccatctcggccaccttttgataatcagcactctcaagaccttgactccagacagcatcccgaagagtcctcagaacgagggtactttccacgttttgaagagccagcccctctgtcttacgacagcagaccacgttacgaacaggcacctagagcatccgccctgcggcacgaagagcagccagctcctgggtatgacacacatggtagactcagaccggaagcccagccccacccttcagcagggcccaagcctgcagagtccaagcagtattttgagcaatattcacgcagttacgagcaagtaccaccccaaggatttacctctagagcaggtcattttgagcctctccatggtgctgcagctgtccctccgctgataccttcatctcagcataagccagaagctctgccttcaaacaccaaaccactgcctccacccccaactcaaaccgaagaagaggaagatccagcaatgaagccacagtctgtactcaccagagttaagatgtttgaaaacaaaagatctgcatccttagagaccaagaaggatgtaaatgacactggcagttttaagcctccagaagtagcatctaaaccttcaggtgctcccatcattggtcccaaacccacttctcagaatcaattcagtgaacatgacaaaactctgtacaggatcccagaacctcaaaaacctcaactgaagccacctgaagatattgttcggtccaatcattatgaccctgaagaagatgaagaatattatcgaaaacagctgtcatactttgaccgaagaagttttgagaataagcctcctgcacacattgctgccagccatctctccgagcctgcaaagccagctcattctcagaatcaatcaaatttttctagttattcttcaaagggaaagcctcctgaagctgatggtgtggatagatcatttggcgagaaacgctatgaacccatccaggccactccccctcctcctccattgccctcgcagtatgcccagccatctcagcctgtcaccagcgcgtctctccacatacattctaagggagcacatggtgaaggtaattcagtgtcattggattttcagaattccttagtgtccaaaccagacccacctccatctcagaataagccagcaactttcagaccaccaaaccgagaagatactgctcaggcagctttctatccccagaaaagttttccagataaagccccagttaatggaactgaacagactcagaaaacagtcactccagcatacaatcgattcacaccaaaaccatatacaagttctgcccgaccatttgaacgcaagtttgaaagtcctaaattcaatcacaatcttctgccaagtgaaactgcacataaacctgacttgtcttcaaaaactcccacttctccaaaaactcttgtgaaatcgcacagtttggcacagcctcctgagtttgacagtggagttgaaactttctctatccatgcagagaagcctaaatatcaaataaataatatcagcacagtgcctaaagctattcctgtgagtccttcagctgtggaagaggatgaagatgaagatggtcatactgtggtggccacagcccgaggcatatttaacagcaatgggggcgtgctgagttccatagaaactggtgttagtataattatccctcaaggagccattcccgaaggagttgagcaggaaatctatttcaaggtctgccgggacaacagcatccttccacctttagataaagagaaaggtgaaacactgctgagtcctttggtgatgtgtggtccccatggcctcaagttcctgaagcctgtggagctgcgcttaccacactgtgcgtccatgactcctgacggttggtcttttgctctaaaatcatccgactcctcgtcgggtgatcctaaaacctggcaaaacaagtgtcttcccggagatccaaattatctcgttggagcaaactgtgtttctgtccttattgaccacttttaactcttgaaatataggaacttaaataatgtgaaactggattaaacttaatctaaatggaaccactctatcaagtattataccttttttagagttgatactacagtttgttagtatgaggcatttgtttgaactgataaagatgagtgagcatgcccctgaaccatggtcggaaaacatgctacacactgcatgtttgtgattgacgggactgttggtattggctagaggttcaaagatattttgctttgtgatttttgtaatttttttatcgtcactgcttaacttcacatattgatttccgttaaaataccagccagtaaatgggggtgcatttgaggtctgttctttccaaagtacactgtttcaaactttactatggccctggcctagcatacgtacacattttattttattatgcatgaagtaatatgcacacattttttaaatgcacctggaatatataaccagtgttgtggatttaacagaaatgtacagcaaggagatttacaactgggggagggtgaagtgaagacaatgacttactgtacatgaaaacacatttttcttagggaaggatacaaaagcatgtgagactggttccatggcctcttcagatctctaacttcaccatattaccacagacatactaaccagcagaaatgccttaccctcatgttcttaattcttagctcattctccttgtgttactaagtttttatggcttttgtgcattatctagatactgtatcatgacaaagactgagtacgttgtgcatttggtggtttcagaaatgtgttatcacccagaagaaaatagtggtgtgatttggggatatttttttcttttcttttcttttcttttttttttttttttgacaaggggcagtggtggttttctgttctttctggctatgcatttgaaaattttgatgttttaaggatgcttgtacataatgcgtgcataccacttttgttcttggtttgtaaattaacttttataaactttaccttttttatacataaacaagaccacgtttctaaaggctacctttgtattctctcctgtacctcttgagccttgaactttgacctctgcagcaataaagcagcgtttctatgacacatgcaaggtcattttttttaagaaaaaggatgcacagagttgttacatttttaagtgctgcatttaaaagatacagttactcagaattctctagtttgattaaattcttgcaaagtatccctactgtaatttgtgatacaatgctgtgccctaaagtgtatttttttactaatagacaatttattatggcacatcagcacgatttctgtttagataatacaccactacattctgttaatcattaggtgtgactgaatttcttttgccgttattaaaaatctcaaatttctaaatctccaaaataaaacttttt

SEQ ID NO: 191358 - DNA, 6757 bp, Homo sapiens
  Payload ID: 17798
  Gene Name: tight junction protein 1
  ENST ID: ENST00000612628
  CDS Start-End: 243-5321
gtagtttcgatctgatgtcactccctgcggtatgcgcacgccagcgataaggctttgagactgcaaaacactccactcagcctgtgaggcgtagtaggtcgggttttctttcatgctgtattacttatttaaggaggaaaggctttgtttccgtattacacagaatgtcactttgttcctgaagtgtgatctctggtacttaatatgcaagacaacacactttttaagaggttatttcaagtatggagagaaatacgttttcaatggattgccacagtaagagcacagcaatggaggaaacagctatatgggaacaacatacagtgacgcttcacagggctcctggatttggatttggaattgcaatatctggtggacgagataatcctcattttcagagtggggaaacgtcaatagtgatttcagatgtgctgaaaggaggaccagctgaaggacagctacaggaaaatgaccgagttgcaatggttaacggagtttcaatggataatgttgaacatgcttttgctgttcagcaactaaggaaaagtgggaaaaatgcaaaaattacaattagaaggaagaagaaagttcaaataccagtaagtcgtcctgatcctgaaccagtatctgataatgaagaagatagttatgatgaggaaatacatgatccaagaagtggccggagtggtgtggttaacagaaggagtgagaagatttggccgagggatagaagtgcaagtagagagaggagcttgtccccgcggtcagacaggcggtcagtggcttccagccagcctgctaaacctactaaagtcacactggtgaaatcccggaaaaatgaagaatatggtcttcgattggcaagccatatatttgttaaggaaatttcacaagatagtttggcagcaagagatggcaatattcaagaaggtgatgttgtattgaagataaatggtactgtgacagaaaatatgtcattgacagatgcaaagacattgatagaaaggtctaaaggcaaattaaaaatggtagttcaaagagatgaacgggctacgctattgaatgtccctgatctttctgacagcatccactctgctaatgcctctgagagagacgacatttcagaaattcagtcactggcatcagatcattctggtcgatcacacgataggcctccccgccgcagccggtcacgatctcctgaccagcggtcagagccttctgatcattccaggcactcgccgcagcagccaagcaatggcagtctccggagtagagatgaagagagaatttctaaacctggggctgtctcaactcctgtaaagcatgctgatgatcacacacctaaaacagtggaagaagttacagttgaaagaaatgagaaacaaacaccttctcttccagaaccaaagcctgtgtatgcccaagttgggcaaccagatgtggatttacctgtcagtccatctgatggtgtcctacctaattcaactcatgaagatgggattcttcggcccagcatgaaattggtaaaattcagaaaaggagatagtgtgggtttgcggctggctggtggaaatgatgttggaatatttgtagctggcgttctagaagatagccctgcagccaaggaaggcttagaggaaggtgatcaaattctcagggtaaacaacgtagattttacaaatatcataagagaagaagccgtccttttcctgcttgacctccctaaaggagaagaagtgaccatattggctcagaagaagaaggatgtttatcgtcgcattgtagaatcagatgtaggagattctttctatattagaacccattttgaatatgaaaaggaatctccctatggacttagttttaacaaaggagaggtgttccgtgttgtggataccttgtacaatggaaaactgggctcttggcttgctattcgaattggtaaaaatcataaggaggtagaacgaggcatcatccctaataagaacagagctgagcagctagccagtgtacagtatacacttccaaaaacagcaggcggagaccgtgctgacttctggagattcagaggtcttcgcagctccaagagaaatcttcgaaaaagcagagaggatttgtccgctcagcctgttcaaacaaagtttccagcttatgaaagagtggttcttcgagaagctggatttctgaggcctgtaaccatttttggaccaatagctgatgttgccagagaaaagctggcaagagaagaaccagatatttatcaaattgcaaagagtgaaccacgagacgctggaactgaccaacgtagctctggcattattcgcctgcatacaataaagcaaatcatagatcaagacaaacatgctttattagatgtaacaccaaatgcagttgatcgtcttaactatgcccagtggtatccaattgttgtatttcttaaccctgattctaagcaaggagtaaaaacaatgagaatgaggttatgtccagaatctcggaaaagtgccaggaagttatacgagcgatctcataaacttcgtaaaaataatcaccatctttttacaactacaattaacttaaattcaatgaatgatggttggtatggtgcgctgaaagaagcaattcaacaacagcaaaaccagctggtatgggtttccgagggaaaggcggatggtgctacaagtgatgaccttgatttgcatgatgatcgtctgtcctacctgtcagctccaggtagtgaatactcaatgtatagcacggacagtagacacacttctgactatgaagacacagacacagaaggcggggcctacactgatcaagaactagatgaaactcttaatgatgaggttgggactccaccggagtctgccattacacggtcctctgagcctgtaagagaggactcctctggaatgcatcatgaaaaccaaacatatcctccttactcaccacaagcgcagccacaaccaattcatagaatagactcccctggatttaagccagcctctcaacaggtgtatagaaaggatccatatcccgaggaaatgatgaggcagaaccatgttttgaaacagccagccgttagtcacccagggcacaggccagacaaagagcctaatctgacctatgaaccccaactcccatacgtagagaaacaagccagcagagacctcgagcagcccacatacagatacgagtcctcaagctatacggaccagttttctcgaaactatgaacatcgtctgcgatacgaagatcgcgtccccatgtatgaagaacagtggtcatattatgatgacaaacagccctacccatctcggccaccttttgataatcagcactctcaagaccttgactccagacagcatcccgaagagtcctcagaacgagggtactttccacgttttgaagagccagcccctctgtcttacgacagcagaccacgttacgaacaggcacctagagcatccgccctgcggcacgaagagcagccagctcctgggtatgacacacatggtagactcagaccggaagcccagccccacccttcagcagggcccaagcctgcagagtccaagcagtattttgagcaatattcacgcagttacgagcaagtaccaccccaaggatttacctctagagcaggtcattttgagcctctccatggtgctgcagctgtccctccgctgataccttcatctcagcataagccagaagctctgccttcaaacaccaaaccactgcctccacccccaactcaaaccgaagaagaggaagatccagcaatgaagccacagtctgtactcaccagagttaagatgtttgaaaacaaaagatctgcatccttagagaccaagaaggatgtaaatgacactggcagttttaagcctccagaagtagcatctaaaccttcaggtgctcccatcattggtcccaaacccacttctcagaatcaattcagtgaacatgacaaaactctgtacaggatcccagaacctcaaaaacctcaactgaagccacctgaagatattgttcggtccaatcattatgaccctgaagaagatgaagaatattatcgaaaacagctgtcatactttgaccgaagaagttttgagaataagcctcctgcacacattgctgccagccatctctccgagcctgcaaagccagctcattctcagaatcaatcaaatttttctagttattcttcaaagggaaagcctcctgaagctgatggtgtggatagatcatttggcgagaaacgctatgaacccatccaggccactccccctcctcctccattgccctcgcagtatgcccagccatctcagcctgtcaccagcgcgtctctccacatacattctaagggagcacatggtgaaggtaattcagtgtcattggattttcagaattccttagtgtccaaaccagacccacctccatctcagaataagccagcaactttcagaccaccaaaccgagaagatactgctcaggcagctttctatccccagaaaagttttccagataaagccccagttaatggaactgaacagactcagaaaacagtcactccagcatacaatcgattcacaccaaaaccatatacaagttctgcccgaccatttgaacgcaagtttgaaagtcctaaattcaatcacaatcttctgccaagtgaaactgcacataaacctgacttgtcttcaaaaactcccacttctccaaaaactcttgtgaaatcgcacagtttggcacagcctcctgagtttgacagtggagttgaaactttctctatccatgcagagaagcctaaatatcaaataaataatatcagcacagtgcctaaagctattcctgtgagtccttcagctgtggaagaggatgaagatgaagatggtcatactgtggtggccacagcccgaggcatatttaacagcaatgggggcgtgctgagttccatagaaactggtgttagtataattatccctcaaggagccattcccgaaggagttgagcaggaaatctatttcaaggtctgccgggacaacagcatccttccacctttagataaagagaaaggtgaaacactgctgagtcctttggtgatgtgtggtccccatggcctcaagttcctgaagcctgtggagctgcgcttaccacactgtgcgtccatgactcctgacggttggtcttttgctctaaaatcatccgactcctcgtcgggtgatcctaaaacctggcaaaacaagtgtcttcccggagatccaaattatctcgttggagcaaactgtgtttctgtccttattgaccacttttaactcttgaaatataggaacttaaataatgtgaaactggattaaacttaatctaaatggaaccactctatcaagtattataccttttttagagttgatactacagtttgttagtatgaggcatttgtttgaactgataaagatgagtgagcatgcccctgaaccatggtcggaaaacatgctacacactgcatgtttgtgattgacgggactgttggtattggctagaggttcaaagatattttgctttgtgatttttgtaatttttttatcgtcactgcttaacttcacatattgatttccgttaaaataccagccagtaaatgggggtgcatttgaggtctgttctttccaaagtacactgtttcaaactttactatggccctggcctagcatacgtacacattttattttattatgcatgaagtaatatgcacacattttttaaatgcacctggaatatataaccagtgttgtggatttaacagaaatgtacagcaaggagatttacaactgggggagggtgaagtgaagacaatgacttactgtacatgaaaacacatttttcttagggaaggatacaaaagcatgtgagactggttccatggcctcttcagatctctaacttcaccatattaccacagacatactaaccagcagaaatgccttaccctcatgttcttaattcttagctcattctccttgtgttactaagtttttatggcttttgtgcattatctagatactgtatcatgacaaagactgagtacgttgtgcatttggtggtttcagaaatgtgttatcacccagaagaaaatagtggtgtgatttggggatatttttttcttttcttttcttttcttttttttttttttttgacaaggggcagtggtggttttctgttctttctggctatgcatttgaaaattttgatgttttaaggatgcttgtacataatgcgtgcataccacttttgttcttggtttgtaaattaacttttataaactttaccttttttatacataaacaagaccacgtttctaaaggctacctttgtattctctcctgtacctcttgagccttgaactttgacctctgcagcaataaagcagcgtttctatgacacatgcaaggtcattttttttaagaaaaaggatgcacagagttgttacatttttaagtgctgcatttaaaagatacagttactcagaattctctagtttgattaaattcttgcaaagtatccctactgtaatttgtgatacaatgctgtgccctaaagtgtatttttttactaatagacaatttattatggcacatcagcacgatttctgtttagataatacaccactacattctgttaatcattaggtgtgactgaatttcttttgccgttattaaaaatctcaaatttctaaatctccaaaataaaacttttt

SEQ ID NO: 191359 - DNA, 6977 bp, Homo sapiens
  Payload ID: 17798
  Gene Name: tight junction protein 1
  ENST ID: ENST00000614355
  CDS Start-End: 512-5542
cgggcatgctcagtgggccgggccggcaggtttgcgtggccgctgagttgccggcgccggctgagccagcggacgccgcgttccttggcggccgccggttcccgggaagttacgtggcgaagccggcttccgaggagacgccgggaggccacgggtgctgctgacgggcgggcgaccgggcgaggccgacgtggccgggctgcgaaagctgcgggaggccgagtgggtggccgcgctcggagggaggtgccggtcgggcgcgccccgtggagaagacccgggcggggcgggcgcttcccggacttttgtccgagttgaattccctccccctgggccgggcccttccggccgcccccgcccgtgccccgctcgctctcgggagatgtttatttgggctgtggcgtgaggagcgggcgggccagcgccgcggagtttcgggtccgaggagcctcgcgcggcgctggagagagacaagatgtccgccagagctgcggccgccaagagcacagcaatggaggaaacagctatatgggaacaacatacagtgacgcttcacagggctcctggatttggatttggaattgcaatatctggtggacgagataatcctcattttcagagtggggaaacgtcaatagtgatttcagatgtgctgaaaggaggaccagctgaaggacagctacaggaaaatgaccgagttgcaatggttaacggagtttcaatggataatgttgaacatgcttttgctgttcagcaactaaggaaaagtgggaaaaatgcaaaaattacaattagaaggaagaagaaagttcaaataccagtaagtcgtcctgatcctgaaccagtatctgataatgaagaagatagttatgatgaggaaatacatgatccaagaagtggccggagtggtgtggttaacagaaggagtgagaagatttggccgagggatagaagtgcaagtagagagaggagcttgtccccgcggtcagacaggcggtcagtggcttccagccagcctgctaaacctactaaagtcacactggtgaaatcccggaaaaatgaagaatatggtcttcgattggcaagccatatatttgttaaggaaatttcacaagatagtttggcagcaagagatggcaatattcaagaaggtgatgttgtattgaagataaatggtactgtgacagaaaatatgtcattgacagatgcaaagacattgatagaaaggtctaaaggcaaattaaaaatggtagttcaaagagatgaacgggctacgctattgaatgtccctgatctttctgacagcatccactctgctaatgcctctgagagagacgacatttcagaaattcagtcactggcatcagatcattctggtcgatcacacgataggcctccccgccgcagccggtcacgatctcctgaccagcggtcagagccttctgatcattccaggcactcgccgcagcagccaagcaatggcagtctccggagtagagatgaagagagaatttctaaacctggggctgtctcaactcctgtaaagcatgctgatgatcacacacctaaaacagtggaagaagttacagttgaaagaaatgagaaacaaacaccttctcttccagaaccaaagcctgtgtatgcccaagttgggcaaccagatgtggatttacctgtcagtccatctgatggtgtcctacctaattcaactcatgaagatgggattcttcggcccagcatgaaattggtaaaattcagaaaaggagatagtgtgggtttgcggctggctggtggaaatgatgttggaatatttgtagctggcgttctagaagatagccctgcagccaaggaaggcttagaggaaggtgatcaaattctcagggtaaacaacgtagattttacaaatatcataagagaagaagccgtccttttcctgcttgacctccctaaaggagaagaagtgaccatattggctcagaagaagaaggatgtttatcgtcgcattgtagaatcagatgtaggagattctttctatattagaacccattttgaatatgaaaaggaatctccctatggacttagttttaacaaaggagaggtgttccgtgttgtggataccttgtacaatggaaaactgggctcttggcttgctattcgaattggtaaaaatcataaggaggtagaacgaggcatcatccctaataagaacagagctgagcagctagccagtgtacagtatacacttccaaaaacagcaggcggagaccgtgctgacttctggagattcagaggtcttcgcagctccaagagaaatcttcgaaaaagcagagaggatttgtccgctcagcctgttcaaacaaagtttccagcttatgaaagagtggttcttcgagaagctggatttctgaggcctgtaaccatttttggaccaatagctgatgttgccagagaaaagctggcaagagaagaaccagatatttatcaaattgcaaagagtgaaccacgagacgctggaactgaccaacgtagctctggcattattcgcctgcatacaataaagcaaatcatagatcaagacaaacatgctttattagatgtaacaccaaatgcagttgatcgtcttaactatgcccagtggtatccaattgttgtatttcttaaccctgattctaagcaaggagtaaaaacaatgagaatgaggttatgtccagaatctcggaaaagtgccaggaagttatacgagcgatctcataaacttcgtaaaaataatcaccatctttttacaactacaattaacttaaattcaatgaatgatggttggtatggtgcgctgaaagaagcaattcaacaacagcaaaaccagctggtatgggtttccgagggaaaggcggatggtgctacaagtgatgaccttgatttgcatgatgatcgtctgtcctacctgtcagctccaggtagtgaatactcaatgtatagcacggacagtagacacacttctgactatgaagacacagacacagaaggcggggcctacactgatcaagaactagatgaaactcttaatgatgaggttgggactccaccggagtctgccattacacggtcctctgagcctgtaagagaggactcctctggaatgcatcatgaaaaccaaacatatcctccttactcaccacaagcgcagccacaaccaattcatagaatagactcccctggatttaagccagcctctcaacaggtgtatagaaaggatccatatcccgaggaaatgatgaggcagaaccatgttttgaaacagccagccgttagtcacccagggcacaggccagacaaagagcctaatctgacctatgaaccccaactcccatacgtagagaaacaagccagcagagacctcgagcagcccacatacagatacgagtcctcaagctatacggaccagttttctcgaaactatgaacatcgtctgcgatacgaagatcgcgtccccatgtatgaagaacagtggtcatattatgatgacaaacagccctacccatctcggccaccttttgataatcagcactctcaagaccttgactccagacagcatcccgaagagtcctcagaacgagggtactttccacgttttgaagagccagcccctctgtcttacgacagcagaccacgttacgaacaggcacctagagcatccgccctgcggcacgaagagcagccagctcctgggtatgacacacatggtagactcagaccggaagcccagccccacccttcagcagggcccaagcctgcagagtccaagcagtattttgagcaatattcacgcagttacgagcaagtaccaccccaaggatttacctctagagcaggtcattttgagcctctccatggtgctgcagctgtccctccgctgataccttcatctcagcataagccagaagctctgccttcaaacaccaaaccactgcctccacccccaactcaaaccgaagaagaggaagatccagcaatgaagccacagtctgtactcaccagagttaagatgtttgaaaacaaaagatctgcatccttagagaccaagaaggatgtaaatgacactggcagttttaagcctccagaagtagcatctaaaccttcaggtgctcccatcattggtcccaaacccacttctcagaatcaattcagtgaacatgacaaaactctgtacaggatcccagaacctcaaaaacctcaactgaagccacctgaagatattgttcggtccaatcattatgaccctgaagaagatgaagaatattatcgaaaacagctgtcatactttgaccgaagaagttttgagaataagcctcctgcacacattgccgccagccatctctccgagcctgcaaagccagcgcattctcagaatcaatcaaatttttctagttattcttcaaagggaaagcctcctgaagctgatggtgtggatagatcatttggcgagaaacgctatgaacccatccaggccactccccctcctcctccattgccctcgcagtatgcccagccatctcagcctgtcaccagcgcgtctctccacatacattctaagggagcacatggtgaaggtaattcagtgtcattggattttcagaattccttagtgtccaaaccagacccacctccatctcagaataagccagcaactttcagaccaccaaaccgagaagatactgctcaggcagctttctatccccagaaaagttttccagataaagccccagttaatggaactgaacagactcagaaaacagtcactccagcatacaatcgattcacaccaaaaccatatacaagttctgcccgaccatttgaacgcaagtttgaaagtcctaaattcaatcacaatcttctgccaagtgaaactgcacataaacctgacttgtcttcaaaaactcccacttctccaaaaactcttgtgaaatcgcacagtttggcacagcctcctgagtttgacagtggagttgaaactttctctatccatgcagagaagcctaaatatcaaataaataatatcagcacagtgcctaaagctattcctgtgagtccttcagctgtggaagaggatgaagatgaagatggtcatactgtggtggccacagcccgaggcatatttaacagcaatgggggcgtgctgagttccatagaaactggtgttagtataattatccctcaaggagccattcccgaaggagttgagcaggaaatctatttcaaggtctgccgggacaacagcatccttccacctttagataaagagaaaggtgaaacactgctgagtcctttggtgatgtgtggtccccatggcctcaagttcctgaagcctgtggagctgcgcttaccacactgtgcgtccatgactcctgacggttggtcttttgctctaaaatcatccgactcctcgtcgggtgatcctaaaacctggcaaaacaagtgtcttcccggagatccaaattatctcgttggagcaaactgtgtttctgtccttattgaccacttttaactcttgaaatataggaacttaaataatgtgaaactggattaaacttaatctaaatggaaccactctatcaagtattataccttttttagagttgatactacagtttgttagtatgaggcatttgtttgaactgataaagatgagtgagcatgcccctgaaccatggtcggaaaacatgctacacactgcatgtttgtgattgacgggactgttggtattggctagaggttcaaagatattttgctttgtgatttttgtaatttttttatcgtcactgcttaacttcacatattgatttccgttaaaataccagccagtaaatgggggtgcatttgaggtctgttctttccaaagtacactgtttcaaactttactatggccctggcctagcatacgtacacattttattttattatgcatgaagtaatatgcacacattttttaaatgcacctggaatatataaccagtgttgtggatttaacagaaatgtacagcaaggagatttacaactgggggagggtgaagtgaagacaatgacttactgtacatgaaaacacatttttcttagggaaggatacaaaagcatgtgagactggttccatggcctcttcagatctctaacttcaccatattaccacagacatactaaccagcagaaatgccttaccctcatgttcttaattcttagctcattctccttgtgttactaagtttttatggcttttgtgcattatctagatactgtatcatgacaaagactgagtacgttgtgcatttggtggtttcagaaatgtgttatcacccagaagaaaatagtggtgtgatttggggatatttttttcttttcttttcttttctttttttttttttttgacaaggggcagtggtggttttctgttctttctggctatgcatttgaaaattttgatgttttaaggatgcttgtacataatgcgtgcataccacttttgttcttggtttgtaaattaacttttataaactttaccttttttatacataaacaagaccacgtttctaaaggctacctttgtattctctcctgtacctcttgagccttgaactttgacctctgcagcaataaagcagcgtttctatgacacatgcaaggtcattttttttaagaaaaaggatgcacagagttgttacatttttaagtgctgcatttaaaagatacagttactcagaattctctagtttgattaaattcttgcaaagtatccctactgtaatttgtgatacaatgctgtgccctaaagtgtatttttttactaatagacaatttattatggcacatcagcacgatttctgtttagataatacaccactacattctgttaatcattaggtgtgactgaatttcttttgccgttattaaaaatctcaaatttctaaatctccaaaataaaacttttt

SEQ ID NO: 191360 - DNA, 7230 bp, Homo sapiens
  Payload ID: 17798
  Gene Name: tight junction protein 1
  Uniprot ID: Q07157
  ENST ID: ENST00000621049
  CDS Start-End: 488-5794
cccccgccgggccgggcatgctcagtgggccgggccggcaggtttgcgtggccgctgagttgccggcgccggctgagccagcggacgccgcgttccttggcggccgccggttcccgggaagttacgtggcgaagccggcttccgaggagacgccgggaggccacgggtgctgctgacgggcgggcgaccgggcgaggccgacgtggccgggctgcgaaagctgcgggaggccgagtgggtggccgcgctcggagggaggtgccggtcgggcgcgccccgtggagaagacccgggcggggcgggcgcttcccggacttttgtccgagttgaattccctccccctgggccgggcctttccggccgcccccgcccgtgccccgctcgctctcgggagatgtttatttgggctgtggcgtgaggagcgggcgggccagcgccgcggagtttcgggtccgaggagcctcgcgcggcgctggagagagacaagatgtccgccagagctgcggccgccaagagcacagcaatggaggaaacagctatatgggaacaacatacagtgacgcttcacagggctcctggatttggatttggaattgcaatatctggtggacgagataatcctcattttcagagtggggaaacgtcaatagtgatttcagatgtgctgaaaggaggaccagctgaaggacagctacaggaaaatgaccgagttgcaatggttaacggagtttcaatggataatgttgaacatgcttttgctgttcagcaactaaggaaaagtgggaaaaatgcaaaaattacaattagaaggaagaagaaagttcaaataccagtaagtcgtcctgatcctgaaccagtatctgataatgaagaagatagttatgatgaggaaatacatgatccaagaagtggccggagtggtgtggttaacagaaggagtgagaagatttggccgagggatagaagtgcaagtagagagaggagcttgtccccgcggtcagacaggcggtcagtggcttccagccagcctgctaaacctactaaagtcacactggtgaaatcccggaaaaatgaagaatatggtcttcgattggcaagccatatatttgttaaggaaatttcacaagatagtttggcagcaagagatggcaatattcaagaaggtgatgttgtattgaagataaatggtactgtgacagaaaatatgtcattgacagatgcaaagacattgatagaaaggtctaaaggcaaattaaaaatggtagttcaaagagatgaacgggctacgctattgaatgtccctgatctttctgacagcatccactctgctaatgcctctgagagagacgacatttcagaaattcagtcactggcatcagatcattctggtcgatcacacgataggcctccccgccgcagccggtcacgatctcctgaccagcggtcagagccttctgatcattccaggcactcgccgcagcagccaagcaatggcagtctccggagtagagatgaagagagaatttctaaacctggggctgtctcaactcctgtaaagcatgctgatgatcacacacctaaaacagtggaagaagttacagttgaaagaaatgagaaacaaacaccttctcttccagaaccaaagcctgtgtatgcccaagttgggcaaccagatgtggatttacctgtcagtccatctgatggtgtcctacctaattcaactcatgaagatgggattcttcggcccagcatgaaattggtaaaattcagaaaaggagatagtgtgggtttgcggctggctggtggaaatgatgttggaatatttgtagctggcgttctagaagatagccctgcagccaaggaaggcttagaggaaggtgatcaaattctcagggtaaacaacgtagattttacaaatatcataagagaagaagccgtccttttcctgcttgacctccctaaaggagaagaagtgaccatattggctcagaagaagaaggatgtttatcgtcgcattgtagaatcagatgtaggagattctttctatattagaacccattttgaatatgaaaaggaatctccctatggacttagttttaacaaaggagaggtgttccgtgttgtggataccttgtacaatggaaaactgggctcttggcttgctattcgaattggtaaaaatcataaggaggtagaacgaggcatcatccctaataagaacagagctgagcagctagccagtgtacagtatacacttccaaaaacagcaggcggagaccgtgctgacttctggagattcagaggtcttcgcagctccaagagaaatcttcgaaaaagcagagaggatttgtccgctcagcctgttcaaacaaagtttccagcttatgaaagagtggttcttcgagaagctggatttctgaggcctgtaaccatttttggaccaatagctgatgttgccagagaaaagctggcaagagaagaaccagatatttatcaaattgcaaagagtgaaccacgagacgctggaactgaccaacgtagctctggcattattcgcctgcatacaataaagcaaatcatagatcaagacaaacatgctttattagatgtaacaccaaatgcagttgatcgtcttaactatgcccagtggtatccaattgttgtatttcttaaccctgattctaagcaaggagtaaaaacaatgagaatgaggttatgtccagaatctcggaaaagtgccaggaagttatacgagcgatctcataaacttcgtaaaaataatcaccatctttttacaactacaattaacttaaattcaatgaatgatggttggtatggtgcgctgaaagaagcaattcaacaacagcaaaaccagctggtatgggtttccgagggaaaggcggatggtgctacaagtgatgaccttgatttgcatgatgatcgtctgtcctacctgtcagctccaggtagtgaatactcaatgtatagcacggacagtagacacacttctgactatgaagacacagacacagaaggcggggcctacactgatcaagaactagatgaaactcttaatgatgaggttgggactccaccggagtctgccattacacggtcctctgagcctgtaagagaggactcctctggaatgcatcatgaaaaccaaacatatcctccttactcaccacaagcgcagccacaaccaattcatagaatagactcccctggatttaagccagcctctcaacagaaagcagaagcttcatctccagtcccttacctttcgcctgaaacaaacccagcatcatcaacctctgctgttaatcataatgtaaatttaactaatgtcagactggaggagcccaccccagctccttccacctcttactcaccacaagctgattctttaagaacaccaagtactgaggcagctcacataatgctaagagatcaagaaccatcattgtcgtcgcatgtagatccaacaaaggtgtatagaaaggatccatatcccgaggaaatgatgaggcagaaccatgttttgaaacagccagccgttagtcacccagggcacaggccagacaaagagcctaatctgacctatgaaccccaactcccatacgtagagaaacaagccagcagagacctcgagcagcccacatacagatacgagtcctcaagctatacggaccagttttctcgaaactatgaacatcgtctgcgatacgaagatcgcgtccccatgtatgaagaacagtggtcatattatgatgacaaacagccctacccatctcggccaccttttgataatcagcactctcaagaccttgactccagacagcatcccgaagagtcctcagaacgagggtactttccacgttttgaagagccagcccctctgtcttacgacagcagaccacgttacgaacaggcacctagagcatccgccctgcggcacgaagagcagccagctcctgggtatgacacacatggtagactcagaccggaagcccagccccacccttcagcagggcccaagcctgcagagtccaagcagtattttgagcaatattcacgcagttacgagcaagtaccaccccaaggatttacctctagagcaggtcattttgagcctctccatggtgctgcagctgtccctccgctgataccttcatctcagcataagccagaagctctgccttcaaacaccaaaccactgcctccacccccaactcaaaccgaagaagaggaagatccagcaatgaagccacagtctgtactcaccagagttaagatgtttgaaaacaaaagatctgcatccttagagaccaagaaggatgtaaatgacactggcagttttaagcctccagaagtagcatctaaaccttcaggtgctcccatcattggtcccaaacccacttctcagaatcaattcagtgaacatgacaaaactctgtacaggatcccagaacctcaaaaacctcaactgaagccacctgaagatattgttcggtccaatcattatgaccctgaagaagatgaagaatattatcgaaaacagctgtcatactttgaccgaagaagttttgagaataagcctcctgcacacattgctgccagccatctctccgagcctgcaaagccagctcattctcagaatcaatcaaatttttctagttattcttcaaagggaaagcctcctgaagctgatggtgtggatagatcatttggcgagaaacgctatgaacccatccaggccactccccctcctcctccattgccctcgcagtatgcccagccatctcagcctgtcaccagcgcgtctctccacatacattctaagggagcacatggtgaaggtaattcagtgtcattggattttcagaattccttagtgtccaaaccagacccacctccatctcagaataagccagcaactttcagaccaccaaaccgagaagatactgctcaggcagctttctatccccagaaaagttttccagataaagccccagttaatggaactgaacagactcagaaaacagtcactccagcatacaatcgattcacaccaaaaccatatacaagttctgcccgaccatttgaacgcaagtttgaaagtcctaaattcaatcacaatcttctgccaagtgaaactgcacataaacctgacttgtcttcaaaaactcccacttctccaaaaactcttgtgaaatcgcacagtttggcacagcctcctgagtttgacagtggagttgaaactttctctatccatgcagagaagcctaaatatcaaataaataatatcagcacagtgcctaaagctattcctgtgagtccttcagctgtggaagaggatgaagatgaagatggtcatactgtggtggccacagcccgaggcatatttaacagcaatgggggcgtgctgagttccatagaaactggtgttagtataattatccctcaaggagccattcccgaaggagttgagcaggaaatctatttcaaggtctgccgggacaacagcatccttccacctttagataaagagaaaggtgaaacactgctgagtcctttggtgatgtgtggtccccatggcctcaagttcctgaagcctgtggagctgcgcttaccacactgtgcgtccatgactcctgacggttggtcttttgctctaaaatcatccgactcctcgtcgggtgatcctaaaacctggcaaaacaagtgtcttcccggagatccaaattatctcgttggagcaaactgtgtttctgtccttattgaccacttttaactcttgaaatataggaacttaaataatgtgaaactggattaaacttaatctaaatggaaccactctatcaagtattataccttttttagagttgatactacagtttgttagtatgaggcatttgtttgaactgataaagatgagtgagcatgcccctgaaccatggtcggaaaacatgctacacactgcatgtttgtgattgacgggactgttggtattggctagaggttcaaagatattttgctttgtgatttttgtaatttttttatcgtcactgcttaacttcacatattgatttccgttaaaataccagccagtaaatgggggtgcatttgaggtctgttctttccaaagtacactgtttcaaactttactatggccctggcctagcatacgtacacattttattttattatgcatgaagtaatatgcacacattttttaaatgcacctggaatatataaccagtgttgtggatttaacagaaatgtacagcaaggagatttacaactgggggagggtgaagtgaagacaatgacttactgtacatgaaaacacatttttcttagggaaggatacaaaagcatgtgagactggttccatggcctcttcagatctctaacttcaccatattaccacagacatactaaccagcagaaatgccttaccctcatgttcttaattcttagctcattctccttgtgttactaagtttttatggcttttgtgcattatctagatactgtatcatgacaaagactgagtacgttgtgcatttggtggtttcagaaatgtgttatcacccagaagaaaatagtggtgtgatttggggatatttttttcttttcttttcttttcttttttttttttttttgacaaggggcagtggtggttttctgttctttctggctatgcatttgaaaattttgatgttttaaggatgcttgtacataatgcgtgcataccacttttgttcttggtttgtaaattaacttttataaactttaccttttttatacataaacaagaccacgtttctaaaggctacctttgtattctctcctgtacctcttgagccttgaactttgacctctgcagcaataaagcagcgtttctatgacacatgcaaggtcattttttttaagaaaaaggatgcacagagttgttacatttttaagtgctgcatttaaaagatacagttactcagaattctctagtttgattaaattcttgcaaagtatccctactgtaatttgtgatacaatgctgtgccctaaagtgtatttttttactaatagacaatttattatggcacatcagcacgatttctgtttagataatacaccactacattctgttaatcattaggtgtgactgaatttcttttgccgttattaaaaatctcaaatttctaaatctccaaaataaaacttttt

SEQ ID NO: 191361 - DNA, 1636 bp, Homo sapiens
  Payload ID: 17798
  Gene Name: tight junction protein 1
  ENST ID: ENST00000631203
  CDS Start-End: 488-1636
cccccgccgggccgggcatgctcagtgggccgggccggcaggtttgcgtggccgctgagttgccggcgccggctgagccagcggacgccgcgttccttggcggccgccggttcccgggaagttacgtggcgaagccggcttccgaggagacgccgggaggccacgggtgctgctgacgggcgggcgaccgggcgaggccgacgtggccgggctgcgaaagctgcgggaggccgagtgggtggccgcgctcggagggaggtgccggtcgggcgcgccccgtggagaagacccgggcggggcgggcgcttcccggacttttgtccgagttgaattccctccccctgggccgggcctttccggccgcccccgcccgtgccccgctcgctctcgggagatgtttatttgggctgtggcgtgaggagcgggcgggccagcgccgcggagtttcgggtccgaggagcctcgcgcggcgctggagagagacaagatgtccgccagagctgcggccgccaagagcacagcaatggaggaaacagctatatgggaacaacatacagtgacgcttcacagggctcctggatttggatttggaattgcaatatctggtggacgagataatcctcattttcagagtggggaaacgtcaatagtgatttcagatgtgctgaaaggaggaccagctgaaggacagctacaggaaaatgaccgagttgcaatggttaacggagtttcaatggataatgttgaacatgcttttgctgttcagcaactaaggaaaagtgggaaaaatgcaaaaattacaattagaaggaagaagaaagttcaaataccagtaagtcgtcctgatcctgaaccagtatctgataatgaagaagatagttatgatgaggaaatacatgatccaagaagtggccggagtggtgtggttaacagaaggagtgagaagatttggccgagggatagaagtgcaagtagagagaggagcttgtccccgcggtcagacaggcggtcagtggcttccagccagcctgctaaacctactaaagtcacactggtgaaatcccggaaaaatgaagaatatggtcttcgattggcaagccatatatttgttaaggaaatttcacaagatagtttggcagcaagagatggcaatattcaagaaggtgatgttgtattgaagataaatggtactgtgacagaaaatatgtcattgacagatgcaaagacattgatagaaaggtctaaaggcaaattaaaaatggtagttcaaagagatgaacgggctacgctattgaatgtccctgatctttctgacagcatccactctgctaatgcctctgagagagacgacatttcagaaattcagtcactggcatcagatcattctggtcgatcacacgataggcctccccgccgcagccggtcacgatctcctgaccagcggtcagagccttctgatcattccaggcactcgccgcagcagccaagcaatggcagagtcacacgtacatttgagaatctgaagaaaattatgatccttctctccagaaaaatgtgcatgtgcacatacacgcagcaattgcatacaatttctggagactcccaaggctctataggccaccacctgacccatggt

SEQ ID NO: 191362 - DNA, 3725 bp, Homo sapiens
  Payload ID: 17799
  Gene Name: tight junction protein 2
  Uniprot ID: Q9UDY2
  ENST ID: ENST00000265384
  CDS Start-End: 80-3061
tgcccaggaggagtaggagcaggagcagaagcagaagcggggtccggagctgcgcgcctacgcgggacctgtgtccgaaatgccggtgcgaggagaccgcgggtttccaccccggcgggagctgtcaggttggctccgcgccccaggcatggaagagctgatatgggaacagtacactgtgaccctacaaaaggattccaaaagaggatttggaattgcagtgtccggaggcagagacaacccccactttgaaaatggagaaacgtcaattgtcatttctgatgtgctcccgggtgggcctgctgatgggctgctccaagaaaatgacagagtggtcatggtcaatggcacccccatggaggatgtgcttcattcgtttgcagttcagcagctcagaaaaagtgggaaggtcgctgctattgtggtcaagaggccccggaaggtccaggtggccgcacttcaggccagccctcccctggatcaggatgaccgggcttttgaggtgatggacgagtttgatggcagaagtttccggagtggctacagcgagaggagccggctgaacagccatggggggcgcagccgcagctgggaggacagcccggaaagggggcgtccccatgagcgggcccggagccgggagcgggacctcagccgggaccggagccgtggccggagcctggagcggggcctggaccaagaccatgcgcgcacccgagaccgcagccgtggccggagcctggagcggggcctggaccacgactttgggccatcccgggaccgggaccgtgaccgcagccgcggccggagcattgaccaggactacgagcgagcctatcaccgggcctacgacccagactacgagcgggcctacagcccggagtacaggcgcggggcccgccacgatgcccgctctcggggaccccgaagccgcagccgcgagcacccgcactcacggagccccagccccgagcctagggggcggccggggcccatcggggtcctcctgatgaaaagcagagcgaacgaagagtatggtctccggcttgggagtcagatcttcgtaaaggaaatgacccgaacgggtctggcaactaaagatggcaaccttcacgaaggagacataattctcaagatcaatgggactgtaactgagaacatgtctttaacggatgctcgaaaattgatagaaaagtcaagaggaaaactacagctagtggtgttgagagacagccagcagaccctcatcaacatcccgtcattaaatgacagtgactcagaaatagaagatatttcagaaatagagtcaaaccgatcattttctccagaggagagacgtcatcagtattctgattatgattatcattcctcaagtgagaagctgaaggaaaggccaagttccagagaggacacgccgagcagattgtccaggatgggtgcgacacccactccctttaagtccacaggggatattgcaggcacagttgtcccagagaccaacaaggaacccagataccaagaggaccccccagctcctcaaccaaaagcagccccgagaacttttcttcgtcctagtcctgaagatgaagcaatatatggccctaataccaaaatggtaaggttcaagaagggagacagcgtgggcctccggttggctggtggcaatgatgtcgggatatttgttgctggcattcaagaagggacctcggcggagcaggagggccttcaagaaggagaccagattctgaaggtgaacacacaggatttcagaggattagtgcgggaggatgccgttctctacctgttagaaatccctaaaggtgaaatggtgaccattttagctcagagccgagccgatgtgtatagagacatcctggcttgtggcagaggggattcgttttttataagaagccactttgaatgtgagaaggaaactccacagagcctggccttcaccagaggggaggtcttccgagtggtagacacactgtatgacggcaagctgggcaactggctggctgtgaggattgggaacgagttggagaaaggcttaatccccaacaagagcagagctgaacaaatggccagtgttcaaaatgcccagagagacaacgctggggaccgggcagatttctggagaatgcgtggccagaggtctggggtgaagaagaacctgaggaaaagtcgggaagacctcacagctgttgtgtctgtcagcaccaagttcccagcttatgagagggttttgctgcgagaagctggtttcaagagacctgtggtcttattcggccccatagctgatatagcaatggaaaaattggctaatgagttacctgactggtttcaaactgctaaaacggaaccaaaagatgcaggatctgagaaatccactggagtggtccggttaaataccgtgaggcaaattattgaacaggataagcatgcactactggatgtgactccgaaagctgtggacctgttgaattacacccagtggttcccaattgtgatttttttcaacccagactccagacaaggtgtcaaaaccatgagacaaaggttaaatccaacgtccaacaaaagttctcgaaagttatttgatcaagccaacaagcttaaaaaaacgtgtgcacacctttttacagctacaatcaacctaaattcagccaatgatagctggtttggcagcttaaaggacactattcagcatcagcaaggagaagcggtttgggtctctgaaggaaagatggaagggatggatgatgaccccgaagaccgcatgtcctacttaaccgccatgggcgcggactatctgagttgcgacagccgcctcatcagtgactttgaagacacggacggtgaaggaggcgcctacactgacaatgagctggatgagccagccgaggagccgctggtgtcgtccatcacccgctcctcggagccggtgcagcacgaggaggtgaggcgaggcaggccacgggcaggaacaggagagcctggtgttttccttgcactctcgtggacagctgtgtgttcagggtgctgtggaaggcattcctaagggttggagcagatgacttccagggagtctctcgctttgagtccacgctggcatggttgcagtctgtgggaaagtggggcaggcaggtggacttcagaagagcttgaggggtcagcactccgcacacccatgccctcaggtgcgatggataaacagaatggctttaggtgccgtctgtccaaattaccagcggaaccttccttcccatgcagtattgttgtatgtacttgtaacctttgattaggtttctctctgtactcttagatgtccttgcttttcttccccatcctgcctttaacctttctaatcttgccaaagctcttgagtgtttccccatcagtttccttctctcttatatttcagttttttaattgagttcatgatcaaaccttcatctgatcacatcacatgtactgtgcatccactgtgattagatagcttatgggatccttgaaatcacattgacaggcactgtaaagtcacagccaagttagcaattattagttgcacctcagagaatgttggaataatgatctttgaagatgggattgttcatatatttggataattattgctgtggatttctctctagcattttagctcattccagtaaatgatttttttctttatgaaatagaactaccaaaaaaaaaaaaaaaaaaaa

SEQ ID NO: 191363 - DNA, 4058 bp, Homo sapiens
  Payload ID: 17799
  Gene Name: tight junction protein 2
  Uniprot ID: Q9UDY2
  ENST ID: ENST00000348208
  CDS Start-End: 97-3228
agagcactgtccggtggtgcccaggaggagtaggagcaggagcagaagcagaagcggggtccggagctgcgcgcctacgcgggacctgtgtccgaaatgccggtgcgaggagaccgcgggtttccaccccggcgggagctgtcaggttggctccgcgccccaggcatggaagagctgatatgggaacagtacactgtgaccctacaaaaggattccaaaagaggatttggaattgcagtgtccggaggcagagacaacccccactttgaaaatggagaaacgtcaattgtcatttctgatgtgctcccgggtgggcctgctgatgggctgctccaagaaaatgacagagtggtcatggtcaatggcacccccatggaggatgtgcttcattcgtttgcagttcagcagctcagaaaaagtgggaaggtcgctgctattgtggtcaagaggccccggaaggtccaggtggccgcacttcaggccagccctcccctggatcaggatgaccgggcttttgaggtgatggacgagtttgatggcagaagtttccggagtggctacagcgagaggagccggctgaacagccatggggggcgcagccgcagctgggaggacagcccggaaagggggcgtccccatgagcgggcccggagccgggagcgggacctcagccgggaccggagccgtggccggagcctggagcggggcctggaccaagaccatgcgcgcacccgagaccgcagccgtggccggagcctggagcggggcctggaccacgactttgggccatcccgggaccgggaccgtgaccgcagccgcggccggagcattgaccaggactacgagcgagcctatcaccgggcctacgacccagactacgagcgggcctacagcccggagtacaggcgcggggcccgccacgatgcccgctctcggggaccccgaagccgcagccgcgagcacccgcactcacggagccccagccccgagcctagggggcggccggggcccatcggggtcctcctgatgaaaagcagagcgaacgaagagtatggtctccggcttgggagtcagatcttcgtaaaggaaatgacccgaacgggtctggcaactaaagatggcaaccttcacgaaggagacataattctcaagatcaatgggactgtaactgagaacatgtctttaacggatgctcgaaaattgatagaaaagtcaagaggaaaactacagctagtggtgttgagagacagccagcagaccctcatcaacatcccgtcattaaatgacagtgactcagaaatagaagatatttcagaaatagagtcaaaccgatcattttctccagaggagagacgtcatcagtattctgattatgattatcattcctcaagtgagaagctgaaggaaaggccaagttccagagaggacacgccgagcagattgtccaggatgggtgcgacacccactccctttaagtccacaggggatattgcaggcacagttgtcccagagaccaacaaggaacccagataccaagaggaccccccagctcctcaaccaaaagcagccccgagaacttttcttcgtcctagtcctgaagatgaagcaatatatggccctaataccaaaatggtaaggttcaagaagggagacagcgtgggcctccggttggctggtggcaatgatgtcgggatatttgttgctggcattcaagaagggacctcggcggagcaggagggccttcaagaaggagaccagattctgaaggtgaacacacaggatttcagaggattagtgcgggaggatgccgttctctacctgttagaaatccctaaaggtgaaatggtgaccattttagctcagagccgagccgatgtgtatagagacatcctggcttgtggcagaggggattcgttttttataagaagccactttgaatgtgagaaggaaactccacagagcctggccttcaccagaggggaggtcttccgagtggtagacacactgtatgacggcaagctgggcaactggctggctgtgaggattgggaacgagttggagaaaggcttaatccccaacaagagcagagctgaacaaatggccagtgttcaaaatgcccagagagacaacgctggggaccgggcagatttctggagaatgcgtggccagaggtctggggtgaagaagaacctgaggaaaagtcgggaagacctcacagctgttgtgtctgtcagcaccaagttcccagcttatgagagggttttgctgcgagaagctggtttcaagagacctgtggtcttattcggccccatagctgatatagcaatggaaaaattggctaatgagttacctgactggtttcaaactgctaaaacggaaccaaaagatgcaggatctgagaaatccactggagtggtccggttaaataccgtgaggcaaattattgaacaggataagcatgcactactggatgtgactccgaaagctgtggacctgttgaattacacccagtggttcccaattgtgatttttttcaacccagactccagacaaggtgtcaaaaccatgagacaaaggttaaatccaacgtccaacaaaagttctcgaaagttatttgatcaagccaacaagcttaaaaaaacgtgtgcacacctttttacagctacaatcaacctaaattcagccaatgatagctggtttggcagcttaaaggacactattcagcatcagcaaggagaagcggtttgggtctctgaaggaaagatggaagggatggatgatgaccccgaagaccgcatgtcctacttaaccgccatgggcgcggactatctgagttgcgacagccgcctcatcagtgactttgaagacacggacggtgaaggaggcgcctacactgacaatgagctggatgagccagccgaggagccgctggtgtcgtccatcacccgctcctcggagccggtgcagcacgaggagatcgaaattgcccagaagcatcctgatatctatgcagttccaatcaaaacgcacaagccagaccctggcacgccccagcacacgagttccagaccccctgagccacagaaagctccttccagaccttatcaggataccagaggaagttatggcagtgatgccgaggaggaggagtaccgccagcagctgtcagaacactccaagcgcggttactatggccagtctgcccgataccgggacacagaattatagatgtctgagcacggactctcccaggcctgcctgcatggcatcagactagccactcctgccaggccgccgggatggttcttctccagttagaatgcaccatggagacgtggtgggactccagctcgtgtgtcctcatggagaacccaggggacagctggtgcaaattcagaactgagggctctgtttgtgggactgggttagaggagtctgtggctttttgttcagaattaagcagaacactgcagtcagatcctgttacttgcttcagtggaccgaaatctgtattctgtttgcgtacttgtaatatgtatattaagaagcaataactatttttcctcattaatagctgccttcaaggactgtttcagtgtgagtcagaatgtgaaaaaggaataaaaaatactgttgggctcaaactaaattcaaagaagtactttattgcaactcttttaagtgccttggatgagaagtgtcttaaattttcttcctttgaagctttaggcagagccataatggactaaaacattttgactaagtttttataccagcttaatagctgtagttttccctgcactgtgtcatcttttcaaggcatttgtctttgtaatattttccataaatttggactgtctatatcataactatacttgatagtttggctataagtgctcaatagcttgaagcccaagaagttggtatcgaaatttgttgtttgtttaaacccaagtgctgcacaaaagcagatacttgaggaaaacactatttccaaaagcacatgtattgacaacagttttataatttaataaaaaggaatacattgcaatccgtaa

SEQ ID NO: 191364 - DNA, 4611 bp, Homo sapiens
  Payload ID: 17799
  Gene Name: tight junction protein 2
  Uniprot ID: Q9UDY2
  ENST ID: ENST00000377245
  CDS Start-End: 209-3781
gcggaggcgccacgctcgggtcgggggcgggctgacgccgccgccgccgcgggaggagggacaaaggggtgggtccccgcgggtcggcaccccggcggttgggctgcgggtcagagcactgtccggtggtgcccaggaggagtaggagcaggagcagaagcagaagcggggtccggagctgcgcgcctacgcgggacctgtgtccgaaatgccggtgcgaggagaccgcgggtttccaccccggcgggagctgtcaggttggctccgcgccccaggcatggaagagctgatatgggaacagtacactgtgaccctacaaaaggattccaaaagaggatttggaattgcagtgtccggaggcagagacaacccccactttgaaaatggagaaacgtcaattgtcatttctgatgtgctcccgggtgggcctgctgatgggctgctccaagaaaatgacagagtggtcatggtcaatggcacccccatggaggatgtgcttcattcgtttgcagttcagcagctcagaaaaagtgggaaggtcgctgctattgtggtcaagaggccccggaaggtccaggtggccgcacttcaggccagccctcccctggatcaggatgaccgggcttttgaggtgatggacgagtttgatggcagaagtttccggagtggctacagcgagaggagccggctgaacagccatggggggcgcagccgcagctgggaggacagcccggaaagggggcgtccccatgagcgggcccggagccgggagcgggacctcagccgggaccggagccgtggccggagcctggagcggggcctggaccaagaccatgcgcgcacccgagaccgcagccgtggccggagcctggagcggggcctggaccacgactttgggccatcccgggaccgggaccgtgaccgcagccgcggccggagcattgaccaggactacgagcgagcctatcaccgggcctacgacccagactacgagcgggcctacagcccggagtacaggcgcggggcccgccacgatgcccgctctcggggaccccgaagccgcagccgcgagcacccgcactcacggagccccagccccgagcctagggggcggccggggcccatcggggtcctcctgatgaaaagcagagcgaacgaagagtatggtctccggcttgggagtcagatcttcgtaaaggaaatgacccgaacgggtctggcaactaaagatggcaaccttcacgaaggagacataattctcaagatcaatgggactgtaactgagaacatgtctttaacggatgctcgaaaattgatagaaaagtcaagaggaaaactacagctagtggtgttgagagacagccagcagaccctcatcaacatcccgtcattaaatgacagtgactcagaaatagaagatatttcagaaatagagtcaaaccgatcattttctccagaggagagacgtcatcagtattctgattatgattatcattcctcaagtgagaagctgaaggaaaggccaagttccagagaggacacgccgagcagattgtccaggatgggtgcgacacccactccctttaagtccacaggggatattgcaggcacagttgtcccagagaccaacaaggaacccagataccaagaggaccccccagctcctcaaccaaaagcagccccgagaacttttcttcgtcctagtcctgaagatgaagcaatatatggccctaataccaaaatggtaaggttcaagaagggagacagcgtgggcctccggttggctggtggcaatgatgtcgggatatttgttgctggcattcaagaagggacctcggcggagcaggagggccttcaagaaggagaccagattctgaaggtgaacacacaggatttcagaggattagtgcgggaggatgccgttctctacctgttagaaatccctaaaggtgaaatggtgaccattttagctcagagccgagccgatgtgtatagagacatcctggcttgtggcagaggggattcgttttttataagaagccactttgaatgtgagaaggaaactccacagagcctggccttcaccagaggggaggtcttccgagtggtagacacactgtatgacggcaagctgggcaactggctggctgtgaggattgggaacgagttggagaaaggcttaatccccaacaagagcagagctgaacaaatggccagtgttcaaaatgcccagagagacaacgctggggaccgggcagatttctggagaatgcgtggccagaggtctggggtgaagaagaacctgaggaaaagtcgggaagacctcacagctgttgtgtctgtcagcaccaagttcccagcttatgagagggttttgctgcgagaagctggtttcaagagacctgtggtcttattcggccccatagctgatatagcaatggaaaaattggctaatgagttacctgactggtttcaaactgctaaaacggaaccaaaagatgcaggatctgagaaatccactggagtggtccggttaaataccgtgaggcaaattattgaacaggataagcatgcactactggatgtgactccgaaagctgtggacctgttgaattacacccagtggttcccaattgtgatttttttcaacccagactccagacaaggtgtcaaaaccatgagacaaaggttaaatccaacgtccaacaaaagttctcgaaagttatttgatcaagccaacaagcttaaaaaaacgtgtgcacacctttttacagctacaatcaacctaaattcagccaatgatagctggtttggcagcttaaaggacactattcagcatcagcaaggagaagcggtttgggtctctgaaggaaagatggaagggatggatgatgaccccgaagaccgcatgtcctacttaaccgccatgggcgcggactatctgagttgcgacagccgcctcatcagtgactttgaagacacggacggtgaaggaggcgcctacactgacaatgagctggatgagccagccgaggagccgctggtgtcgtccatcacccgctcctcggagccggtgcagcacgaggagagcataaggaaacccagcccagagccacgagctcagatgaggagggctgctagcagcgatcaacttagggacaatagcccgcccccagcattcaagccagagccgcccaaggccaaaacccagaacaaagaagaatcctatgacttctccaaatcctatgaatataagtcaaacccctctgccgttgctggtaatgaaactcctggggcatctaccaaaggttatcctcctcctgttgcagcaaaacctacctttgggcggtctatactgaagccctccactcccatccctcctcaagagggtgaggaggtgggagagagcagtgaggagcaagataatgctcccaaatcagtcctgggcaaagtcaaaatatttgagaagatggatcacaaggccaggttacagagaatgcaggagctccaggaagcacagaatgcaaggatcgaaattgcccagaagcatcctgatatctatgcagttccaatcaaaacgcacaagccagaccctggcacgccccagcacacgagttccagaccccctgagccacagaaagctccttccagaccttatcaggataccagaggaagttatggcagtgatgccgaggaggaggagtaccgccagcagctgtcagaacactccaagcgcggttactatggccagtctgcccgataccgggacacagaattatagatgtctgagcacggactctcccaggcctgcctgcatggcatcagactagccactcctgccaggccgccgggatggttcttctccagttagaatgcaccatggagacgtggtgggactccagctcgtgtgtcctcatggagaacccaggggacagctggtgcaaattcagaactgagggctctgtttgtgggactgggttagaggagtctgtggctttttgttcagaattaagcagaacactgcagtcagatcctgttacttgcttcagtggaccgaaatctgtattctgtttgcgtacttgtaatatgtatattaagaagcaataactatttttcctcattaatagctgccttcaaggactgtttcagtgtgagtcagaatgtgaaaaaggaataaaaaatactgttgggctcaaactaaattcaaagaagtactttattgcaactcttttaagtgccttggatgagaagtgtcttaaattttcttcctttgaagctttaggcagagccataatggactaaaacattttgactaagtttttataccagcttaatagctgtagttttccctgcactgtgtcatcttttcaaggcatttgtctttgtaatattttccataaatttggactgtctatatcataactatacttgatagtttggctataagtgctcaatagcttgaagcccaagaagttggtatcgaaatttgttgtttgtttaaacccaagtgctgcacaaaagcagatacttgaggaaaacactatttccaaaagcacatgtattgacaacagttttataatttaataaaaaggaatacattgcaatccgtaa

SEQ ID NO: 191365 - DNA, 588 bp, Homo sapiens
  Payload ID: 17799
  Gene Name: tight junction protein 2
  ENST ID: ENST00000377259
  CDS Start-End: 136-441
tccagggtgcgaagtaccacattactgtcatctccctgtgagtgggattggcaccccggctgcagctccaggagcaagtactccaggaagcacagagctgtaccagtacacggcccacgttgccaggccccaggcatggaagagctgatatgggaacagtacactgtgaccctacaaaaggattccaaaagaggatttggaattgcagtgtccggaggcagagacaacccccactttgaaaatggagaaacgtcaattgtcatttctgatgtgctcccgggtgggcctgctgatgggctgctccaagaaaatgacagagtggtcatggtcaatggcacccccatggaggatgtgcttcattcgtttgcagttcagcagctcagaaaaagtgggaaggtcgctgctattgtaagtactgggtttgctttcagcttgccttaatagcattttggttttttgcccagaagaaaattaccccttgcttttaagcatttgacagaattacataacctagggaccgctgttcttggatcctcagtacttttggaggggtgtgaagatatgtgtaagttatcttcctacttttcc

SEQ ID NO: 191366 - DNA, 4129 bp, Homo sapiens
  Payload ID: 17799
  Gene Name: tight junction protein 2
  Uniprot ID: Q9UDY2
  ENST ID: ENST00000453658
  CDS Start-End: 233-3295
caccctctccgcctttcccgacaccccaaagtagcgctgcgagcagctgcgtctccctcccggggctcgcgcgcccagaaccctccggtctcaaggaagcagggtgcgaagtaccacattactgtcatctccctgtgagtgggattggcaccccggctgcagctccaggagcaagtactccaggaagcacagagctgtaccagtacacggcccacgttgccaggccccaggcatggaagagctgatatgggaacagtacactgtgaccctacaaaaggattccaaaagaggatttggaattgcagtgtccggaggcagagacaacccccactttgaaaatggagaaacgtcaattgtcatttctgatgtgctcccgggtgggcctgctgatgggctgctccaagaaaatgacagagtggtcatggtcaatggcacccccatggaggatgtgcttcattcgtttgcagttcagcagctcagaaaaagtgggaaggtcgctgctattgtggtcaagaggccccggaaggtccaggtggccgcacttcaggccagccctcccctggatcaggatgaccgggcttttgaggtgatggacgagtttgatggcagaagtttccggagtggctacagcgagaggagccggctgaacagccatggggggcgcagccgcagctgggaggacagcccggaaagggggcgtccccatgagcgggcccggagccgggagcgggacctcagccgggaccggagccgtggccggagcctggagcggggcctggaccaagaccatgcgcgcacccgagaccgcagccgtggccggagcctggagcggggcctggaccacgactttgggccatcccgggaccgggaccgtgaccgcagccgcggccggagcattgaccaggactacgagcgagcctatcaccgggcctacgacccagactacgagcgggcctacagcccggagtacaggcgcggggcccgccacgatgcccgctctcggggaccccgaagccgcagccgcgagcacccgcactcacggagccccagccccgagcctagggggcggccggggcccatcggggtcctcctgatgaaaagcagagcgaacgaagagtatggtctccggcttgggagtcagatcttcgtaaaggaaatgacccgaacgggtctggcaactaaagatggcaaccttcacgaaggagacataattctcaagatcaatgggactgtaactgagaacatgtctttaacggatgctcgaaaattgatagaaaagtcaagaggaaaactacagctagtggtgttgagagacagccagcagaccctcatcaacatcccgtcattaaatgacagtgactcagaaatagaagatatttcagaaatagagtcaaaccgatcattttctccagaggagagacgtcatcagtattctgattatgattatcattcctcaagtgagaagctgaaggaaaggccaagttccagagaggacacgccgagcagattgtccaggatgggtgcgacacccactccctttaagtccacaggggatattgcaggcacagttgtcccagagaccaacaaggaacccagataccaagaggaccccccagctcctcaaccaaaagcagccccgagaacttttcttcgtcctagtcctgaagatgaagcaatatatggccctaataccaaaatggtaaggttcaagaagggagacagcgtgggcctccggttggctggtggcaatgatgtcgggatatttgttgctggcattcaagaagggacctcggcggagcaggagggccttcaagaaggagaccagattctgaaggtgaacacacaggatttcagaggattagtgcgggaggatgccgttctctacctgttagaaatccctaaaggtgaaatggtgaccattttagctcagagccgagccgatgtgtatagagacatcctggcttgtggcagaggggattcgttttttataagaagccactttgaatgtgagaaggaaactccacagagcctggccttcaccagaggggaggtcttccgagtggtagacacactgtatgacggcaagctgggcaactggctggctgtgaggattgggaacgagttggagaaaggcttaatccccaacaagagcagagctgaacaaatggccagtgttcaaaatgcccagagagacaacgctggggaccgggcagatttctggagaatgcgtggccagaggtctggggtgaagaagaacctgaggaaaagtcgggaagacctcacagctgttgtgtctgtcagcaccaagttcccagcttatgagagggttttgctgcgagaagctggtttcaagagacctgtggtcttattcggccccatagctgatatagcaatggaaaaattggctaatgagttacctgactggtttcaaactgctaaaacggaaccaaaagatgcaggatctgagaaatccactggagtggtccggttaaataccgtgaggcaaattattgaacaggataagcatgcactactggatgtgactccgaaagctgtggacctgttgaattacacccagtggttcccaattgtgatttttttcaacccagactccagacaaggtgtcaaaaccatgagacaaaggttaaatccaacgtccaacaaaagttctcgaaagttatttgatcaagccaacaagcttaaaaaaacgtgtgcacacctttttacagctacaatcaacctaaattcagccaatgatagctggtttggcagcttaaaggacactattcagcatcagcaaggagaagcggtttgggtctctgaaggaaagatggaagggatggatgatgaccccgaagaccgcatgtcctacttaaccgccatgggcgcggactatctgagttgcgacagccgcctcatcagtgactttgaagacacggacggtgaaggaggcgcctacactgacaatgagctggatgagccagccgaggagccgctggtgtcgtccatcacccgctcctcggagccggtgcagcacgaggagatcgaaattgcccagaagcatcctgatatctatgcagttccaatcaaaacgcacaagccagaccctggcacgccccagcacacgagttccagaccccctgagccacagaaagctccttccagaccttatcaggataccagaggaagttatggcagtgatgccgaggaggaggagtaccgccagcagctgtcagaacactccaagcgcggttactatggccagtctgcccgataccgggacacagaattatagatgtctgagcacggactctcccaggcctgcctgcatggcatcagactagccactcctgccaggccgccgggatggttcttctccagttagaatgcaccatggagacgtggtgggactccagctcgtgtgtcctcatggagaacccaggggacagctggtgcaaattcagaactgagggctctgtttgtgggactgggttagaggagtctgtggctttttgttcagaattaagcagaacactgcagtcagatcctgttacttgcttcagtggaccgaaatctgtattctgtttgcgtacttgtaatatgtatattaagaagcaataactatttttcctcattaatagctgccttcaaggactgtttcagtgtgagtcagaatgtgaaaaaggaataaaaaatactgttgggctcaaactaaattcaaagaagtactttattgcaactcttttaagtgccttggatgagaagtgtcttaaattttcttcctttgaagctttaggcagagccataatggactaaaacattttgactaagtttttataccagcttaatagctgtagttttccctgcactgtgtcatcttttcaaggcatttgtctttgtaatattttccataaatttggactgtctatatcataactatacttgatagtttggctataagtgctcaatagcttgaagcccaagaagttggtatcgaaatttgttgtttgtttaaacccaagtgctgcacaaaagcagatacttgaggaaaacactatttccaaaagcacatgtattgacaacagttttataatttaataaaaaggaatacattgcaatccgtaatttt

SEQ ID NO: 191367 - DNA, 614 bp, Homo sapiens
  Payload ID: 17799
  Gene Name: tight junction protein 2
  ENST ID: ENST00000423935
  CDS Start-End: 132-614
gggtgcgaagtaccacattactgtcatctccctgtgagtgggattggcaccccggctgcagctccaggagcaagtactccaggaagcacagagctgtaccagtacacggcccacgttgccaggccccaggcatggaagagctgatatgggaacagtacactgtgaccctacaaaaggattccaaaagaggatttggaattgcagtgtccggaggcagagacaacccccactttgaaaatggagaaacgtcaattgtcatttctgatgtgctcccgggtgggcctgctgatgggctgctccaagaaaatgacagagtggtcatggtcaatggcacccccatggaggatgtgcttcattcgtttgcagttcagcagctcagaaaaagtgggaaggtcgctgctattgtggtcaagaggccccggaaggtccaggtggccgcacttcaggccagccctcccctggatcaggatgaccgggcttttgaggtgatggacgagtttgatggcagaagtttccggagtggctacagcgagaggagccggctgaacagccatggggggcgcagccgcagctgggaggacagcccggaaagggggcgtccccatgagcgggcc

SEQ ID NO: 191368 - DNA, 4500 bp, Homo sapiens
  Payload ID: 17799
  Gene Name: tight junction protein 2
  Uniprot ID: Q9UDY2
  ENST ID: ENST00000539225
  CDS Start-End: 1-3666
atgaagactgctcaagccctacataggatgtggatccaggctgttaaaaagttgaggagatggaaaggccgtgtgagtccctctgcaagctctccccttgttttccccaacctttcttcatgggaaggggagggaagcaaaaccattctcacagccccaggcatggaagagctgatatgggaacagtacactgtgaccctacaaaaggattccaaaagaggatttggaattgcagtgtccggaggcagagacaacccccactttgaaaatggagaaacgtcaattgtcatttctgatgtgctcccgggtgggcctgctgatgggctgctccaagaaaatgacagagtggtcatggtcaatggcacccccatggaggatgtgcttcattcgtttgcagttcagcagctcagaaaaagtgggaaggtcgctgctattgtggtcaagaggccccggaaggtccaggtggccgcacttcaggccagccctcccctggatcaggatgaccgggcttttgaggtgatggacgagtttgatggcagaagtttccggagtggctacagcgagaggagccggctgaacagccatggggggcgcagccgcagctgggaggacagcccggaaagggggcgtccccatgagcgggcccggagccgggagcgggacctcagccgggaccggagccgtggccggagcctggagcggggcctggaccaagaccatgcgcgcacccgagaccgcagccgtggccggagcctggagcggggcctggaccacgactttgggccatcccgggaccgggaccgtgaccgcagccgcggccggagcattgaccaggactacgagcgagcctatcaccgggcctacgacccagactacgagcgggcctacagcccggagtacaggcgcggggcccgccacgatgcccgctctcggggaccccgaagccgcagccgcgagcacccgcactcacggagccccagccccgagcctagggggcggccggggcccatcggggtcctcctgatgaaaagcagagcgaacgaagagtatggtctccggcttgggagtcagatcttcgtaaaggaaatgacccgaacgggtctggcaactaaagatggcaaccttcacgaaggagacataattctcaagatcaatgggactgtaactgagaacatgtctttaacggatgctcgaaaattgatagaaaagtcaagaggaaaactacagctagtggtgttgagagacagccagcagaccctcatcaacatcccgtcattaaatgacagtgactcagaaatagaagatatttcagaaatagagtcaaaccgatcattttctccagaggagagacgtcatcagtattctgattatgattatcattcctcaagtgagaagctgaaggaaaggccaagttccagagaggacacgccgagcagattgtccaggatgggtgcgacacccactccctttaagtccacaggggatattgcaggcacagttgtcccagagaccaacaaggaacccagataccaagaggaccccccagctcctcaaccaaaagcagccccgagaacttttcttcgtcctagtcctgaagatgaagcaatatatggccctaataccaaaatggtaaggttcaagaagggagacagcgtgggcctccggttggctggtggcaatgatgtcgggatatttgttgctggcattcaagaagggacctcggcggagcaggagggccttcaagaaggagaccagattctgaaggtgaacacacaggatttcagaggattagtgcgggaggatgccgttctctacctgttagaaatccctaaaggtgaaatggtgaccattttagctcagagccgagccgatgtgtatagagacatcctggcttgtggcagaggggattcgttttttataagaagccactttgaatgtgagaaggaaactccacagagcctggccttcaccagaggggaggtcttccgagtggtagacacactgtatgacggcaagctgggcaactggctggctgtgaggattgggaacgagttggagaaaggcttaatccccaacaagagcagagctgaacaaatggccagtgttcaaaatgcccagagagacaacgctggggaccgggcagatttctggagaatgcgtggccagaggtctggggtgaagaagaacctgaggaaaagtcgggaagacctcacagctgttgtgtctgtcagcaccaagttcccagcttatgagagggttttgctgcgagaagctggtttcaagagacctgtggtcttattcggccccatagctgatatagcaatggaaaaattggctaatgagttacctgactggtttcaaactgctaaaacggaaccaaaagatgcaggatctgagaaatccactggagtggtccggttaaataccgtgaggcaaattattgaacaggataagcatgcactactggatgtgactccgaaagctgtggacctgttgaattacacccagtggttcccaattgtgatttttttcaacccagactccagacaaggtgtcaaaaccatgagacaaaggttaaatccaacgtccaacaaaagttctcgaaagttatttgatcaagccaacaagcttaaaaaaacgtgtgcacacctttttacagctacaatcaacctaaattcagccaatgatagctggtttggcagcttaaaggacactattcagcatcagcaaggagaagcggtttgggtctctgaaggaaagatggaagggatggatgatgaccccgaagaccgcatgtcctacttaaccgccatgggcgcggactatctgagttgcgacagccgcctcatcagtgactttgaagacacggacggtgaaggaggcgcctacactgacaatgagctggatgagccagccgaggagccgctggtgtcgtccatcacccgctcctcggagccggtgcagcacgaggagagcataaggaaacccagcccagagccacgagctcagatgaggagggctgctagcagcgatcaacttagggacaatagcccgcccccagcattcaagccagagccgcccaaggccaaaacccagaacaaagaagaatcctatgacttctccaaatcctatgaatataagtcaaacccctctgccgttgctggtaatgaaactcctggggcatctaccaaaggttatcctcctcctgttgcagcaaaacctacctttgggcggtctatactgaagccctccactcccatccctcctcaagagggtgaggaggtgggagagagcagtgaggagcaagataatgctcccaaatcagtcctgggcaaagtcaaaatatttgagaagatggatcacaaggccaggttacagagaatgcaggagctccaggaagcacagaatgcaaggatcgaaattgcccagaagcatcctgatatctatgcagttccaatcaaaacgcacaagccagaccctggcacgccccagcacacgagttccagaccccctgagccacagaaagctccttccagaccttatcaggataccagaggaagttatggcagtgatgccgaggaggaggagtaccgccagcagctgtcagaacactccaagcgcggttactatggccagtctgcccgataccgggacacagaattatagatgtctgagcacggactctcccaggcctgcctgcatggcatcagactagccactcctgccaggccgccgggatggttcttctccagttagaatgcaccatggagacgtggtgggactccagctcgtgtgtcctcatggagaacccaggggacagctggtgcaaattcagaactgagggctctgtttgtgggactgggttagaggagtctgtggctttttgttcagaattaagcagaacactgcagtcagatcctgttacttgcttcagtggaccgaaatctgtattctgtttgcgtacttgtaatatgtatattaagaagcaataactatttttcctcattaatagctgccttcaaggactgtttcagtgtgagtcagaatgtgaaaaaggaataaaaaatactgttgggctcaaactaaattcaaagaagtactttattgcaactcttttaagtgccttggatgagaagtgtcttaaattttcttcctttgaagctttaggcagagccataatggactaaaacattttgactaagtttttataccagcttaatagctgtagttttccctgcactgtgtcatcttttcaaggcatttgtctttgtaatattttccataaatttggactgtctatatcataactatacttgatagtttggctataagtgctcaatagcttgaagcccaagaagttggtatcgaaatttgttgtttgtttaaacccaagtgctgcacaaaagcagatacttgaggaaaacactatttccaaaagcacatgtattgacaacagttttataatttaataaaaaggaatacattgcaatccgtaatttt

SEQ ID NO: 191369 - DNA, 4459 bp, Homo sapiens
  Payload ID: 17799
  Gene Name: tight junction protein 2
  Uniprot ID: Q9UDY2
  ENST ID: ENST00000535702
  CDS Start-End: 152-3625
atatggatgtgtcactgtgtgagatgacaacaggatttgctggaaatgtgggccactattgtatccgccttacgtaaccacatggagtgatggaaatgggtgagcagcccggaatgtaggcggtggcctggcccatgcatctccagagaccatgaagactgctcaagccctacataggatgtggatccaggctgttaaaaagttgaggagatggaaaggccgtgccccaggcatggaagagctgatatgggaacagtacactgtgaccctacaaaaggattccaaaagaggatttggaattgcagtgtccggaggcagagacaacccccactttgaaaatggagaaacgtcaattgtcatttctgatgtgctcccgggtgggcctgctgatgggctgctccaagaaaatgacagagtggtcatggtcaatggcacccccatggaggatgtgcttcattcgtttgcagttcagcagctcagaaaaagtgggaaggtcgctgctattgtggtcaagaggccccggaaggtccaggtggccgcacttcaggccagccctcccctggatcaggatgaccgggcttttgaggtgatggacgagtttgatggcagaagtttccggagtggctacagcgagaggagccggctgaacagccatggggggcgcagccgcagctgggaggacagcccggaaagggggcgtccccatgagcgggcccggagccgggagcgggacctcagccgggaccggagccgtggccggagcctggagcggggcctggaccaagaccatgcgcgcacccgagaccgcagccgtggccggagcctggagcggggcctggaccacgactttgggccatcccgggaccgggaccgtgaccgcagccgcggccggagcattgaccaggactacgagcgagcctatcaccgggcctacgacccagactacgagcgggcctacagcccggagtacaggcgcggggcccgccacgatgcccgctctcggggaccccgaagccgcagccgcgagcacccgcactcacggagccccagccccgagcctagggggcggccggggcccatcggggtcctcctgatgaaaagcagagcgaacgaagagtatggtctccggcttgggagtcagatcttcgtaaaggaaatgacccgaacgggtctggcaactaaagatggcaaccttcacgaaggagacataattctcaagatcaatgggactgtaactgagaacatgtctttaacggatgctcgaaaattgatagaaaagtcaagaggaaaactacagctagtggtgttgagagacagccagcagaccctcatcaacatcccgtcattaaatgacagtgactcagaaatagaagatatttcagaaatagagtcaaaccgatcattttctccagaggagagacgtcatcagtattctgattatgattatcattcctcaagtgagaagctgaaggaaaggccaagttccagagaggacacgccgagcagattgtccaggatgggtgcgacacccactccctttaagtccacaggggatattgcaggcacagttgtcccagagaccaacaaggaacccagataccaagaggaccccccagctcctcaaccaaaagcagccccgagaacttttcttcgtcctagtcctgaagatgaagcaatatatggccctaataccaaaatggtaaggttcaagaagggagacagcgtgggcctccggttggctggtggcaatgatgtcgggatatttgttgctggcattcaagaagggacctcggcggagcaggagggccttcaagaaggagaccagattctgaaggtgaacacacaggatttcagaggattagtgcgggaggatgccgttctctacctgttagaaatccctaaaggtgaaatggtgaccattttagctcagagccgagccgatgtgtatagagacatcctggcttgtggcagaggggattcgttttttataagaagccactttgaatgtgagaaggaaactccacagagcctggccttcaccagaggggaggtcttccgagtggtagacacactgtatgacggcaagctgggcaactggctggctgtgaggattgggaacgagttggagaaaggcttaatccccaacaagagcagagctgaacaaatggccagtgttcaaaatgcccagagagacaacgctggggaccgggcagatttctggagaatgcgtggccagaggtctggggtgaagaagaacctgaggaaaagtcgggaagacctcacagctgttgtgtctgtcagcaccaagttcccagcttatgagagggttttgctgcgagaagctggtttcaagagacctgtggtcttattcggccccatagctgatatagcaatggaaaaattggctaatgagttacctgactggtttcaaactgctaaaacggaaccaaaagatgcaggatctgagaaatccactggagtggtccggttaaataccgtgaggcaaattattgaacaggataagcatgcactactggatgtgactccgaaagctgtggacctgttgaattacacccagtggttcccaattgtgatttttttcaacccagactccagacaaggtgtcaaaaccatgagacaaaggttaaatccaacgtccaacaaaagttctcgaaagttatttgatcaagccaacaagcttaaaaaaacgtgtgcacacctttttacagctacaatcaacctaaattcagccaatgatagctggtttggcagcttaaaggacactattcagcatcagcaaggagaagcggtttgggtctctgaaggaaagatggaagggatggatgatgaccccgaagaccgcatgtcctacttaaccgccatgggcgcggactatctgagttgcgacagccgcctcatcagtgactttgaagacacggacggtgaaggaggcgcctacactgacaatgagctggatgagccagccgaggagccgctggtgtcgtccatcacccgctcctcggagccggtgcagcacgaggaggccaaaacccagaacaaagaagaatcctatgacttctccaaatcctatgaatataagtcaaacccctctgccgttgctggtaatgaaactcctggggcatctaccaaaggttatcctcctcctgttgcagcaaaacctacctttgggcggtctatactgaagccctccactcccatccctcctcaagagggtgaggaggtgggagagagcagtgaggagcaagataatgctcccaaatcagtcctgggcaaagtcaaaatatttgagaagatggatcacaaggccaggttacagagaatgcaggagctccaggaagcacagaatgcaaggatcgaaattgcccagaagcatcctgatatctatgcagttccaatcaaaacgcacaagccagaccctggcacgccccagcacacgagttccagaccccctgagccacagaaagctccttccagaccttatcaggataccagaggaagttatggcagtgatgccgaggaggaggagtaccgccagcagctgtcagaacactccaagcgcggttactatggccagtctgcccgataccgggacacagaattatagatgtctgagcacggactctcccaggcctgcctgcatggcatcagactagccactcctgccaggccgccgggatggttcttctccagttagaatgcaccatggagacgtggtgggactccagctcgtgtgtcctcatggagaacccaggggacagctggtgcaaattcagaactgagggctctgtttgtgggactgggttagaggagtctgtggctttttgttcagaattaagcagaacactgcagtcagatcctgttacttgcttcagtggaccgaaatctgtattctgtttgcgtacttgtaatatgtatattaagaagcaataactatttttcctcattaatagctgccttcaaggactgtttcagtgtgagtcagaatgtgaaaaaggaataaaaaatactgttgggctcaaactaaattcaaagaagtactttattgcaactcttttaagtgccttggatgagaagtgtcttaaattttcttcctttgaagctttaggcagagccataatggactaaaacattttgactaagtttttataccagcttaatagctgtagttttccctgcactgtgtcatcttttcaaggcatttgtctttgtaatattttccataaatttggactgtctatatcataactatacttgatagtttggctataagtgctcaatagcttgaagcccaagaagttggtatcgaaatttgttgtttgtttaaacccaagtgctgcacaaaagcagatacttgaggaaaacactatttccaaaagcacatgtattgacaacagttttataatttaataaaaaggaatacattgcaatccgtaatttt

SEQ ID NO: 191370 - DNA, 591 bp, Homo sapiens
  Payload ID: 17799
  Gene Name: tight junction protein 2
  ENST ID: ENST00000606364
  CDS Start-End: 189-591
agctgcgtctccctcccggggctcgcgcgcccagaaccctccggtctcaaggaagcagggtgcgaagtaccacattactgtcatctccctgtgagtgggattggcaccccggctgcagctccaggagcaagtactccaggaagcacagagctgtaccagtacacggcccacgttgccaggccccaggcatggaagagctgatatgggaacagtacactgtgaccctacaaaaggattccaaaagaggatttggaattgcagtgtccggaggcagagacaacccccactttgaaaatggagaaacgtcaattgtcatttctgatgtgctcccgggtgggcctgctgatgggctgctccaagaaaatgacagagtggtcatggtcaatggcacccccatggaggatgtgcttcattcgtttgcagttcagcagctcagaaaaagtgggaaggtcgctgctattgtggtcaagaggccccggaaggtccaggtggccgcacttcaggccagccctcccctggatcaggatgaccgggcttttgaggtgatggacgagtttgatggcagaagtttccggagtggctacagcgaga

SEQ ID NO: 191371 - DNA, 3350 bp, Homo sapiens
  Payload ID: 17800
  Gene Name: tight junction protein 3
  Uniprot ID: O95049
  ENST ID: ENST00000541714
  CDS Start-End: 463-3222
agatgcaagaagcaggagggagggggactccgggagtgcggtccattcatgtctgaatgtagccaacgagggtttcctaagcacctaccatgtgcggacgcttgataccagggcctcggcggtgagggcacaggcaggagcaagctcacctctgggcaagcaggggttaaggccagttgctcccacgtgagggcaccttgcgacagagccacacacccagtcctcctgctggcccgcccctcaccctggtccgtctccctgtgtctgtggtcgtcagttccactggcaggggacctgcctccctgttgccaccacaagagaggaaaagttggtcaaacaggtggggaggccagagctacaagcctcgggttccctccccaccacccgtgccaggcaggcacccgggccctggcacctgctgcctgcccagaggccacccagcctcctagacaggtggctgacatggaggagctgaccatctgggaacagcacacggccacactgtccaaggacccccgccggggctttggcattgcgatctctggaggccgagaccggcccggtggatccatggttgtatctgacgtggtacctggagggccggcggagggcaggctacagacaggcgaccacatcgtcatggtgaacggggtttccatggagaatgccacctccgcgtttgccattcagatactcaagacctgcaccaagatggccaacatcacagtgaaacgtccccggaggatccacctgcccgccaccaaagccagcccctccagcccagggcgccaggactcggatgaagacgatgggccccagcgggtggaggaggtggaccagggccggggctatgacggcgactcatccagtggctccggccgctcctgggacgagcgctcccgccggccgaggcctggtcgccggggccgggccggcagccatgggcgtaggagcccaggtggtggctctgaggccaacgggctggccctggtgtccggctttaagcggctgccacggcaggacgtgcagatgaagcctgtgaagtcagtgctggtgaagaggagagacagcgaagagtttggcgtcaagctgggcagtcagatcttcatcaagcacattacagattcgggcctggctgcccggcaccgtgggctgcaggaaggagatctcattctacagatcaacggggtgtctagccagaacctgtcactgaacgacacccggcgactgattgagaagtcagaagggaagctaagcctgctggtgctgagagatcgtgggcagttcctggtgaacattccgcctgctgtcagtgacagcgacagctcgccattggaggacatctcggacctcgcctcggagctatcgcaggcaccaccatcccacatcccaccaccaccccggcatgctcagcggagccccgaggccagccagaccgactctcccgtggagagtccccggcttcggcgggaaagttcagtagattccagaaccatctcggaaccagatgagcaacggtcagagttgcccagggaaagcagctatgacatctacagagtgcccagcagtcagagcatggaggatcgtgggtacagccccgacacgcgtgtggtccgcttcctcaagggcaagagcatcgggctgcggctggcagggggcaatgacgtgggcatcttcgtgtccggggtgcaggcgggcagcccggccgacgggcagggcatccaggagggagatcagattctgcaggtgaatgacgtgccattccagaacctgacacgggaggaggcagtgcagttcctgctggggctgccaccaggcgaggagatggagctggtgacgcagaggaagcaggacattttctggaaaatggtgcagtcccgcgtgggtgactccttctacatccgcactcactttgagctggagcccagtccaccgtctggcctgggcttcacccgtggcgacgtcttccacgtgctggacacgctgcaccccggccccgggcagagccacgcacgaggaggccactggctggcggtgcgcatgggtcgtgacctgcgggagcaagagcggggcatcattcccaaccagagcagggcggagcagctggccagcctggaagctgcccagagggccgtgggagtcgggcccggctcctccgcgggctccaatgctcgggccgagttctggcggctgcggggtcttcgtcgaggagccaagaagaccactcagcggagccgtgaggacctctcagctctgacccgacagggccgctacccgccctacgaacgagtggtgttgcgagaagccagtttcaagcgcccggtagtgatcctgggacccgtggccgacattgctatgcagaagttgactgctgagatgcctgaccagtttgaaatcgcagagactgtgtccaggaccgacagcccctccaagatcatcaaactagacaccgtgcgggtgattgcagaaaaagacaagcatgcgctcctggatgtgaccccctccgccatcgagcgcctcaactatgtgcagtactaccccattgtggtcttcttcatccccgagagccggccggccctcaaggcactgcgccagtggctggcgcctgcctcccgccgcagcacccgtcgcctctacgcacaagcccagaagctgcgaaaacacagcagccacctcttcacagccaccatccctctgaatggcacgagtgacacctggtaccaggagctcaaggccatcattcgagagcagcagacgcggcccatctggacggcggaagatcagctggatggctccttggaggacaacctagacctccctcaccacggcctggccgacagctccgctgacctcagctgcgacagccgcgttaacagcgactacgagacggacggcgagggcggcgcgtacacggatggcgagggctacacagacggcgagggggggccctacacggatgtggatgatgagcccccggctccagccctggcccggtcctcggagcccgtgcaggcagatgagtcccagagcccgagggatcgtgggagaatctcggctcatcagggggcccaggtggacagccgccacccccagggacagtggcgacaggacagcatgcgaacctatgaacgggaagccctgaagaaaaagtttatgcgagtacatgatgcggagtcctccgatgaagacggctatgactggggtccggccactgacctgtgacctctcgaaggctgccagctggtccgtcctccttctccctccctggggctgggactcagtttcccatacagaacccacaaccttacctccctccgcctggtctttaataaacagagtattttcacagc

SEQ ID NO: 191372 - DNA, 2897 bp, Homo sapiens
  Payload ID: 17800
  Gene Name: tight junction protein 3
  Uniprot ID: O95049
  ENST ID: ENST00000539908
  CDS Start-End: 120-2771
caggcacccgggccctggcacctgctgcctgcccagaggccacccagcctcctagacaggacccccgccggggctttggcattgcgatctctggaggccgagaccggcccggtggatccatggttgtatctgacgtggtacctggagggccggcggagggcaggctacagacaggcgaccacatcgtcatggtgaacggggtttccatggagaatgccacctccgcgtttgccattcagatactcaagacctgcaccaagatggccaacatcacagtgaaacgtccccggaggatccacctgcccgccaccaaagccagcccctccagcccagggcgccaggactcggatgaagacgatgggccccagcgggtggaggaggtggaccagggccggggctatgacggcgactcatccagtggctccggccgctcctgggacgagcgctcccgccggccgaggcctggtcgccggggccgggccggcagccatgggcgtaggagcccaggtggtggctctgaggccaacgggctggccctggtgtccggctttaagcggctgccacggcaggacgtgcagatgaagcctgtgaagtcagtgctggtgaagaggagagacagcgaagagtttggcgtcaagctgggcagtcagatcttcatcaagcacattacagattcgggcctggctgcccggcaccgtgggctgcaggaaggagatctcattctacagatcaacggggtgtctagccagaacctgtcactgaacgacacccggcgactgattgagaagtcagaagggaagctaagcctgctggtgctgagagatcgtgggcagttcctggtgaacattccgcctgctgtcagtgacagcgacagctcgccattggaggacatctcggacctcgcctcggagctatcgcaggcaccaccatcccacatcccaccaccaccccggcatgctcagcggagccccgaggccagccagaccgactctcccgtggagagtccccggcttcggcgggaaagttcagtagattccagaaccatctcggaaccagatgagcaacggtcagagttgcccagggaaagcagctatgacatctacagagtgcccagcagtcagagcatggaggatcgtgggtacagccccgacacgcgtgtggtccgcttcctcaagggcaagagcatcgggctgcggctggcagggggcaatgacgtgggcatcttcgtgtccggggtgcaggcgggcagcccggccgacgggcagggcatccaggagggagatcagattctgcaggtgaatgacgtgccattccagaacctgacacgggaggaggcagtgcagttcctgctggggctgccaccaggcgaggagatggagctggtgacgcagaggaagcaggacattttctggaaaatggtgcagtcccgcgtgggtgactccttctacatccgcactcactttgagctggagcccagtccaccgtctggcctgggcttcacccgtggcgacgtcttccacgtgctggacacgctgcaccccggccccgggcagagccacgcacgaggaggccactggctggcggtgcgcatgggtcgtgacctgcgggagcaagagcggggcatcattcccaaccagagcagggcggagcagctggccagcctggaagctgcccagagggccgtgggagtcgggcccggctcctccgcgggctccaatgctcgggccgagttctggcggctgcggggtcttcgtcgaggagccaagaagaccactcagcggagccgtgaggacctctcagctctgacccgacagggccgctacccgccctacgaacgagtggtgttgcgagaagccagtttcaagcgcccggtagtgatcctgggacccgtggccgacattgctatgcagaagttgactgctgagatgcctgaccagtttgaaatcgcagagactgtgtccaggaccgacagcccctccaagatcatcaaactagacaccgtgcgggtgattgcagaaaaagacaagcatgcgctcctggatgtgaccccctccgccatcgagcgcctcaactatgtgcagtactaccccattgtggtcttcttcatccccgagagccggccggccctcaaggcactgcgccagtggctggcgcctgcctcccgccgcagcacccgtcgcctctacgcacaagcccagaagctgcgaaaacacagcagccacctcttcacagccaccatccctctgaatggcacgagtgacacctggtaccaggagctcaaggccatcattcgagagcagcagacgcggcccatctggacggcggaagatcagctggatggctccttggaggacaacctagacctccctcaccacggcctggccgacagctccgctgacctcagctgcgacagccgcgttaacagcgactacgagacggacggcgagggcggcgcgtacacggatggcgagggctacacagacggcgagggggggccctacacggatgtggatgatgagcccccggctccagccctggcccggtcctcggagcccgtgcaggcagatgagtcccagagcccgagggatcgtgggagaatctcggctcatcagggggcccaggtggacagccgccacccccagggacagtggcgacaggacagcatgcgaacctatgaacgggaagccctgaagaaaaagtttatgcgagtacatgatgcggagtcctccgatgaagacggctatgactggggtccggccactgacctgtgacctctcgaaggctgccagctggtccgtcctccttctccctccctggggctgggactcagtttcccatacagaacccacaaccttacctccctccgcctggtctttaataaacagagtattttcaca

SEQ ID NO: 191373 - DNA, 680 bp, Homo sapiens
  Payload ID: 17800
  Gene Name: tight junction protein 3
  ENST ID: ENST00000586032
  CDS Start-End: 1-178
cctctacgcacaagcccagaagctgcgaaaacacagcagccacctcttcacaggagctcaaggccatcattcgagagcagcagacgcggcccatctggacggcggaagatcagctggatggctccttggaggacaacctagacctccctcaccacggcctggccgacagctccgctgacctcagctgcgacagccgcgttaacagcgactacgagacggacggcgagggcggcgcgtacacggatggcgagggctacacagacggcgagggggggccctacacggatgtggatgatgagcccccggctccagccctggcccggtcctcggagcccgtgcaggcagatgagtcccagagcccgagggatcgtgggagaatctcggctcatcagggggcccaggtggacagccgccacccccagggacagtggcgacaggacagcatgcgaacctatgaacgggaagccctgaagaaaaagtttatgcgagtacatgatgcggagtcctccgatgaagacggctatgactggggtccggccactgacctgtgacctctcgaaggctgccagctggtccgtcctccttctccctccctggggctgggactcagtttcccatacagaacccacaaccttacctccctccgcctggtctttaataaacagagtattttcacagca

SEQ ID NO: 191374 - DNA, 3068 bp, Homo sapiens
  Payload ID: 17800
  Gene Name: tight junction protein 3
  Uniprot ID: O95049
  ENST ID: ENST00000589378
  CDS Start-End: 157-2943
agccgggagctgcggagctggagggaggaggacgagagcccggccctcagcccgctgtgactctcctcagccccctcccccagcccggggtgggggccgattgactgtttccaggaccccctcgggtaggggggctggagagcccccaggtggaccatggcggtgagattccaggtggctgacatggaggagctgaccatctgggaacagcacacggccacactgtccaaggacccccgccggggctttggcattgcgatctctggaggccgagaccggcccggtggatccatggttgtatctgacgtggtacctggagggccggcggagggcaggctacagacaggcgaccacatcgtcatggtgaacggggtttccatggagaatgccacctccgcgtttgccattcagatactcaagacctgcaccaagatggccaacatcacagtgaaacgtccccggaggatccacctgcccgccaccaaagccagcccctccagcccagggcgccaggactcggatgaagacgatgggccccagcgggtggaggaggtggaccagggccggggctatgacggcgactcatccagtggctccggccgctcctgggacgagcgctcccgccggccgaggcctggtcgccggggccgggccggcagccatgggcgtaggagcccaggtggtggctctgaggccaacgggctggccctggtgtccggctttaagcggctgccacggcaggacgtgcagatgaagcctgtgaagtcagtgctggtgaagaggagagacagcgaagagtttggcgtcaagctgggcagtcagatcttcatcaagcacattacagattcgggcctggctgcccggcaccgtgggctgcaggaaggagatctcattctacagatcaacggggtgtctagccagaacctgtcactgaacgacacccggcgactgattgagaagtcagaagggaagctaagcctgctggtgctgagagatcgtgggcagttcctggtgaacattccgcctgctgtcagtgacagcgacagctcgccattggaggacatctcggacctcgcctcggagctatcgcaggcaccaccatcccacatcccaccaccaccccggcatgctcagcggagccccgaggccagccagaccgactctcccgtggagagtccccggcttcggcgggaaagttcagtagattccagaaccatctcggaaccagatgagcaacggtcagagttgcccagggaaagcagctatgacatctacagagtgcccagcagtcagagcatggaggatcgtgggtacagccccgacacgcgtgtggtccgcttcctcaagggcaagagcatcgggctgcggctggcagggggcaatgacgtgggcatcttcgtgtccggggtgcaggcgggcagcccggccgacgggcagggcatccaggagggagatcagattctgcaggtgaatgacgtgccattccagaacctgacacgggaggaggcagtgcagttcctgctggggctgccaccaggcgaggagatggagctggtgacgcagaggaagcaggacattttctggaaaatggtgcagtcccgcgtgggtgactccttctacatccgcactcactttgagctggagcccagtccaccgtctggcctgggcttcacccgtggcgacgtcttccacgtgctggacacgctgcaccccggccccgggcagagccacgcacgaggaggccactggctggcggtgcgcatgggtcgtgacctgcgggagcaagagcggggcatcattcccaaccagagcagggcggagcagctggccagcctggaagctgcccagagggccgtgggagtcgggcccggctcctccgcgggctccaatgctcgggccgagttctggcggctgcggggtcttcgtcgaggagccaagaagaccactcagcggagccgtgaggacctctcagctctgacccgacagggccgctacccgccctacgaacgagtggtgttgcgagaagccagtttcaagcgcccggtagtgatcctgggacccgtggccgacattgctatgcagaagttgactgctgagatgcctgaccagtttgaaatcgcagagactgtgtccaggaccgacagcccctccaagatcatcaaactagacaccgtgcgggtgattgcagaaaaagacaagcatgcgctcctggatgtgaccccctccgccatcgagcgcctcaactatgtgcagtactaccccattgtggtcttcttcatccccgagagccggccggccctcaaggcactgcgccagtggctggcgcctgcctcccgccgcagcacccgtcgcctctacgcacaagcccagaagctgcgaaaacacagcagccacctcttcacagccaccatccctctgaatggcacgagtgacacctggtaccaggagctcaaggccatcattcgagagcagcagacgcggcccatctggacggcggaagatcagctggatggctccttggaggacaacctagacctccctcaccacggcctggccgacagctccgctgacctcagctgcgacagccgcgttaacagcgactacgagacggacggcgagggcggcgcgtacacggatggcgagggctacacagacggcgagggggggccctacacggatgtggatgatgagcccccggctccagccctggcccggtcctcggagcccgtgcaggcagatgagtcccagagcccgagggatcgtgggagaatctcggctcatcagggggcccaggtggacagccgccacccccagggacagtggcgacaggacagcatgcgaacctatgaacgggaagccctgaagaaaaagtttatgcgagtacatgatgcggagtcctccgatgaagacggctatgactggggtccggccactgacctgtgacctctcgaaggctgccagctggtccgtcctccttctccctccctggggctgggactcagtttcccatacagaacccacaaccttacctccctccgcctggtctttaataaacagagtattttcac

SEQ ID NO: 191375 - DNA, 2946 bp, Homo sapiens
  Payload ID: 17800
  Gene Name: tight junction protein 3
  Uniprot ID: O95049
  ENST ID: ENST00000587686
  CDS Start-End: 1-2817
atgaacctgtgtggcctcatgcccatcttccccgctcccctcgaccaggtggctgacatggaggagctgaccatctgggaacagcacacggccacactgtccaaggacccccgccggggctttggcattgcgatctctggaggccgagaccggcccggtggatccatggttgtatctgacgtggtacctggagggccggcggagggcaggctacagacaggcgaccacatcgtcatggtgaacggggtttccatggagaatgccacctccgcgtttgccattcagatactcaagacctgcaccaagatggccaacatcacagtgaaacgtccccggaggatccacctgcccgccaccaaagccagcccctccagcccagggcgccaggactcggatgaagacgatgggccccagcgggtggaggaggtggaccagggccggggctatgacggcgactcatccagtggctccggccgctcctgggacgagcgctcccgccggccgaggcctggtcgccggggccgggccggcagccatgggcgtaggagcccaggtggtggctctgaggccaacgggctggccctggtgtccggctttaagcggctgccacggcaggacgtgcagatgaagcctgtgaagtcagtgctggtgaagaggagagacagcgaagagtttggcgtcaagctgggcagtcagatcttcatcaagcacattacagattcgggcctggctgcccggcaccgtgggctgcaggaaggagatctcattctacagatcaacggggtgtctagccagaacctgtcactgaacgacacccggcgactgattgagaagtcagaagggaagctaagcctgctggtgctgagagatcgtgggcagttcctggtgaacattccgcctgctgtcagtgacagcgacagctcgccattggaggacatctcggacctcgcctcggagctatcgcaggcaccaccatcccacatcccaccaccaccccggcatgctcagcggagccccgaggccagccagaccgactctcccgtggagagtccccggcttcggcgggaaagttcagtagattccagaaccatctcggaaccagatgagcaacggtcagagttgcccagggaaagcagctatgacatctacagagtgcccagcagtcagagcatggaggatcgtgggtacagccccgacacgcgtgtggtccgcttcctcaagggcaagagcatcgggctgcggctggcagggggcaatgacgtgggcatcttcgtgtccggggtgcaggcgggcagcccggccgacgggcagggcatccaggagggagatcagattctgcaggtgaatgacgtgccattccagaacctgacacgggaggaggcagtgcagttcctgctggggctgccaccaggcgaggagatggagctggtgacgcagaggaagcaggacattttctggaaaatggtgcagtcccgcgtgggtgactccttctacatccgcactcactttgagctggagcccagtccaccgtctggcctgggcttcacccgtggcgacgtcttccacgtgctggacacgctgcaccccggccccgggcagagccacgcacgaggaggccactggctggcggtgcgcatgggtcgtgacctgcgggagcaagagcggggcatcattcccaaccagagcagggcggagcagctggccagcctggaagctgcccagagggccgtgggagtcgggcccggctcctccgcgggctccaatgctcgggccgagttctggcggctgcggggtcttcgtcgaggagccaagaagaccactcagcggagccgtgaggacctctcagctctgacccgacagggccgctacccgccctacgaacgagtggtgttgcgagaagccagtttcaagcgcccggtagtgatcctgggacccgtggccgacattgctatgcagaagttgactgctgagatgcctgaccagtttgaaatcgcagagactgtgtccaggaccgacagcccctccaagatcatcaaactagacaccgtgcgggtgattgcagaaaaagacaagcatgcgctcctggatgtgaccccctccgccatcgagcgcctcaactatgtgcagtactaccccattgtggtcttcttcatccccgagagccggccggccctcaaggcactgcgccagtggctggcgcctgcctcccgccgcagcacccgtcgcctctacgcacaagcccagaagctgcgaaaacacagcagccacctcttcacagccaccatccctctgaatggcacgagtgacacctggtaccaggagctcaaggccatcattcgagagcagcagacgcggcccatctggacggcggaagatcagctggatggctccttggaggacaacctagacctccctcaccacggcctggccgacagctccgctgacctcagctgcgacagccgcgttaacagcgactacgagacggacggcgagggcggcgcgtacacggatggcgagggctacacagacggcgagggggggccctacacggatgtggatgatgagcccccggctccagccctggcccggtcctcggagcccgtgcaggcagatgagtcccagagcccgagggatcgtgggagaatctcggctcatcagggggcccaggtggacagccgccacccccagggacagtggcgacaggacagcatgcgaacctatgaacgggaagccctgaagaaaaagtttatgcgagtacatgatgcggagtcctccgatgaagacggctatgactggggtccggccactgacctgtgacctctcgaaggctgccagctggtccgtcctccttctccctccctggggctgggactcagtttcccatacagaacccacaaccttacctccctccgcctggtctttaataaacagagtattttcacagca

SEQ ID NO: 191376 - DNA, 580 bp, Homo sapiens
  Payload ID: 17800
  Gene Name: tight junction protein 3
  ENST ID: ENST00000590545
  CDS Start-End: 210-580
tctccctgtgtctgtggtcgtcagttccactggcaggggacctgcctccctgttgccaccacaagagaggaaaagttggtcaaacaggtggggaggccagagctacaagcctcgggttccctccccaccacccgtgccaggcaggcacccgggccctggcacctgctgcctgcccagaggccacccagcctcctagacaggtggctgacatggaggagctgaccatctgggaacagcacacggccacactgtccaagcagctcttccttcccctcatcctctctcaggacccccgccggggctttggcattgcgatctctggaggccgagaccggcccggtggatccatggttgtatctgacgtggtacctggagggccggcggagggcaggctacagacaggcgaccacatcgtcatggtgaacggggtttccatggagaatgccacctccgcgtttgccattcagatactcaagacctgcaccaagatggccaacatcacagtgaaacgtccccggaggatccacctgcccgccaccaaagccagcccctccagcccagggcgccaggactcggatga

SEQ ID NO: 191377 - DNA, 4376 bp, Homo sapiens
  Payload ID: 17801
  Gene Name: timeless circadian clock
  Uniprot ID: Q9UNS1
  ENST ID: ENST00000229201
  CDS Start-End: 156-3779
gaccggtccagctgagcctggtggcggaaaggctgcggccccgcgccagagggccggtggctcctccgggcttctgaggacccgcagggagcgggcctcatcatttctgtctcctgtttctccacttccttctctgttggttggtccactgatgtatggacttgcacatgatgaactgtgaacttctagccacatgtagtgcccttgggtacttggagggagacacttaccataaggaaccagattgcttagagagcgtgaaggatctgatccgctatttgaggcatgaggatgagacacgagatgtgcggcagcagctgggggcagcccagatcctacagagcgaccttctgcccatcctcacccagcaccaccaggacaagcctctctttgatgctgttatcagactgatggtgaacttgacacaaccagccttgctctgttttggcaatctgcctaaggagcccagctttcggcaccattttttgcaggtgctaacttatttgcaggcctacaaagaggcctttgccagtgagaaggcttttggagtcctcagtgaaaccttgtatgagctgctgcagctgggctgggaggaacggcaggaggaagacaacttgctgattgaacggatcctactgctggtcagaaatattctccatgtcccagctgaccttgatcaggagaagattgatgatgacgccagtgcccatgaccagctcctctgggcgattcacctcagcggcctggatgacctgctcctctttctggccagctcgtctgctgaggagcaatggagcctacatgtgctagagattgtctcccttatgtttcgtgaccagaaccccgagcagctggcgggagtagggcagggacgcttagctcaggagcggagtgcagattttgcagaactggaggtgttgcgccagcgagagatggcagaaaagaagactcgagccctccagcgaggcaacaggcattctcgatttgggggctcctatattgtccaggggttgaaatccattggggagagggacctcatctttcacaaaggccttcacaacctacgaaactacagttcagatttgggaaagcagccgaaaaaggtgcctaaacgtcgccaggccgcccgagagctgtccattcagcgccgttctgccctcaatgtgaggctcttcctcagagacttctgctctgagttcctggagaactgttacaaccggctcatgggatcagtaaaggatcacctgcttcgggagaaagctcagcagcatgatgagacctattatatgtgggccttggctttcttcatggccttcaaccgagctgcctccttccggccaggcctggtttctgagaccctcagtgtccgtaccttccacttcattgagcagaacctcaccaactactatgagatgatgctgactgaccgcaaggaagctgcctcctgggcacgccggatgcacttggctctgaaggcctatcaggagctgctggcaacagtgaatgagatggacatatctccagatgaggctgtgagggagagcagccgcatcatcaagaacaatattttctatgtgatggagtaccgagaactattcctggcactttttcgaaagtttgatgagagatgccagccccgctctttccttcgtgacctggtggagaccacccacctcttcctcaaaatgttggagcgattctgtcggagccgtgggaacctggtggtgcagaacaaacaaaagaagagaaggaagaagaagaagaaggtcctagaccaggccattgtttctggtaatgtcccatctagcccagaagaagtggaggctgtgtggccagccctggctgagcagctacagtgctgtgcccagaattctgagctcagcatggactccgtggttccctttgatgcggcctcagaggtgccagtggaggagcagcgggcagaagctatggtacggatccaagactgtctcctggctggccaggccccacaggccctgactctcctgaggtctgctcgggaggtgtggcctgaaggagatgtgtttggctctcaagacatttctccagaggaagagatccagttgctgaaacaaatcctctctgctccacttccccggcagcagggcccagaggaacgtggggcagaggaagaagaagaggaggaggaggaggaagaggaggagttgcaagtggtccaggtgtcggagaaagaatttaattttctggactacctgaaacgctttgcatgttcaactgtcgttcgagcctatgtgctgctactaaggagctaccagcagaatagtgcccacactaaccattgcattgtgaagatgctgcaccggctggcccatgacctcaaaatggaagccctactttttcagctgtcagtcttctgcctcttcaatcgtctgcttagtgaccctgctgctggagcctacaaagagctagtgacttttgccaaatacatcctgggcaaattttttgcactggctgcagtcaaccaaaaagcctttgtggagctgttgttctggaagaacacagctgtggttcgagagatgactgagggctatggctccctggatgacaggtcttccagtcgcagagcacctacatggagccccgaagaagaggctcatcttcgggagctgtacctcgccaataaggacgtggaagggcaggatgtggtggaagccatcttggcccacctgaatactgttcctcgaacacgcaagcagatcatccaccatctggtacagatgggactggctgacagtgtcaaggacttccaaaggaaaggaacccatattgtactgtggacgggggatcaggagttggagctgcagcggctttttgaggaattccgggactcagatgatgtcctgggtcatatcatgaagaatatcacagccaaacgctcacgggcccgaatagtggataaactcttggctctggggctggtggctgagcggcgggagctgtacaagaaacggcagaaaaagttggcatcctccatcttgccaaatggagcggagtccctgaaagatttttgccaggaagatctggaagaagaggaaaacctgcctgaggaagacagcgaagaggaagaagaagggggctcagaagcagaacaagtccagggtagcttagtcctttcaaatgaaaaccttggtcaaagcctgcatcaggaaggcttttctatcccgctcctatggctccagaactgcctgatccgagcagctgatgatcgggaagaggatggctgctcccaggccgttccattggtgccactcacagaggaaaatgaggaagccatggaaaacgaacagtttcagcagctgttgcgcaagctaggggttcggccccctgcctctgggcaggaaaccttctggcgaattccagccaagctgagtcctacccagctccggagggcagcagcttctttgagtcaaccagaggaggaacagaagctgcagccagagctgcagcctaaagtccctggagagcaaggctctgatgaggagcactgtaaagagcaccgagcacaagccctgagggccctcttgctagcccacaagaagaaagcgggcctggcatccccagaggaggaagacgctgttggtaaagagccgctgaaggcagcacccaagaaacgacaattgctggacagcgacgaggaacaggaagaagatgagggcaggaacagagcaccagagttgggagctccaggaatccaaaagaagaaacgataccagattgaggatgatgaggatgactgaagagctaagaagcctaggggtagagatagacacgtttttagatggtgcattcaagtcagagttggaagggtcatacaggacccagaagctcctcttactggacagagcagtagaatcccaggctctttcacggatttaggctgagaaacttcagcagcagtattggacttctctgctgtcagtctttgtttctcccagtttttatcggtatgccccagcagctctctggagatttagttctcttcttctaggaaccatttcttttggttattggagctccttagcaaataagaggagtgagtgaaatagagaaagcaccccggaccccttttattggtctgttcctttggctttctcttggaggtgggtcgcagcaccagatggggagctttatgacatgacaggcgggagttttgtaccacttttagaagataccagatgcctctgtcctcattttgtttcctatgatcatcctctagataccagatagaggcccattcctgcatttgagatagggttggaatatagtactctagatgatgaatgtgtttgctttgtgtttggtattaaacatgtaagattagaagttctcatctc

SEQ ID NO: 191378 - DNA, 5121 bp, Homo sapiens
  Payload ID: 17801
  Gene Name: timeless circadian clock
  Uniprot ID: Q9UNS1
  ENST ID: ENST00000553532
  CDS Start-End: 152-3778
ggtccagctgagcctggtggcggaaaggctgcggccccgcgccagagggccggtggctcctccgggcttctgaggacccgcagggagcgggcctcatcatttctgtctcctgtttctccacttccttctctgttggttggtccactgatgtatggacttgcacatgatgaactgtgaacttctagccacatgtagtgcccttgggtacttggagggagacacttaccataaggaaccagattgcttagagagcgtgaaggatctgatccgctatttgaggcatgaggatgagacacgagatgtgcggcagcagctgggggcagcccagatcctacagagcgaccttctgcccatcctcacccagcaccaccaggacaagcctctctttgatgctgttatcagactgatggtgaacttgacacaaccagccttgctctgttttggcaatctgcctaaggagcccagctttcggcaccattttttgcaggtgctaacttatttgcaggcctacaaagaggcctttgccagtgagaaggcttttggagtcctcagtgaaaccttgtatgagctgctgcagctgggctgggaggaacggcaggaggaagacaacttgctgattgaacggatcctactgctggtcagaaatattctccatgtcccagctgaccttgatcaggagaagaagattgatgatgacgccagtgcccatgaccagctcctctgggcgattcacctcagcggcctggatgacctgctcctctttctggccagctcgtctgctgaggagcaatggagcctacatgtgctagagattgtctcccttatgtttcgtgaccagaaccccgagcagctggcgggagtagggcagggacgcttagctcaggagcggagtgcagattttgcagaactggaggtgttgcgccagcgagagatggcagaaaagaagactcgagccctccagcgaggcaacaggcattctcgatttgggggctcctatattgtccaggggttgaaatccattggggagagggacctcatctttcacaaaggccttcacaacctacgaaactacagttcagatttgggaaagcagccgaaaaaggtgcctaaacgtcgccaggccgcccgagagctgtccattcagcgccgttctgccctcaatgtgaggctcttcctcagagacttctgctctgagttcctggagaactgttacaaccggctcatgggatcagtaaaggatcacctgcttcgggagaaagctcagcagcatgatgagacctattatatgtgggccttggctttcttcatggccttcaaccgagctgcctccttccggccaggcctggtttctgagaccctcagtgtccgtaccttccacttcattgagcagaacctcaccaactactatgagatgatgctgactgaccgcaaggaagctgcctcctgggcacgccggatgcacttggctctgaaggcctatcaggagctgctggcaacagtgaatgagatggacatatctccagatgaggctgtgagggagagcagccgcatcatcaagaacaatattttctatgtgatggagtaccgagaactattcctggcactttttcgaaagtttgatgagagatgccagccccgctctttccttcgtgacctggtggagaccacccacctcttcctcaaaatgttggagcgattctgtcggagccgtgggaacctggtggtgcagaacaaacaaaagaagagaaggaagaagaagaagaaggtcctagaccaggccattgtttctggtaatgtcccatctagcccagaagaagtggaggctgtgtggccagccctggctgagcagctacagtgctgtgcccagaattctgagctcagcatggactccgtggttccctttgatgcggcctcagaggtgccagtggaggagcagcgggcagaagctatggtacggatccaagactgtctcctggctggccaggccccacaggccctgactctcctgaggtctgctcgggaggtgtggcctgaaggagatgtgtttggctctcaagacatttctccagaggaagagatccagttgctgaaacaaatcctctctgctccacttccccggcagcagggcccagaggaacgtggggcagaggaagaagaagaggaggaggaggaggaagaggaggagttgcaagtggtccaggtgtcggagaaagaatttaattttctggactacctgaaacgctttgcatgttcaactgtcgttcgagcctatgtgctgctactaaggagctaccagcagaatagtgcccacactaaccattgcattgtgaagatgctgcaccggctggcccatgacctcaaaatggaagccctactttttcagctgtcagtcttctgcctcttcaatcgtctgcttagtgaccctgctgctggagcctacaaagagctagtgacttttgccaaatacatcctgggcaaattttttgcactggctgcagtcaaccaaaaagcctttgtggagctgttgttctggaagaacacagctgtggttcgagagatgactgagggctatggctccctggatgacaggtcttccagtcgcagagcacctacatggagccccgaagaagaggctcatcttcgggagctgtacctcgccaataaggacgtggaagggcaggatgtggtggaagccatcttggcccacctgaatactgttcctcgaacacgcaagcagatcatccaccatctggtacagatgggactggctgacagtgtcaaggacttccaaaggaaaggaacccatattgtactgtggacgggggatcaggagttggagctgcagcggctttttgaggaattccgggactcagatgatgtcctgggtcatatcatgaagaatatcacagccaaacgctcacgggcccgaatagtggataaactcttggctctggggctggtggctgagcggcgggagctgtacaagaaacggcagaaaaagttggcatcctccatcttgccaaatggagcggagtccctgaaagatttttgccaggaagatctggaagaagaggaaaacctgcctgaggaagacagcgaagaggaagaagaagggggctcagaagcagaacaagtccagggtagcttagtcctttcaaatgaaaaccttggtcaaagcctgcatcaggaaggcttttctatcccgctcctatggctccagaactgcctgatccgagcagctgatgatcgggaagaggatggctgctcccaggccgttccattggtgccactcacagaggaaaatgaggaagccatggaaaacgaacagtttcagcagctgttgcgcaagctaggggttcggccccctgcctctgggcaggaaaccttctggcgaattccagccaagctgagtcctacccagctccggagggcagcagcttctttgagtcaaccagaggaggaacagaagctgcagccagagctgcagcctaaagtccctggagagcaaggctctgatgaggagcactgtaaagagcaccgagcacaagccctgagggccctcttgctagcccacaagaagaaagcgggcctggcatccccagaggaggaagacgctgttggtaaagagccgctgaaggcagcacccaagaaacgacaattgctggacagcgacgaggaacaggaagaagatgagggcaggaacagagcaccagagttgggagctccaggaatccaaaagaagaaacgataccagattgaggatgatgaggatgactgaagagctaagaagcctaggggtagagatagacacgtttttagatggtgcattcaagtcagagttggaagggtcatacaggacccagaagctcctcttactggacagagcagtagaatcccaggctctttcacggatttaggctgagaaacttcagcagcagtattggacttctctgctgtcagtctttgtttctcccagtttttatcggtatgccccagcagctctctggagatttagttctcttcttctaggaaccatttcttttggttattggagctccttagcaaataagaggagtgagtgaaatagagaaagcaccccggaccccttttattggtctgttcctttggctttctcttggaggtgggtcgcagcaccagatggggagctttatgacatgacaggcgggagttttgtaccacttttagaagataccagatgcctctgtcctcattttgtttcctatgatcatcctctagataccagatagaggcccattcctgcatttgagatagggttggaatatagtactctagatgatgaatgtgtttgctttgtgtttggtattaaacatgtaagattagaagttctcatctcagtctgacttggcgatatgtctaagttccccagcccttcccctgctgtgctcttgaaagaagaacttaacaattttagggtaaaaagagaccaacagaccggcacagtggctcaaacctgttgtcctagcactttgggaggctgaggcgggcggatcacctgaggtcaggagtttgagaccggcctggacaatatggcgaaatcccatctccactaaaaatacaaaaattagccggccatggtggcatgcgcctgtaatcccagccactcgggtggctgaggcaggagaattgcctgaacccaggaggcagaggttgcagtgagctaaggtcacgccagtgcatatgcctgggcgacagagcaagactctgtctcaaaaaaaaagaaaaaaaaaaaagaccaacaaccttcccttttcttccgctttccctacagaagacacagaaaagcatttttgcctctagatccttttgtctagggtaaattcttagggtgacaagagtatgcggcaggaagaaggaggagccataaaggaagagaagccagcttgttggcatggggcatagaaaaggacaaaatctaggcatgaaaaggatggataaatactgcaaatattatgttcttacccattcttggaaacgtcagctttcttgcttcctgtgcttccagccgaggtagggcaaaggtgagattgagaaaatagccattcagctcaggaaggcttctaagtaaaggatggatttgga

SEQ ID NO: 191379 - DNA, 1744 bp, Homo sapiens
  Payload ID: 17802
  Gene Name: TIMELESS interacting protein
  Uniprot ID: Q9BVW5
  ENST ID: ENST00000261881
  CDS Start-End: 87-992
ggagttcccgagtatcgcgagaagcgcgcttagtctgcacgccgaggtccgcgctgtgtcccgtgttttctgcgtgagaggaaaagatgctagaaccacaggagaatggcgtgattgacctaccagattatgagcatgtagaagatgaaacttttcctcctttcccacctccagcctctccagagagacaagatggtgaaggaactgagcctgatgaagagtcaggaaatggagcacctgttcgtgtacctccaaagagaacagttaaaagaaatatacccaagctggatgctcagagattaatttcagagagaggacttccagccttaaggcatgtatttgataaggcaaaattcaaaggtaaaggtcatgaggctgaagacttgaagatgctaatcagacacatggagcactgggcacataggctattccctaaactgcagtttgaggattttattgacagagttgaatacctgggaagtaaaaaggaagttcagacctgtttaaaacgaattcgacttgatctccctattttacatgaagattttgttagcaataatgatgaagttgcggagaataatgaacatgatgtcacttctactgaattagatccctttctgacaaacttatctgaaagtgagatgtttgcttctgagttaagtagaagcctaacagaagagcaacaacaaagaattgagagaaataaacaactggccttggaaagaaggcaggcaaagctgctgagtaatagtcagaccctaggaaatgatatgttaatgaatacacccagggcacacacggttgaagaggttaatactgatgaggatcaaaaggaggagtcaaatggattaaacgaagacattctggacaatccatgtaatgatgctattgccaatactttaaatgaagaggaaacactgctggaccagtcttttaaaaatgtgcaacagcaacttgatgctacatccagaaatattactgaagctagataagtttccattaagagaaaatgtatctgttaagtcatcgtcctgcaagcttggcgttactatgtattttttcttcttggagtgaaaatccttagatagtaaaactgttatagattattgtttaaaatctgataatctggtatttatttataattatgcttgtcactttagttaaatctatttgttctctttagtgtttgtttttatataggtatttcttcataaaatgattaggaggtaataagcagtttctgctgctggtctgtcattgaatgccttgttttcactaagttgggaggttttgtttctgttttttactgctccttgcaaagcagggctaatccatggacagtgtgcccagagtagtctagttgaagttttttgttttgttttgttttgttttttttgacacagagtctcactctgttggccaggctggagtgcagtggcacagtcttggctcactgcaacctctgcctcctgggctcaagcaattctcctgccttagcctcccgagtagctgggactacaggcgtgtgccaccacgcttggctaatttttgtacttttagtagagatgaggtttcaccatgttggccaggctggtctcaaactcctaacctcaggtaatccgcccccctcggcctcccaaagtgctgggattacaggtgtgagccaccgcgcccagcctgggtgaagttttgagatgtacatatatactgaatattaatgtcaattttttaaaagaagtaaaaa

SEQ ID NO: 191380 - DNA, 1459 bp, Homo sapiens
  Payload ID: 17802
  Gene Name: TIMELESS interacting protein
  ENST ID: ENST00000566524
  CDS Start-End: 56-280
agtctgcacgccgaggtccgcgctgtgtcccgtgttttctgcgtgagaggaaaagatgctagaaccacaggagaatggcgtgattgacctaccagattatgagcatgtagaagatgaaacttttcctcctttcccacctccagcctctccagagagacaagatggtgaaggaactgagcctgatgaagagtcaggaaatggagcacctgttcgtgtacctccaaagagaacagttaaaagaaatatacccaagctggatgctcagaggctgaagacttgaagatgctaatcagacacatggagcactgggcacataggctattccctaaactgcagtttgaggattttattgacagagttgaatacctgggaagtaaaaaggaagttcagacctgtttaaaacgaattcgacttgatctccctattttacatgaagattttgttagcaataatgatgaagttgcggagaataatgaacatgatgtcacttctactgaattagatccctttctgacaaacttatctgaaagtgagatgtttgcttctgagttaagtagaagcctaacagaagagcaacaacaaagaattgagagaaataaacaactggccttggaaagaaggcaggcaaagctgctgagtaatagtcagaccctaggaaatgatatgttaatgaatacacccagggcacacacggttgaagaggttaatactgatgaggatcaaaaggaggagtcaaatggattaaacgaagacattctggacaatccatgtaatgatgctattgccaatactttaaatgaagaggaaacactgctggaccagtcttttaaaaatgtgcaacagcaacttgatgctacatccagaaatattactgaagctagataagtttccattaagagaaaatgtatctgttaagtcatcgtcctgcaagcttggcgttactatgtattttttcttcttggagtgaaaatccttagatagtaaaactgttatagattattgtttaaaatctgataatctggtatttatttataattatgcttgtcactttagttaaatctatttgttctctttagtgtttgtttttatataggtatttcttcataaaatgattaggaggtaataagcagtttctgctgctggtctgtcattgaatgccttgttttcactaagttgggaggttttgtttctgttttttactgctccttgcaaagcagggctaatccatggacagtgtgcccagagtagtctagttgaagttttttgttttgttttgttttgttttttttgacacagagtctcactctgttggccaggctggagtgcagtggcacagtcttggctcactgcaacctctgcctcctgggctcaagcaattctcctgccttagcctcccgagtagctgggactacaggcgtgtgccaccacgcttggctaatttttgtacttttagtagaga

SEQ ID NO: 191381 - DNA, 495 bp, Homo sapiens
  Payload ID: 17802
  Gene Name: TIMELESS interacting protein
  ENST ID: ENST00000568216
  CDS Start-End: 72-495
gccctctgtcgccccgaggcaagcaggtggacccagctgagaagaagtctgtgtcgctgtgtgaggaaaagatgctagaaccacaggagaatggcgtgattgacctaccagattatgagcatgtagaagatgaaacttttcctcctttcccacctccagcctctccagagagacaagatggtgaaggaactgagcctgatgaagagtcaggaaatggagcacctgttcgtgtacctccaaagagaacagttaaaagaaatatacccaagctggatgctcagagattaatttcagagagaggacttccagccttaaggcatgtatttgataaggcaaaattcaaaggtaaaggtcatgaggctgaagacttgaagatgctaatcagacacatggagcactgggcacataggctattccctaaactgcagtttgaggattttattgacagagttgaatacctgggaagtaaaaaggaagttcaggtaagtgttgaga

SEQ ID NO: 191382 - DNA, 1009 bp, Homo sapiens
  Payload ID: 17802
  Gene Name: TIMELESS interacting protein
  ENST ID: ENST00000562124
  CDS Start-End: 127-1009
ggacgccgtggcgccctctgtcgccccgaggcaagcaggtggacccagctgagaagaagtctgtgtcgctgtgtggtgagctctccaggccaggtgccgcgcggcctccacctctgcgaggaaaagatgctagaaccacaggagaatggcgtgattgacctaccagattatgagcatgtagaagatgaaacttttcctcctttcccacctccagcctctccagagagacaagatggtgaaggaactgagcctgatgaagagtcaggaaatggagcacctgttcgtgtacctccaaagagaacagttaaaagaaatatacccaagctggatgctcagagattaatttcagagagaggacttccagccttaaggcatgtatttgataaggcaaaattcaaaggtaaaggtcatgaggctgaagacttgaagatgctaatcagacacatggagcactgggcacataggctattccctaaactgcagtttgaggattttattgacagagttgaatacctgggaagtaaaaaggaagttcagacctgtttaaaacgaattcgacttgatctccctattttacatgaagattttgttagcaataatgatgaagttgcggagaataatgaacatgatgtcacttctactgaattagatccctttctgacaaacttatctgaaagtgagatgtttgcttctgagttaagtagaagcctaacagaagagcaacaacaaagaattgagagaaataaacaactggccttggaaagaaggcaggcaaagctgctgagtaatagtcagaccctaggaaatgatatgttaatgaatacacccagggcacacacggttgaagaggttaatactgatgaggatcaaaaggaggagtcaaatggattaaacgaagacattctggacaatccatgtaatgatgctattgccaatactttaaatgaagaggaaacactgctggaccagtcttttaaaaatgtgcaacagcaacttgatgctacatcca

SEQ ID NO: 191383 - DNA, 685 bp, Homo sapiens
  Payload ID: 17802
  Gene Name: TIMELESS interacting protein
  ENST ID: ENST00000570251
  CDS Start-End: 336-685
gcctgggggcggggtccgtcgcggacgccgtggcgccctctgtcgccccgaggcaagcaggtggacccagctgagaagaagtctgtgtcgctgtgtggtgagctctccaggccaggtgccgcgcggcctccacctctgcggtaaccggcctgcccccgacccctgtccccaagccgagccgtgttgacgaaaatgaaataacaaaataaataaggaaaaggaccccttcctgtgtccagaggagaggcagcgtggggaataggaaacttgtcgagaggctcctttgagcccaacaaactgacgcatataaattttgtttgtttaatgaggaaaagatgctagaaccacaggagaatggcgtgattgacctaccagattatgagcatgtagaagatgaaacttttcctcctttcccacctccagcctctccagagagacaagatggtgaaggaactgagcctgatgaagagtcaggaaatggagcacctgttcgtgtacctccaaagagaacagttaaaagaaatatacccaagctggatgctcagagattaatttcagagagaggacttccagccttaaggcatgtatttgataaggcaaaattcaaaggtaaaggtcatgaggctgaagacttgaagatgctaatcagacacatggagcactgggcacataggctattccctaa

SEQ ID NO: 191384 - DNA, 892 bp, Homo sapiens
  Payload ID: 17803
  Gene Name: TIMP metallopeptidase inhibitor 1
  Uniprot ID: P01033
  ENST ID: ENST00000218388
  CDS Start-End: 171-794
ttctgcactgatggtgggtggatgagtaatgcatccaggaagcctggaggcctgtggtttccgcacccgctgccacccccgcccctagcgtggacatttatcctctagcgctcaggccctgccgccatcgccgcagatccagcgcccagagagacaccagagaacccaccatggccccctttgagcccctggcttctggcatcctgttgttgctgtggctgatagcccccagcagggcctgcacctgtgtcccaccccacccacagacggccttctgcaattccgacctcgtcatcagggccaagttcgtggggacaccagaagtcaaccagaccaccttataccagcgttatgagatcaagatgaccaagatgtataaagggttccaagccttaggggatgccgctgacatccggttcgtctacacccccgccatggagagtgtctgcggatacttccacaggtcccacaaccgcagcgaggagtttctcattgctggaaaactgcaggatggactcttgcacatcactacctgcagttttgtggctccctggaacagcctgagcttagctcagcgccggggcttcaccaagacctacactgttggctgtgaggaatgcacagtgtttccctgtttatccatcccctgcaaactgcagagtggcactcattgcttgtggacggaccagctcctccaaggctctgaaaagggcttccagtcccgtcaccttgcctgcctgcctcgggagccagggctgtgcacctggcagtccctgcggtcccagatagcctgaatcctgcccggagtggaagctgaagcctgcacagtgtccaccctgttcccactcccatctttcttccggacaatgaaataaagagttaccacccagca

SEQ ID NO: 191385 - DNA, 626 bp, Homo sapiens
  Payload ID: 17803
  Gene Name: TIMP metallopeptidase inhibitor 1
  ENST ID: ENST00000377017
  CDS Start-End: 97-528
tccagcgcccagagagacaccagagtcatcagggccaagttcgtggggacaccagaagtcaaccagaccaccttataccagcgttatgagatcaagatgaccaagatgtataaagggttccaagccttaggggatgccgctgacatccggttcgtctacacccccgccatggagagtgtctgcggatacttccacaggtcccacaaccgcagcgaggagtttctcattgctggaaaactgcaggatggactcttgcacatcactacctgcagttttgtggctccctggaacagcctgagcttagctcagcgccggggcttcaccaagacctacactgttggctgtgaggaatgcacagtgtttccctgtttatccatcccctgcaaactgcagagtggcactcattgcttgtggacggaccagctcctccaaggctctgaaaagggcttccagtcccgtcaccttgcctgcctgcctcgggagccagggctgtgcacctggcagtccctgcggtcccagatagcctgaatcctgcccggagtggaagctgaagcctgcacagtgtccaccctgttcccactcccatctttcttccggacaatgaaataaagagttaccacccagca

SEQ ID NO: 191386 - DNA, 341 bp, Homo sapiens
  Payload ID: 17803
  Gene Name: TIMP metallopeptidase inhibitor 1
  ENST ID: ENST00000441738
  CDS Start-End: 55-341
gagctgggctgcagcttgggtgctggccaccaggcccgtgcactcccgtgccagatgcctgtctactcagcttggcctgcggaacccaccatggccccctttgagcccctggcttctggcatcctgttgttgctgtggctgatagcccccagcagggcctgcacctgtgtcccaccccacccacagacggccttctgcaattccgacctcgtcatcagggccaagttcgtggggacaccagaagtcaaccagaccaccttataccagcgttatgagatcaagatgaccaagatgtataaagggttccaagccttaggggatgccgctgacatccggttcgt

SEQ ID NO: 191387 - DNA, 1095 bp, Homo sapiens
  Payload ID: 17803
  Gene Name: TIMP metallopeptidase inhibitor 1
  ENST ID: ENST00000456754
  CDS Start-End: 76-486
atttatcctctagcgctcaggccctgccgccatcgccgcagatccagcgcccagagagacaccagagaacccaccatggccccctttgagcccctggcttctggcatcctgttgttgctgtggctgatagcccccagcagggcctgcacctgtgtcccaccccacccacagacggccttctgcaattccgacctcgtcatcagggccaagttcgtggggacaccagaagtcaaccagaccaccttataccagcgttatgagatcaagatgaccaagatgtataaagggttccaagccttaggggatgccgctgacatccggttcgtctacacccccgccatggagagtgtctgcggatacttccacaggtcccacaaccgcagcgaggagtttctcattgctggtgaggcaccgtccccgcgccctgtgccacaccaaccagtccctggggcgcggcctagcaaccacgagggggcgaggctctgatgggaatggtcccactggaaatggggaccaccccaatttcagtctatcagaaggccgggcctttggcagcttggcagctcagccaatcacaagctgcttgtcggtccccgccccgcctttctccttaggaaaactgcaggatggactcttgcacatcactacctgcagttttgtggctccctggaacagcctgagcttagctcagcgccggggcttcaccaagacctacactgttggctgtgaggaatgcacagtgagtgcctggaccctgacctccaacgggagatccttcccggggccattccctaaatcgtgggcttgtttcttgctccctctggctattctgtgtccctgtggctgctccccaaccctaagggctgtccctgatctctcttgctatttccccaagcccgagactgctcccttacaaattctggctgctccctttccctgtgtccaataccgtgtgatcacctgtccctccctggtccctctaattctcccttgtgactattctgtaatcccactccccgttcctgagcccccgggattgtttcttggttccccagaatgttctccaagaacccaaagtgctgttccctaatccca

SEQ ID NO: 191388 - DNA, 595 bp, Homo sapiens
  Payload ID: 17803
  Gene Name: TIMP metallopeptidase inhibitor 1
  ENST ID: ENST00000445623
  CDS Start-End: 1-497
gtccccgcgccctgtgccacaccaaccagtccctggggcgcggcctagcaaccacgagggggcgaggctctgatgggaatggtcccactggaaatggggaccaccccaatttcagtctatcagaaggccgggcctttggcagcttggcagctcagccaatcacaagctgcttgtcggtccccgccccgcctttctccttaggaaaactgcaggatggactcttgcacatcactacctgcagttttgtggctccctggaacagcctgagcttagctcagcgccggggcttcaccaagacctacactgttggctgtgaggaatgcacagtgtttccctgtttatccatcccctgcaaactgcagagtggcactcattgcttgtggacggaccagctcctccaaggctctgaaaagggcttccagtcccgtcaccttgcctgcctgcctcgggagccagggctgtgcacctggcagtccctgcggtcccagatagcctgaatcctgcccggagtggaagctgaagcctgcacagtgtccaccctgttcccactcccatctttcttccggacaatgaaataaagagttaccacccagca

SEQ ID NO: 191389 - DNA, 3652 bp, Homo sapiens
  Payload ID: 17804
  Gene Name: TIMP metallopeptidase inhibitor 2
  Uniprot ID: P16035
  ENST ID: ENST00000262768
  CDS Start-End: 300-962
agcaaacacatccgtagaaggcagcgcggccgccgagaaccgcagcgccgctcgcccgccgccccccaccccgccgccccgcccggcgaattgcgccccgcgcccctcccctcgcgcccccgagacaaagaggagagaaagtttgcgcggccgagcggggcaggtgaggagggtgagccgcgcgggaggggcccgcctcggccccggctcagcccccgcccgcgcccccagcccgccgccgcgagcagcgcccggaccccccagcggcggcccccgcccgcccagccccccggcccgccatgggcgccgcggcccgcaccctgcggctggcgctcggcctcctgctgctggcgacgctgcttcgcccggccgacgcctgcagctgctccccggtgcacccgcaacaggcgttttgcaatgcagatgtagtgatcagggccaaagcggtcagtgagaaggaagtggactctggaaacgacatttatggcaaccctatcaagaggatccagtatgagatcaagcagataaagatgttcaaagggcctgagaaggatatagagtttatctacacggccccctcctcggcagtgtgtggggtctcgctggacgttggaggaaagaaggaatatctcattgcaggaaaggccgagggggacggcaagatgcacatcaccctctgtgacttcatcgtgccctgggacaccctgagcaccacccagaagaagagcctgaaccacaggtaccagatgggctgcgagtgcaagatcacgcgctgccccatgatcccgtgctacatctcctccccggacgagtgcctctggatggactgggtcacagagaagaacatcaacgggcaccaggccaagttcttcgcctgcatcaagagaagtgacggctcctgtgcgtggtaccgcggcgcggcgccccccaagcaggagtttctcgacatcgaggacccataagcaggcctccaacgcccctgtggccaactgcaaaaaaagcctccaagggtttcgactggtccagctctgacatcccttcctggaaacagcatgaataaaacactcatcccatgggtccaaattaatatgattctgctccccccttctccttttagacatggttgtgggtctggagggagacgtgggtccaaggtcctcatcccatcctccctctgccaggcactatgtgtctggggcttcgatccttgggtgcaggcagggctgggacacgcggcttccctcccagtccctgccttggcaccgtcacagatgccaagcaggcagcacttagggatctcccagctgggttagggcagggcctggaaatgtgcattttgcagaaacttttgagggtcgttgcaagactgtgtagcaggcctaccaggtccctttcatcttgagagggacatggcccttgttttctgcagcttccacgcctctgcactccctgcccctggcaagtgctcccatcgccccggtgcccaccatgagctcccagcacctgactccccccacatccaagggcagcctggaaccagtggctagttcttgaaggagccccatcaatcctattaatcctcagaattccagtgggagcctccctctgagccttgtagaaatgggagcgagaaaccccagctgagctgcgttccagcctcagctgagtctttttggtctgcacccacccccccacccccccccccccgcccacatgctccccagcttgcaggaggaatcggtgaggtcctgtcctgaggctgctgtccggggccggtggctgccctcaaggtcccttccctagctgctgcggttgccattgcttcttgcctgttctggcatcaggcacctggattgagttgcacagctttgctttatccgggcttgtgtgcagggcccggctgggctccccatctgcacatcctgaggacagaaaaagctgggtcttgctgtgccctcccaggcttagtgttccctccctcaaagactgacagccatcgttctgcacggggctttctgcatgtgacgccagctaagcatagtaagaagtccagcctaggaagggaaggattttggaggtaggtggctttggtgacacactcacttctttctcagcctccaggacactatggcctgttttaagagacatcttatttttctaaaggtgaattctcagatgataggtgaacctgagttgcagatataccaacttctgcttgtatttcttaaatgacaaagattacctagctaagaaacttcctagggaactagggaacctatgtgttccctcagtgtggtttcctgaagccagtgatatgggggttaggataggaagaactttctcggtaatgataaggagaatctcttgtttcctcccacctgtgttgtaaagataaactgacgatatacaggcacattatgtaaacatacacacgcaatgaaaccgaagcttggcggcctgggcgtggtcttgcaaaatgcttccaaagccaccttagcctgttctattcagcggcaaccccaaagcacctgttaagactcctgacccccaagtggcatgcagcccccatgcccaccgggacctggtcagcacagatcttgatgacttccctttctagggcagactgggagggtatccaggaatcggcccctgccccacgggcgttttcatgctgtacagtgacctaaagttggtaagatgtcataatggaccagtccatgtgatttcagtatatacaactccaccagacccctccaacccatataacaccccacccctgttcgcttcctgtatggtgatatcatatgtaacatttactcctgtttctgctgattgtttttttaatgttttggtttgtttttgacatcagctgtaatcattcctgtgctgtgttttttattacccttggtaggtattagacttgcacttttttaaaaaaaggtttctgcatcgtggaagcatttgacccagagtggaacgcgtggcctatgcaggtggattccttcaggtctttcctttggttctttgagcatctttgctttcattcgtctcccgtctttggttctccagttcaaattattgcaaagtaaaggatctttgagtaggttcggtctgaaaggtgtggcctttatatttgatccacacacgttggtcttttaaccgtgctgagcagaaaacaaaacaggttaagaagagccgggtggcagctgacagaggaagccgctcaaataccttcacaataaatagtggcaatatatatatagtttaagaaggctctccatttggcatcgtttaatttatatgttatgttctaagcacagctctcttctcctattttcatcctgcaagcaactcaaaatatttaaaataaagtttacattgtagttattttcaaatctttgcttgataagtattaagaaatattggacttgctgccgtaatttaaagctctgttgattttgtttccgtttggatttttgggggaggggagcactgtgtttatgctggaatatgaagtctgagaccttccggtgctgggaacacacaagagttgttgaaagttgacaagcagactgcgcatgtctctgatgctttgtatcattcttgagcaatcgctcggtccgtggacaataaacagtattatcaaagagaa

SEQ ID NO: 191390 - DNA, 3415 bp, Homo sapiens
  Payload ID: 17804
  Gene Name: TIMP metallopeptidase inhibitor 2
  ENST ID: ENST00000536189
  CDS Start-End: 294-725
gcatttgaggggggacgtaattcagcccatacaccaggctgccttctcttattcccagtcaccctttccgtgctcaaccaacttgggataaacaacccaggacatcccagggtagggtcccggaacaaatcccacagggacgacagcggcctgtctattctccagtgttcgattctcctcgaagcgatgcagtgatcagggccaaagcggtcagtgagaaggaagtggactctggaaacgacatttatggcaaccctatcaagaggatccagtatgagatcaagcagataaagatgttcaaagggcctgagaaggatatagagtttatctacacggccccctcctcggcagtgtgtggggtctcgctggacgttggaggaaagaaggaatatctcattgcaggaaaggccgagggggacggcaagatgcacatcaccctctgtgacttcatcgtgccctgggacaccctgagcaccacccagaagaagagcctgaaccacaggtaccagatgggctgcgagtgcaagatcacgcgctgccccatgatcccgtgctacatctcctccccggacgagtgcctctggatggactgggtcacagagaagaacatcaacgggcaccaggccaagttcttcgcctgcatcaagagaagtgacggctcctgtgcgtggtaccgcggcgcggcgccccccaagcaggagtttctcgacatcgaggacccataagcaggcctccaacgcccctgtggccaactgcaaaaaaagcctccaagggtttcgactggtccagctctgacatcccttcctggaaacagcatgaataaaacactcatcccatgggtccaaattaatatgattctgctccccccttctccttttagacatggttgtgggtctggagggagacgtgggtccaaggtcctcatcccatcctccctctgccaggcactatgtgtctggggcttcgatccttgggtgcaggcagggctgggacacgcggcttccctcccagtccctgccttggcaccgtcacagatgccaagcaggcagcacttagggatctcccagctgggttagggcagggcctggaaatgtgcattttgcagaaacttttgagggtcgttgcaagactgtgtagcaggcctaccaggtccctttcatcttgagagggacatggcccttgttttctgcagcttccacgcctctgcactccctgcccctggcaagtgctcccatcgccccggtgcccaccatgagctcccagcacctgactccccccacatccaagggcagcctggaaccagtggctagttcttgaaggagccccatcaatcctattaatcctcagaattccagtgggagcctccctctgagccttgtagaaatgggagcgagaaaccccagctgagctgcgttccagcctcagctgagtctttttggtctgcacccacccccccacccccccccccccgcccacatgctccccagcttgcaggaggaatcggtgaggtcctgtcctgaggctgctgtccggggccggtggctgccctcaaggtcccttccctagctgctgcggttgccattgcttcttgcctgttctggcatcaggcacctggattgagttgcacagctttgctttatccgggcttgtgtgcagggcccggctgggctccccatctgcacatcctgaggacagaaaaagctgggtcttgctgtgccctcccaggcttagtgttccctccctcaaagactgacagccatcgttctgcacggggctttctgcatgtgacgccagctaagcatagtaagaagtccagcctaggaagggaaggattttggaggtaggtggctttggtgacacactcacttctttctcagcctccaggacactatggcctgttttaagagacatcttatttttctaaaggtgaattctcagatgataggtgaacctgagttgcagatataccaacttctgcttgtatttcttaaatgacaaagattacctagctaagaaacttcctagggaactagggaacctatgtgttccctcagtgtggtttcctgaagccagtgatatgggggttaggataggaagaactttctcggtaatgataaggagaatctcttgtttcctcccacctgtgttgtaaagataaactgacgatatacaggcacattatgtaaacatacacacgcaatgaaaccgaagcttggcggcctgggcgtggtcttgcaaaatgcttccaaagccaccttagcctgttctattcagcggcaaccccaaagcacctgttaagactcctgacccccaagtggcatgcagcccccatgcccaccgggacctggtcagcacagatcttgatgacttccctttctagggcagactgggagggtatccaggaatcggcccctgccccacgggcgttttcatgctgtacagtgacctaaagttggtaagatgtcataatggaccagtccatgtgatttcagtatatacaactccaccagacccctccaacccatataacaccccacccctgttcgcttcctgtatggtgatatcatatgtaacatttactcctgtttctgctgattgtttttttaatgttttggtttgtttttgacatcagctgtaatcattcctgtgctgtgttttttattacccttggtaggtattagacttgcacttttttaaaaaaaggtttctgcatcgtggaagcatttgacccagagtggaacgcgtggcctatgcaggtggattccttcaggtctttcctttggttctttgagcatctttgctttcattcgtctcccgtctttggttctccagttcaaattattgcaaagtaaaggatctttgagtaggttcggtctgaaaggtgtggcctttatatttgatccacacacgttggtcttttaaccgtgctgagcagaaaacaaaacaggttaagaagagccgggtggcagctgacagaggaagccgctcaaataccttcacaataaatagtggcaatatatatatagtttaagaaggctctccatttggcatcgtttaatttatatgttatgttctaagcacagctctcttctcctattttcatcctgcaagcaactcaaaatatttaaaataaagtttacattgtagttattttcaaatctttgcttgataagtattaagaaatattggacttgctgccgtaatttaaagctctgttgattttgtttccgtttggatttttgggggaggggagcactgtgtttatgctggaatatgaagtctgagaccttccggtgctgggaacacacaagagttgttgaaagttgacaagcagactgcgcatgtctctgatgctttgtatcattcttgagcaatcgctcggtccgtggacaataaacagtattatcaaagagaa

SEQ ID NO: 191391 - DNA, 2433 bp, Homo sapiens
  Payload ID: 17804
  Gene Name: TIMP metallopeptidase inhibitor 2
  ENST ID: ENST00000592761
  CDS Start-End: 319-648
gtggaaggaggaggaggaggctgggcatcatctctcagcctggaggaggagacgccatgccgggggctgggatcaccatgccccttgcccgtctcgcaccttgctgctgtctgtaaccccccagcacctcccgcaggcctggacgtcttatccctctccttagccccaggagcgtgtttcaggaactctcctcacctctgtgtcttgtgttttgcagtgatcagggccaaagcggtcagtgagaaggaagtggactctggaaacgacatttatggcaaccctatcaagaggatccagtatgagatcaagcagataaagatgttcaaagggcctgagaaggatatagagtttatctacacggccccctcctcggcagtgtgtggggtctcgctggacgttggaggaaagaaggaatatctcattgcaggaaaggccgagggggacggcaagatgcacatcaccctctgtgacttcatcgtgccctgggacaccctgagcaccacccagaagaagagcctgaaccacaggtaccagatgggctgcgagtgcaaggtaagcaggtcctgcctctgctggagcatcgcctcctcccagtgtctccagatggacggcagggattttgatccctggctttccaggacccgttaatccccggctcctgatctaagaccaggctctgggaaggtagagtcatcccaagagtaaggctgtctggctggggacagagcctttgacccctggtccctggagagccctgaggcacatctctgacaggggatgtctggaggccgggcgctgcggctcacgcctgtaatcccggcactttgggaggccgagataggtgggtcacttgaggtcgggagttggaaatcagcctcaccaacatggcgaaaccctgtctctacaaaaatacaaaaattagccaggtgaggtggtgcacgcctgtgatcccagcaacttgggaggatgaggcttaagaattgcttgaatgtgggaggtggaggttgcagtgagttgagatcacaccactgcaccccagcctgggttgacagagtgagactctgtcccaaaaaaaaaagagggagatgtctggaaggctaggagatttgagagtaagagcatgaattcagctctgttacctgtagcttccagaaaaaggagctgtatggggagagagaatatggtcccatggagaattttctacaaatgtgcaagtgcaaacgcctgtgtggcttatgagaaggcactgcaggccttacgctgtttccaacattcccgacattttcacacctgggttggtgtctatgtggggtctgtgtgttgagaatacctgaacacctgctcctcttaaaatgagcccggaggttgtgccaggcacagctggagcagtgcagcgcctagatgtggctgtggaaggtgagattaccgcctccagggctcccaggctggctcctaccctgtgggctcctagcaccctatccccaccctccctgcaggaagcatggctgagtgctgggcacctcccaccctgggtcactcccagtgagtctgggaccaggagactctggtgaggctgtggggattggccttccctggggagctgcctggggctgccctccctcctgacggcccccagccccttctccgcatgttcaaaacaggaattctgaactcatagtctccagccacacgtatgttaagcgaaactcctctgtgcccagcatgaaatcaaaagcaagtttttcctttttctttccacggtggtgaaggcggtcatcctcttgtagcctagggttccttggccaaattgctagttgccgatgacctcggggctcggcttgcgagcaacactgggctggaatctgtctccaggaaacccaggcccttttattgttgctgtgtcccccagagggcagggccaagctgaggccattctgtcatgctcaggaaggtagaagatggcccaaagggaagcacacctgcagtaggagggggggcagcggtgggcagggcacagcttccctgcaggttagaccccctcgcaggccagctgcctgcccctgcaggaaccgtgggtctcgggagaggctgccatccctgcacatgacagatcacgcgctgccccatgatcccgtgctacatctcctccccggacgagtgcctctggatggactgggtcacagagaagaacatcaacgggcaccaggccaagttcttcgcctgcatcaagagaagtgacggctcctgtgcgtggtaccgcggcgcggcgccccccaagcaggagtttctcgacatcgaggacccataagcaggcctccaacgcccctgtggccaactgcaaaaaaagcctccaagggtttcgactggtccagctctgacatcccttcctggaaacagcatgaataaaacactcatcccatgggtccaaattaa

SEQ ID NO: 191392 - DNA, 3345 bp, Homo sapiens
  Payload ID: 17804
  Gene Name: TIMP metallopeptidase inhibitor 2
  ENST ID: ENST00000585421
  CDS Start-End: 224-655
cttgttgaagaatcgtggaaggaggaggaggaggctgggcatcatctctcagcctggaggaggagacgccatgccgggggctgggatcaccatgccccttgcccgtctcgcaccttgctgcttgatcagggccaaagcggtcagtgagaaggaagtggactctggaaacgacatttatggcaaccctatcaagaggatccagtatgagatcaagcagataaagatgttcaaagggcctgagaaggatatagagtttatctacacggccccctcctcggcagtgtgtggggtctcgctggacgttggaggaaagaaggaatatctcattgcaggaaaggccgagggggacggcaagatgcacatcaccctctgtgacttcatcgtgccctgggacaccctgagcaccacccagaagaagagcctgaaccacaggtaccagatgggctgcgagtgcaagatcacgcgctgccccatgatcccgtgctacatctcctccccggacgagtgcctctggatggactgggtcacagagaagaacatcaacgggcaccaggccaagttcttcgcctgcatcaagagaagtgacggctcctgtgcgtggtaccgcggcgcggcgccccccaagcaggagtttctcgacatcgaggacccataagcaggcctccaacgcccctgtggccaactgcaaaaaaagcctccaagggtttcgactggtccagctctgacatcccttcctggaaacagcatgaataaaacactcatcccatgggtccaaattaatatgattctgctccccccttctccttttagacatggttgtgggtctggagggagacgtgggtccaaggtcctcatcccatcctccctctgccaggcactatgtgtctggggcttcgatccttgggtgcaggcagggctgggacacgcggcttccctcccagtccctgccttggcaccgtcacagatgccaagcaggcagcacttagggatctcccagctgggttagggcagggcctggaaatgtgcattttgcagaaacttttgagggtcgttgcaagactgtgtagcaggcctaccaggtccctttcatcttgagagggacatggcccttgttttctgcagcttccacgcctctgcactccctgcccctggcaagtgctcccatcgccccggtgcccaccatgagctcccagcacctgactccccccacatccaagggcagcctggaaccagtggctagttcttgaaggagccccatcaatcctattaatcctcagaattccagtgggagcctccctctgagccttgtagaaatgggagcgagaaaccccagctgagctgcgttccagcctcagctgagtctttttggtctgcacccacccccccacccccccccccccgcccacatgctccccagcttgcaggaggaatcggtgaggtcctgtcctgaggctgctgtccggggccggtggctgccctcaaggtcccttccctagctgctgcggttgccattgcttcttgcctgttctggcatcaggcacctggattgagttgcacagctttgctttatccgggcttgtgtgcagggcccggctgggctccccatctgcacatcctgaggacagaaaaagctgggtcttgctgtgccctcccaggcttagtgttccctccctcaaagactgacagccatcgttctgcacggggctttctgcatgtgacgccagctaagcatagtaagaagtccagcctaggaagggaaggattttggaggtaggtggctttggtgacacactcacttctttctcagcctccaggacactatggcctgttttaagagacatcttatttttctaaaggtgaattctcagatgataggtgaacctgagttgcagatataccaacttctgcttgtatttcttaaatgacaaagattacctagctaagaaacttcctagggaactagggaacctatgtgttccctcagtgtggtttcctgaagccagtgatatgggggttaggataggaagaactttctcggtaatgataaggagaatctcttgtttcctcccacctgtgttgtaaagataaactgacgatatacaggcacattatgtaaacatacacacgcaatgaaaccgaagcttggcggcctgggcgtggtcttgcaaaatgcttccaaagccaccttagcctgttctattcagcggcaaccccaaagcacctgttaagactcctgacccccaagtggcatgcagcccccatgcccaccgggacctggtcagcacagatcttgatgacttccctttctagggcagactgggagggtatccaggaatcggcccctgccccacgggcgttttcatgctgtacagtgacctaaagttggtaagatgtcataatggaccagtccatgtgatttcagtatatacaactccaccagacccctccaacccatataacaccccacccctgttcgcttcctgtatggtgatatcatatgtaacatttactcctgtttctgctgattgtttttttaatgttttggtttgtttttgacatcagctgtaatcattcctgtgctgtgttttttattacccttggtaggtattagacttgcacttttttaaaaaaaggtttctgcatcgtggaagcatttgacccagagtggaacgcgtggcctatgcaggtggattccttcaggtctttcctttggttctttgagcatctttgctttcattcgtctcccgtctttggttctccagttcaaattattgcaaagtaaaggatctttgagtaggttcggtctgaaaggtgtggcctttatatttgatccacacacgttggtcttttaaccgtgctgagcagaaaacaaaacaggttaagaagagccgggtggcagctgacagaggaagccgctcaaataccttcacaataaatagtggcaatatatatatagtttaagaaggctctccatttggcatcgtttaatttatatgttatgttctaagcacagctctcttctcctattttcatcctgcaagcaactcaaaatatttaaaataaagtttacattgtagttattttcaaatctttgcttgataagtattaagaaatattggacttgctgccgtaatttaaagctctgttgattttgtttccgtttggatttttgggggaggggagcactgtgtttatgctggaatatgaagtctgagaccttccggtgctgggaacacacaagagttgttgaaagttgacaagcagactgcgcatgtctctgatgctttgtatcattcttgagcaatcgctcggtccgtggacaataaacagtattatcaaagagaa

SEQ ID NO: 191393 - DNA, 3389 bp, Homo sapiens
  Payload ID: 17804
  Gene Name: TIMP metallopeptidase inhibitor 2
  ENST ID: ENST00000586057
  CDS Start-End: 272-703
ggagacgccatgccgggggctgggatcaccatgccccttgcccgtctcgcaccttgctgctgtctgtaaccccccagcacctcccgcaggcctggacgtcttatccctctccttagccccaggagcgtgtttcaggaactctcctcacctctgtgtcttgtgttttgcagtgatcagggccaaagcggtcagtgagaaggaagtggactctggaaacgacatttatggcaaccctatcaagaggatccagtatgagatcaagcagataaagatgttcaaagggcctgagaaggatatagagtttatctacacggccccctcctcggcagtgtgtggggtctcgctggacgttggaggaaagaaggaatatctcattgcaggaaaggccgagggggacggcaagatgcacatcaccctctgtgacttcatcgtgccctgggacaccctgagcaccacccagaagaagagcctgaaccacaggtaccagatgggctgcgagtgcaagatcacgcgctgccccatgatcccgtgctacatctcctccccggacgagtgcctctggatggactgggtcacagagaagaacatcaacgggcaccaggccaagttcttcgcctgcatcaagagaagtgacggctcctgtgcgtggtaccgcggcgcggcgccccccaagcaggagtttctcgacatcgaggacccataagcaggcctccaacgcccctgtggccaactgcaaaaaaagcctccaagggtttcgactggtccagctctgacatcccttcctggaaacagcatgaataaaacactcatcccatgggtccaaattaatatgattctgctccccccttctccttttagacatggttgtgggtctggagggagacgtgggtccaaggtcctcatcccatcctccctctgccaggcactatgtgtctggggcttcgatccttgggtgcaggcagggctgggacacgcggcttccctcccagtccctgccttggcaccgtcacagatgccaagcaggcagcacttagggatctcccagctgggttagggcagggcctggaaatgtgcattttgcagaaacttttgagggtcgttgcaagactgtgtagcaggcctaccaggtccctttcatcttgagagggacatggcccttgttttctgcagcttccacgcctctgcactccctgcccctggcaagtgctcccatcgccccggtgcccaccatgagctcccagcacctgactccccccacatccaagggcagcctggaaccagtggctagttcttgaaggagccccatcaatcctattaatcctcagaattccagtgggagcctccctctgagccttgtagaaatgggagcgagaaaccccagctgagctgcgttccagcctcagctgagtctttttggtctgcacccacccccccacccccccccccccgcccacatgctccccagcttgcaggaggaatcggtgaggtcctgtcctgaggctgctgtccggggccggtggctgccctcaaggtcccttccctagctgctgcggttgccattgcttcttgcctgttctggcatcaggcacctggattgagttgcacagctttgctttatccgggcttgtgtgcagggcccggctgggctccccatctgcacatcctgaggacagaaaaagctgggtcttgctgtgccctcccaggcttagtgttccctccctcaaagactgacagccatcgttctgcacggggctttctgcatgtgacgccagctaagcatagtaagaagtccagcctaggaagggaaggattttggaggtaggtggctttggtgacacactcacttctttctcagcctccaggacactatggcctgttttaagagacatcttatttttctaaaggtgaattctcagatgataggtgaacctgagttgcagatataccaacttctgcttgtatttcttaaatgacaaagattacctagctaagaaacttcctagggaactagggaacctatgtgttccctcagtgtggtttcctgaagccagtgatatgggggttaggataggaagaactttctcggtaatgataaggagaatctcttgtttcctcccacctgtgttgtaaagataaactgacgatatacaggcacattatgtaaacatacacacgcaatgaaaccgaagcttggcggcctgggcgtggtcttgcaaaatgcttccaaagccaccttagcctgttctattcagcggcaaccccaaagcacctgttaagactcctgacccccaagtggcatgcagcccccatgcccaccgggacctggtcagcacagatcttgatgacttccctttctagggcagactgggagggtatccaggaatcggcccctgccccacgggcgttttcatgctgtacagtgacctaaagttggtaagatgtcataatggaccagtccatgtgatttcagtatatacaactccaccagacccctccaacccatataacaccccacccctgttcgcttcctgtatggtgatatcatatgtaacatttactcctgtttctgctgattgtttttttaatgttttggtttgtttttgacatcagctgtaatcattcctgtgctgtgttttttattacccttggtaggtattagacttgcacttttttaaaaaaaggtttctgcatcgtggaagcatttgacccagagtggaacgcgtggcctatgcaggtggattccttcaggtctttcctttggttctttgagcatctttgctttcattcgtctcccgtctttggttctccagttcaaattattgcaaagtaaaggatctttgagtaggttcggtctgaaaggtgtggcctttatatttgatccacacacgttggtcttttaaccgtgctgagcagaaaacaaaacaggttaagaagagccgggtggcagctgacagaggaagccgctcaaataccttcacaataaatagtggcaatatatatatagtttaagaaggctctccatttggcatcgtttaatttatatgttatgttctaagcacagctctcttctcctattttcatcctgcaagcaactcaaaatatttaaaataaagtttacattgtagttattttcaaatctttgcttgataagtattaagaaatattggacttgctgccgtaatttaaagctctgttgattttgtttccgtttggatttttgggggaggggagcactgtgtttatgctggaatatgaagtctgagaccttccggtgctgggaacacacaagagttgttgaaagttgacaagcagactgcgcatgtctctgatgctttgtatcattcttgagcaatcgctcggtccgtggacaataaacagtattatcaaag

SEQ ID NO: 191394 - DNA, 4603 bp, Homo sapiens
  Payload ID: 17805
  Gene Name: TIMP metallopeptidase inhibitor 3
  Uniprot ID: P35625
  ENST ID: ENST00000266085
  CDS Start-End: 302-937
gcgcagagcgggcagcaggcaggcggcgggcgctcagacggcttctcctcctcctcttgctcctccagctcctgctccttcgccgggaggccgcccgccgagtcctgcgccagcgccgaggcagcctcgctgcgccccatcccgtcccgccgggcactcggagggcagcgcgccggaggccaaggttgccccgcacggcccggcgggcgagcgagctcgggctgcagcagccccgccggcggcgcgcacggcaactttggagaggcgagcagcagccccggcagcggcggcagcagcggcaatgaccccttggctcgggctcatcgtgctcctgggcagctggagcctgggggactggggcgccgaggcgtgcacatgctcgcccagccacccccaggacgccttctgcaactccgacatcgtgatccgggccaaggtggtggggaagaagctggtaaaggaggggcccttcggcacgctggtctacaccatcaagcagatgaagatgtaccgaggcttcaccaagatgccccatgtgcagtacatccatacggaagcttccgagagtctctgtggccttaagctggaggtcaacaagtaccagtacctgctgacaggtcgcgtctatgatggcaagatgtacacggggctgtgcaacttcgtggagaggtgggaccagctcaccctctcccagcgcaaggggctgaactatcggtatcacctgggttgtaactgcaagatcaagtcctgctactacctgccttgctttgtgacttccaagaacgagtgtctctggaccgacatgctctccaatttcggttaccctggctaccagtccaaacactacgcctgcatccggcagaagggcggctactgcagctggtaccgaggatgggcccccccggataaaagcatcatcaatgccacagacccctgagcgccagaccctgccccacctcacttccctcccttcccgctgagcttcccttggacactaactcttcccagatgatgacaatgaaattagtgcctgttttcttgcaaatttagcacttggaacatttaaagaaaggtctatgctgtcatatggggtttattgggaactatcctcctggccccaccctgccccttctttttggttttgacatcattcatttccacctgggaatttctggtgccatgccagaaagaatgaggaacctgtattcctcttcttcgtgataatataatctctatttttttaggaaaacaaaaatgaaaaactactccatttgaggattgtaattcccacccctcttgcttcttccccacctcaccatctcccagaccctcttccctttgcccttctcctccaatacataaaggacacagacaaggaacttgctgaaaggccaaccatttcaggatcagtcaaaggcagcaagcagatagactcaaggtgtgtgaaagatgttatacaccaggagctgccactgcatgtcccaaccagactgtgtctgtctgtgtctgcatgtaagagtgagggagggaaggaaggaactacaagagagtcggagatgatgcagcacacacacaattccccagcccagtgatgcttgtgttgaccagatgttcctgagtctggagcaagcacccaggccagaataacagagctttcttagttggtgaagacttaaacatctgcctgaggtcaggaggcaatttgcctgccttgtacaaaagctcaggtgaaagactgagatgaatgtctttcctctccctgcctcccaccagacttcctcctggaaaacgctttggtagatttggccaggagctttcttttatgtaaattggataaatacacacaccatacactatccacagatatagccaagtagatttgggtagaggatactatttccagaatagtgtttagctcacctagggggatatgtttgtatacacatttgcatatacccacatggggacataagctaatttttttacaggacacagaattctgttcaatgctgttaaatatgccaatagtttaatctcttctattttgttgtcgttgcttgtttgaagaaaatcatgacattccaagttgacatttttttttcattttaattaaaatttgaaattctgaacaccgtcagcaccctctcttccctatcatgggtcatctgacccctgtccgtctccttgtccctgcttcatgtttgggggcctttctttaactgccttcctggcttagctcagatggcagatgagagtgtagtcaagggcctgggcacaggagggagagctgcagagtgtcctgcctgccttggctggagggacacctctcctgggtgtggagacagcttggttccctttccctagctccctggtgggtgaatgccacctcctgagatcctcacctcttggaattaaaattgttggtcactggggaaagcctgagtttgcaaccagttgtagggtttctgttgtgtttttttttttttttttgaaataaaactataatataaattctcctattaaataaaattattttaagttttagtgtcaaaagtgagatgctgagagtaggtgataatgtatattttacagagtgggggttggcaggatggtgacattgaacatgattgctctctgtctcttttttcagcttatgggtatttatcttctattagtatttgtatcttcagttcattccactttaggaaacagagctgccaattgaaacagaagaagaaaaaaaaaaaaagcagcagacaacacactgtagagtcttgcacacacacaagtgcccaggcaaggtgcttggcagaaccgcagagtgggaagagagtaccggcatcgggtttccttgggatcaatttcattaccgtgtacctttcccattgtggtcatgccatttggcagggggagaatgggaggcttggccttctttgtgaggcagtgtgagcagaagctgatgccagcatgtcactggttttgaagggatgagcccagacttgatgttttgggattgtccttattttaacctcaaggtctcgcatggtggggcccctgaccaacctacacaagttccctcccacaagtggacatcagtgtcttctctgtgaggcatctggccattcgcactccctggtgtggtcagcctctctcacacaaggaggaacttgggtgaaggctgagtgtgaggcacctgaagtttccctgcggagtcgataaattagcagaaccacatccccatctgttaggccttggtgaggaggccctgggcaaagaagggtctttcgcaaagcgatgtcagagggcggttttgagctttctataagctatagctttgtttatttcacccgttcacttactgtataatttaaaatcatttatgtagctgagacacttctgtatttcaatcatatcatgaacattttattttgctaaatcttgtgtcatgtgtaggctgtaatatgtgtacattgtgtttaagagaaaaatgaaacccacatgccgccattttcctgaatcaaattctgcagtggaatggagaggaaaatacttctaggcaagcagctagactggtgaattgggggaaatagaaggaactagtaactgagactcctccagcctcctccctattggaatcccaatggctcctggagtaggaaaaaagtttaaactacattcatgttcttgttctgtgtcactcggccctgggtagtctaccatttacttcaccccaagtcctgctgcccatccagttgggaagccatgattttcctaagaatccagggccatgggagatacaattccaagttctcgcttcctcctttgggcatctcttctgcctcccaatcaaggaagctccatgctcaggctctcagctctcgggccagtgctctgctctgtccagggtaggtaatactgggagactcctgtcttttaccctcccctcgttccagacctgcctcatggtggcaacatggttcttgaacaattaaagaaacaaatgactttttggaatagccctgtctagggcaaactgtggcccccaggagacactacccttccatgccccagacctctgtcttgcatgtgacaattgacaatctggactaccccaagatggcacccaagtgtttggcttctggctacctaaggttaacatgtcactagagtatttttatgagagacaaacattataaaaatctgatggcaaaagcaaaacaaaatggaaagtaggggaggtggatgtgacaacaacttccaaattggctctttggaggcgagaggaaggggagaacttggagaatagtttttgctttgggggtagaggcttcttagattctcccagcatccgcctttccctttagccagtctgctgtcctgaaacccagaagtgatggagagaaaccaacaagagatctcgaaccctgtctagaaggaatgtatttgttgctaaatttcgtagcactgtttacagttttcctccatgttatttatgaattttatattccgtgaatgtatattgtcttgtaatgttgcataatgttcactttttatagtgtgtcctttattctaaacagtaaagtggttttatttctatcacaca

SEQ ID NO: 191395 - DNA, 1650 bp, Homo sapiens
  Payload ID: 17806
  Gene Name: TIMP metallopeptidase inhibitor 4
  Uniprot ID: Q99727
  ENST ID: ENST00000287814
  CDS Start-End: 512-1186
gctcagcaaggggtccgtccttctctgtcactgtctcttttgcctgttgtaattctgtctgcctctctgggactctgcctgtctcactctttctgtctgtgcctctcctcactcttgttctttctgcctgaatcacagccctcagtttttctgtcctcatgcatttgtctttgtggctctttccgtctttctgcccttgacaccatcccctctcccagtgcttcccctctgcttccagatcgcttcatgacttaggcagggaaacagaggtcagggcctccttccaggcttccctctgcatcttactgagtatgcaggtcggaagagcctcgggtcctgcctccgcgggtggcctagagccaaaggaaggcggagcccgtcggggcgggattggcccttagggccacctcataaagcctggggcgaggggcacaacggccttgggaaggagccctgctggggccgtccagtcccccagacctcacaggctcagtcgcggatctgcagtgtcatgcctgggagccctcggcccgcgccaagctgggtgctgttgctgcggctgctggcgttgctgcggcccccggggctgggtgaggcatgcagctgcgccccggcgcaccctcagcagcacatctgccactcggcacttgtgattcgggccaaaatctccagtgagaaggtagttccggccagtgcagaccctgctgacactgaaaaaatgctccggtatgaaatcaaacagataaagatgttcaaagggtttgagaaagtcaaggatgttcagtatatctatacgccttttgactcttccctctgtggtgtgaaactagaagccaacagccagaagcagtatctcttgactggtcaggtcctcagtgatggaaaagtcttcatccatctgtgcaactacatcgagccctgggaggacctgtccttggtgcagagggaaagtctgaatcatcactaccatctgaactgtggctgccaaatcaccacctgctacacagtaccctgtaccatctcggcccctaacgagtgcctctggacagactggctgttggaacgaaagctctatggttaccaggctcagcattatgtctgtatgaagcatgttgacggcacctgcagctggtaccggggccacctgcctctcaggaaggagtttgttgacatcgttcagccctagtagggaccagtgaccatcacatcccttcaagagtcctgaagatcaagccagttctccttccctgcagagctttggccattaccacctgacctcttgctgccagctaataagaagtgccaagtggacagtctggccactgtcaaggcagggaaggggccatgacttttctgccctgccctcagcctgttgcccctgcctcccaaaccccattagtctagccttgtagctgttactgcaagtgtttcttctggcttagtctgttttctaaagccaggactattccctttcctccccaggaatatgtgttttcctttgtcttaatcgatctggtaggggagaaatggcgaatgtcatacacatgagatggtatatccttgcgatgtacagtatcagaaggtggtttgacagcatcataaacaggctgactggcaggaatgaaaacaagaacatactgtggctgtgta

SEQ ID NO: 191396 - DNA, 3913 bp, Homo sapiens
  Payload ID: 17807
  Gene Name: tissue factor pathway inhibitor (lipoprotein-associated coagulation inhibitor)
  Uniprot ID: P10646
  ENST ID: ENST00000233156
  CDS Start-End: 296-1210
attcccaactgccagtgatctctgaagccgactctgaggctccctctttgctctaacagacagcagcgactttaggctggataatagtcaaattcttacctcgctctttcactgctagtaagatcagattgcgtttctttcagttactcttcaatcgccagtttcttgatctgcttctaaaagaagaagtagagaagataaatcctgtcttcaatacctggaaggaaaaacaaaataacctcaactccgttttgaaaaaaacattccaagaactttcatcagagattttacttagatgatttacacaatgaagaaagtacatgcactttgggcttctgtatgcctgctgcttaatcttgcccctgcccctcttaatgctgattctgaggaagatgaagaacacacaattatcacagatacggagttgccaccactgaaacttatgcattcattttgtgcattcaaggcggatgatggcccatgtaaagcaatcatgaaaagatttttcttcaatattttcactcgacagtgcgaagaatttatatatgggggatgtgaaggaaatcagaatcgatttgaaagtctggaagagtgcaaaaaaatgtgtacaagagataatgcaaacaggattataaagacaacattgcaacaagaaaagccagatttctgctttttggaagaagatcctggaatatgtcgaggttatattaccaggtatttttataacaatcagacaaaacagtgtgaacgtttcaagtatggtggatgcctgggcaatatgaacaattttgagacactggaagaatgcaagaacatttgtgaagatggtccgaatggtttccaggtggataattatggaacccagctcaatgctgtgaataactccctgactccgcaatcaaccaaggttcccagcctttttgaatttcacggtccctcatggtgtctcactccagcagacagaggattgtgtcgtgccaatgagaacagattctactacaattcagtcattgggaaatgccgcccatttaagtacagtggatgtgggggaaatgaaaacaattttacttccaaacaagaatgtctgagggcatgtaaaaaaggtttcatccaaagaatatcaaaaggaggcctaattaaaaccaaaagaaaaagaaagaagcagagagtgaaaatagcatatgaagaaatttttgttaaaaatatgtgaatttgttatagcaatgtaacattaattctactaaatattttatatgaaatgtttcactatgattttctatttttcttctaaaatgcttttaattaatatgttcattaaattttctatgcttattgtacttgttatcaacacgtttgtatcagagttgcttttctaatcttgttaaattgcttattctaggtctgtaatttattaactggctactgggaaattacttattttctggatctatctgtattttcatttaactacaaattatcatactaccggctacatcaaatcagtcctttgattccatttggtgaccatctgtttgagaatatgatcatgtaaatgattatctcctttatagcctgtaaccagattaaggaatacagctcttaaaaaatcaagaacttcctgagtttcacatataaaatggtgacaaacacctgcttctgataaagtttatccaattttgtatttatagtattctattgtaataatagaattctattatgtgcttccctccttagacatagtttttctccttttgtactaaccagtacttccatctatattgagctaaactgtctttgaacagtcaactctgcatcatgtgcctgcctgatttggattggtttcacttttttttttgtttgaccatagcccattctatcagtcaagatgactgaataattgtgtgttaaatacaactcatgataaggagaacctttatggaaacaagaagttttatggcaatcgagagggaattatttatatgtacttcttaatactatgcttcccaatattttttcttactaaaaataacaaaaatatttaaaccttctgaaatctattcagttatcattaggatttgcacacaatgcaactaataattcatgctttaaaaagtaggttatttctgttgaagagaaaattatcagcagggaagagtctactagaaaattcatgtgctagtcattcttggggatttaatattttgctggagttaattcactatatccagacctgtatctttcatttattgctgagccatgtgcagtctggcatctcaacaacctcaacaacctcaacaacctccaagacatgtcagtttctgtagtgttcacctcaaatctgacactggaattggaactgatttagaaacaaccatttcattcatttggtatgactagcttcatgactagcttcatgaatagcttcatgaatagcttcatgacttctcgctaacaatgatagtataattctgcctgttcttcaggattgaaattttgaactcaatttagatttcctgttttccctcatataccacatctaaacagtctccaaatctttatgcttttttttttttttttcgaaaaagttcacccaatccctaggctttttacttttttctttttcttttcttttttcttgtttttttttttttttcattttgttttgttttgttatgtttttttagacagggtcccactctgtcacccaggctggagtgcagtggtgcaatcacaggacactgaaacctcccacctagctgggactagaggtgcaggccaccacaccagctaatttatgtaatttttgtagagacgagtttcaccacgttacctaggcttgtcttgaacacctgggctcaagcaatcttccagccccagcctcccaaagtgctgggattacaggtataaaccacaatgcccccgtttttactctttactgcatccttcccatcagtattaattcctcagaaatttagtacattcctccaccatttcaaaatgctcccagaactcacactagttggtacttaactacaaccttcaacctcaccatttaattttgatgtatgtttttggatttaccaacagtactttctttcatgactactttgatttagttaagaatgctcactgtacactgaatgttaattactcagctaattcacactgatttcctgtttaaaaatatgatcccctccaggccattcatgtgaagtcagggtacagctgatgccagctacagaatcactatgtttcaatatggaatatgaaaagtcctaacacataattgcaaatcattttctactatggtatacaaattttatcattacaaaatagtatcagcttttttcacttaaggaaaataatacatcttcattcaaatattcagtgcataaataattgccttaaattgagtctttgctgtggaatttgagagttttggaaatcaaaggcccttgtgaaacatttcctgttgccatttatttatagatagcaatagcttcaaatgagtgggaaagtctacttaggtgaagtggtaaatagtcactaagattgtataaatagcgcattgatgagttgcctaattgttttctccaacaataaccactggtccattggttcactacttactcaagaaagacatatactgagatggcttgaaatgtttaatgcatgtgaacgttatttttaccgtgttttggaaaaagatcttgatgttattgtcttcctttattttccacaattaagtgcatctaactgtgaattgtatatggaattacattattcagcatatacatatatttacctgctttgttcattctctgtattcaaaattaacagatcatgctgaaaaccactcaaacgattatattttttacattataagaagtaaaatatattattctgaataatg

SEQ ID NO: 191397 - DNA, 1088 bp, Homo sapiens
  Payload ID: 17807
  Gene Name: tissue factor pathway inhibitor (lipoprotein -associated coagulation inhibitor)
  Uniprot ID: P10646
  ENST ID: ENST00000339091
  CDS Start-End: 242-997
aacagacagcagcgactttaggctggataatagtcaaattcttacctcgctctttcactgctagtaagatcagattgcgtttctttcagttactcttcaatcgccagtttcttgatctgcttctaaaagaagaagtagagaagataaatcctgtcttcaatacctggaaggaaaaacaaaataacctcaactccgttttgaaaaaaacattccaagaactttcatcagagattttacttagatgatttacacaatgaagaaagtacatgcactttgggcttctgtatgcctgctgcttaatcttgcccctgcccctcttaatgctgattctgaggaagatgaagaacacacaattatcacagatacggagttgccaccactgaaacttatgcattcattttgtgcattcaaggcggatgatggcccatgtaaagcaatcatgaaaagatttttcttcaatattttcactcgacagtgcgaagaatttatatatgggggatgtgaaggaaatcagaatcgatttgaaagtctggaagagtgcaaaaaaatgtgtacaagagataatgcaaacaggattataaagacaacattgcaacaagaaaagccagatttctgctttttggaagaagatcctggaatatgtcgaggttatattaccaggtatttttataacaatcagacaaaacagtgtgaacgtttcaagtatggtggatgcctgggcaatatgaacaattttgagacactggaagaatgcaagaacatttgtgaagatggtccgaatggtttccaggtggataattatggaacccagctcaatgctgtgaataactccctgactccgcaatcaaccaaggttcccagcctttttgttacaaaagaaggaacaaatgatggttggaagaatgcggctcatatttaccaagtctttctgaacgccttctgcattcatgcatccatgttctttctaggattggatagcatttcatgcctatgttaatatttgtgcttttggcatttccttaatatttatatgtatacgtgatgcctttgatagcatactgctaataaagttttaatatttacatgca

SEQ ID NO: 191398 - DNA, 3649 bp, Homo sapiens
  Payload ID: 17807
  Gene Name: tissue factor pathway inhibitor (lipoprotein -associated coagulation inhibitor)
  Uniprot ID: P10646
  ENST ID: ENST00000392365
  CDS Start-End: 29-943
gcagtctcagcggttagcagcacaagagatgatttacacaatgaagaaagtacatgcactttgggcttctgtatgcctgctgcttaatcttgcccctgcccctcttaatgctgattctgaggaagatgaagaacacacaattatcacagatacggagttgccaccactgaaacttatgcattcattttgtgcattcaaggcggatgatggcccatgtaaagcaatcatgaaaagatttttcttcaatattttcactcgacagtgcgaagaatttatatatgggggatgtgaaggaaatcagaatcgatttgaaagtctggaagagtgcaaaaaaatgtgtacaagagataatgcaaacaggattataaagacaacattgcaacaagaaaagccagatttctgctttttggaagaagatcctggaatatgtcgaggttatattaccaggtatttttataacaatcagacaaaacagtgtgaacgtttcaagtatggtggatgcctgggcaatatgaacaattttgagacactggaagaatgcaagaacatttgtgaagatggtccgaatggtttccaggtggataattatggaacccagctcaatgctgtgaataactccctgactccgcaatcaaccaaggttcccagcctttttgaatttcacggtccctcatggtgtctcactccagcagacagaggattgtgtcgtgccaatgagaacagattctactacaattcagtcattgggaaatgccgcccatttaagtacagtggatgtgggggaaatgaaaacaattttacttccaaacaagaatgtctgagggcatgtaaaaaaggtttcatccaaagaatatcaaaaggaggcctaattaaaaccaaaagaaaaagaaagaagcagagagtgaaaatagcatatgaagaaatttttgttaaaaatatgtgaatttgttatagcaatgtaacattaattctactaaatattttatatgaaatgtttcactatgattttctatttttcttctaaaatgcttttaattaatatgttcattaaattttctatgcttattgtacttgttatcaacacgtttgtatcagagttgcttttctaatcttgttaaattgcttattctaggtctgtaatttattaactggctactgggaaattacttattttctggatctatctgtattttcatttaactacaaattatcatactaccggctacatcaaatcagtcctttgattccatttggtgaccatctgtttgagaatatgatcatgtaaatgattatctcctttatagcctgtaaccagattaaggaatacagctcttaaaaaatcaagaacttcctgagtttcacatataaaatggtgacaaacacctgcttctgataaagtttatccaattttgtatttatagtattctattgtaataatagaattctattatgtgcttccctccttagacatagtttttctccttttgtactaaccagtacttccatctatattgagctaaactgtctttgaacagtcaactctgcatcatgtgcctgcctgatttggattggtttcacttttttttttgtttgaccatagcccattctatcagtcaagatgactgaataattgtgtgttaaatacaactcatgataaggagaacctttatggaaacaagaagttttatggcaatcgagagggaattatttatatgtacttcttaatactatgcttcccaatattttttcttactaaaaataacaaaaatatttaaaccttctgaaatctattcagttatcattaggatttgcacacaatgcaactaataattcatgctttaaaaagtaggttatttctgttgaagagaaaattatcagcagggaagagtctactagaaaattcatgtgctagtcattcttggggatttaatattttgctggagttaattcactatatccagacctgtatctttcatttattgctgagccatgtgcagtctggcatctcaacaacctcaacaacctcaacaacctccaagacatgtcagtttctgtagtgttcacctcaaatctgacactggaattggaactgatttagaaacaaccatttcattcatttggtatgactagcttcatgactagcttcatgaatagcttcatgaatagcttcatgacttctcgctaacaatgatagtataattctgcctgttcttcaggattgaaattttgaactcaatttagatttcctgttttccctcatataccacatctaaacagtctccaaatctttatgcttttttttttttttttcgaaaaagttcacccaatccctaggctttttacttttttctttttcttttcttttttcttgtttttttttttttttcattttgttttgttttgttatgtttttttagacagggtcccactctgtcacccaggctggagtgcagtggtgcaatcacaggacactgaaacctcccacctagctgggactagaggtgcaggccaccacaccagctaatttatgtaatttttgtagagacgagtttcaccacgttacctaggcttgtcttgaacacctgggctcaagcaatcttccagccccagcctcccaaagtgctgggattacaggtataaaccacaatgcccccgtttttactctttactgcatccttcccatcagtattaattcctcagaaatttagtacattcctccaccatttcaaaatgctcccagaactcacactagttggtacttaactacaaccttcaacctcaccatttaattttgatgtatgtttttggatttaccaacagtactttctttcatgactactttgatttagttaagaatgctcactgtacactgaatgttaattactcagctaattcacactgatttcctgtttaaaaatatgatcccctccaggccattcatgtgaagtcagggtacagctgatgccagctacagaatcactatgtttcaatatggaatatgaaaagtcctaacacataattgcaaatcattttctactatggtatacaaattttatcattacaaaatagtatcagcttttttcacttaaggaaaataatacatcttcattcaaatattcagtgcataaataattgccttaaattgagtctttgctgtggaatttgagagttttggaaatcaaaggcccttgtgaaacatttcctgttgccatttatttatagatagcaatagcttcaaatgagtgggaaagtctacttaggtgaagtggtaaatagtcactaagattgtataaatagcgcattgatgagttgcctaattgttttctccaacaataaccactggtccattggttcactacttactcaagaaagacatatactgagatggcttgaaatgtttaatgcatgtgaacgttatttttaccgtgttttggaaaaagatcttgatgttattgtcttcctttattttccacaattaagtgcatctaactgtgaattgtatatggaattacattattcagcatatacatatatttacctgctttgttcattctctgtattcaaaattaacagatcatgctgaaaaccactcaaacgattatattttttacattataagaagtaaaatatattattctgaataatgaaa

SEQ ID NO: 191399 - DNA, 1119 bp, Homo sapiens
  Payload ID: 17807
  Gene Name: tissue factor pathway inhibitor (lipoprotein -associated coagulation inhibitor)
  Uniprot ID: P10646
  ENST ID: ENST00000409676
  CDS Start-End: 266-1021
agcagcgactttaggctggataatagtcaaattcttacctcgctctttcactgctagtaagatcagattgcgtttctttcagttactcttcaatcgccagtttcttgatctgcttctaaaagaagaagtagagaagataaatcctgtcttcaatacctggaaggaaaaacaaaataacctcaactccgttttgaaaaaaacattccaagaactttcatcagagattttacttgaacagcagtctcagcggttagcagcacaagagatgatttacacaatgaagaaagtacatgcactttgggcttctgtatgcctgctgcttaatcttgcccctgcccctcttaatgctgattctgaggaagatgaagaacacacaattatcacagatacggagttgccaccactgaaacttatgcattcattttgtgcattcaaggcggatgatggcccatgtaaagcaatcatgaaaagatttttcttcaatattttcactcgacagtgcgaagaatttatatatgggggatgtgaaggaaatcagaatcgatttgaaagtctggaagagtgcaaaaaaatgtgtacaagagataatgcaaacaggattataaagacaacattgcaacaagaaaagccagatttctgctttttggaagaagatcctggaatatgtcgaggttatattaccaggtatttttataacaatcagacaaaacagtgtgaacgtttcaagtatggtggatgcctgggcaatatgaacaattttgagacactggaagaatgcaagaacatttgtgaagatggtccgaatggtttccaggtggataattatggaacccagctcaatgctgtgaataactccctgactccgcaatcaaccaaggttcccagcctttttgttacaaaagaaggaacaaatgatggttggaagaatgcggctcatatttaccaagtctttctgaacgccttctgcattcatgcatccatgttctttctaggattggatagcatttcatgcctatgttaatatttgtgcttttggcatttccttaatatttatatgtatacgtgatgcctttgatagcatactgctaataaagttttaatatttacatgcatagtaaa

SEQ ID NO: 191400 - DNA, 545 bp, Homo sapiens
  Payload ID: 17807
  Gene Name: tissue factor pathway inhibitor (lipoprotein -associated coagulation inhibitor)
  ENST ID: ENST00000437725
  CDS Start-End: 227-545
agttactcttcaatcgccagtttcttgatctgcttctaaaagaagaagtagagaagataaatcctgtcttcaatacctggaaggaaaaacaaaataacctcaactccgttttgaaaaaaacattccaagaactttcatcagagattttactttacgggtggctggcaagatggccgaataggaagagctccagtctacagctcccgcagagatcaacgcagaagagatgatttacacaatgaagaaagtacatgcactttgggcttctgtatgcctgctgcttaatcttgcccctgcccctcttaatgctgattctgaggaagatgaagaacacacaattatcacagatacggagttgccaccactgaaacttatgcattcattttgtgcattcaaggcggatgatggcccatgtaaagcaatcatgaaaagatttttcttcaatattttcactcgacagtgcgaagaatttatatatgggggatgtgaaggaaatcagaatcgatttgaaagtctggaagagtgcaaaaaaatgtgtacaagag

SEQ ID NO: 191401 - DNA, 733 bp, Homo sapiens
  Payload ID: 17807
  Gene Name: tissue factor pathway inhibitor (lipoprotein -associated coagulation inhibitor)
  ENST ID: ENST00000453013
  CDS Start-End: 418-733
attcccaactgccagtgatctctgaagccgactctgaggctccctctttgctctaacagacagcagcgactttaggctggataatagtcaaattcttacctcgctctttcactgctagtaagatcagattgcgtttctttcagttactcttcaatcgccagtttcttgatctgcttctaaaagaagaagtagagaagataaatcctgtcttcaatacctggaaggaaaaacaaaataacctcaactccgttttgaaaaaaacattccaagaactttcatcagagattttacttgacaggaaaggccatgtgaggacatagggagaaagcagccaccattggcaagccaagagagagccctcaccaggaacgattggaccagcaccttgatcttggattttctagcctccagaactagatgatttacacaatgaagaaagtacatgcactttgggcttctgtatgcctgctgcttaatcttgcccctgcccctcttaatgctgattctgaggaagatgaagaacacacaattatcacagatacggagttgccaccactgaaacttatgcattcattttgtgcattcaaggcggatgatggcccatgtaaagcaatcatgaaaagatttttcttcaatattttcactcgacagtgcgaagaatttatatatgggggatgtgaaggaaatcagaatcgatttgaaagtctggaagagtgcaaaaaaatgtgtacaa

SEQ ID NO: 191402 - DNA, 1161 bp, Homo sapiens
  Payload ID: 17807
  Gene Name: tissue factor pathway inhibitor (lipoprotein -associated coagulation inhibitor)
  ENST ID: ENST00000426055
  CDS Start-End: 296-1161
attcccaactgccagtgatctctgaagccgactctgaggctccctctttgctctaacagacagcagcgactttaggctggataatagtcaaattcttacctcgctctttcactgctagtaagatcagattgcgtttctttcagttactcttcaatcgccagtttcttgatctgcttctaaaagaagaagtagagaagataaatcctgtcttcaatacctggaaggaaaaacaaaataacctcaactccgttttgaaaaaaacattccaagaactttcatcagagattttacttagatgatttacacaatgaagaaagtacatgcactttgggcttctgtatgcctgctgcttaatcttgcccctgcccctcttaatgctgattctgaggaagatgaagaacacacaattatcacagatacggagttgccaccactgaaacttatgcattcattttgtgcattcaaggcggatgatggcccatgtaaagcaatcatgaaaagatttttcttcaatattttcactcgacagtgcgaagaatttatatatgggggatgtgaaggaaatcagaatcgatttgaaagtctggaagagtgcaaaaaaatgtgtacaagagataatgcaaacaggattataaagacaacattgcaacaagaaaagccagatttctgctttttggaagaagatcctggaatatgtcgaggttatattaccaggtatttttataacaatcagacaaaacagtgtgaacgtttcaagtatggtggatgcctgggcaatatgaacaattttgagacactggaagaatgcaagaacatttgtgaagatggtccgaatggtttccaggtggataattatggaacccagctcaatgctgtgaataactccctgactccgcaatcaaccaaggttcccagcctttttgaatttcacggtccctcatggtgtctcactccagcagacagaggattgtgtcgtgccaatgagaacagattctactacaattcagtcattgggaaatgccgcccatttaagtacagtggatgtgggggaaatgaaaacaattttacttccaaacaagaatgtctgagggcatgtaaaaaaggtttcatccaaagaatatcaaaaggaggcctaattaaaaccaaaagaaaaagaaagaa

SEQ ID NO: 191403 - DNA, 554 bp, Homo sapiens
  Payload ID: 17807
  Gene Name: tissue factor pathway inhibitor (lipoprotein -associated coagulation inhibitor)
  ENST ID: ENST00000417013
  CDS Start-End: 327-554
attcccaactgccagtgatctctgaagccgactctgaggctccctctttgctctaacagacagcagcgactttaggctggataatagtcaaattcttacctcgctctttcactgctagtaagatcagattgcgtttctttcagttactcttcaatcgccagtttcttgatctgcttctaaaagaagaagtagagaagataaatcctgtcttcaatacctggaaggaaaaacaaaataacctcaactccgttttgaaaaaaacattccaagaactttcatcagagattttacttgaacagcagtctcagcggttagcagcacaagagatgatttacacaatgaagaaagtacatgcactttgggcttctgtatgcctgctgcttaatcttgcccctgcccctcttaatgctgattctgaggaagatgaagaacacacaattatcacagatacggagttgccaccactgaaacttatgcattcattttgtgcattcaaggcggatgatggcccatgtaaagcaatcatgaaaagatttttcttcaatattttcact

SEQ ID NO: 191404 - DNA, 685 bp, Homo sapiens
  Payload ID: 17807
  Gene Name: tissue factor pathway inhibitor (lipoprotein -associated coagulation inhibitor)
  ENST ID: ENST00000420747
  CDS Start-End: 502-685
ctctgaggctccctctttgctctaacagacagcagcgactttaggctggataatagtcaaattcttacctcgctctttcactgctagtaagatcagattgcgtttctttcagttactcttcaatcgccagtttcttgatctgcttctaaaagaagaagtagagaagataaatcctgtcttcaatacctggaaggaaaaacaaaataacctcaactccgttttgaaaaaaacattccaagaactttcatcagagattttacttatgaagtcttgctctgttgcccaggctggagcgcagtggcacaatctcagctcactgaaaccttcgccccctgggctcaagctagccagtcttttagtaaacatttagtcaacaaatctgcaattataacggagtacgggtggctggcaagatggccgaataggaagagctccagtctacagctcccgcagagatcaacgcagaaggaacagcagtctcagcggttagcagcacaagagatgatttacacaatgaagaaagtacatgcactttgggcttctgtatgcctgctgcttaatcttgcccctgcccctcttaatgctgattctgaggaagatgaagaacacacaattatcacagatacggagttgccaccactgaaacttatgcattcattttgtgcattcaaggcggatgatggcc

SEQ ID NO: 191405 - DNA, 804 bp, Homo sapiens
  Payload ID: 17807
  Gene Name: tissue factor pathway inhibitor (lipoprotein -associated coagulation inhibitor)
  ENST ID: ENST00000421427
  CDS Start-End: 486-804
aataaacagtcatgtcgctaacacaaagcctgtttggtggtctcttcacatggacgcgcgtgaaatttggtgccgtgactcggatcgggggacctcccttgggagatcaatcccctgtcctcttgttctttgctccgtgagaaagatccacctacgacctcaggtcctcagaccaaccagcccaagaaacatctcaccaatttcaaatccgttactcttcaatcgccagtttcttgatctgcttctaaaagaagaagtagagaagataaatcctgtcttcaatacctggaaggaaaaacaaaataacctcaactccgttttgaaaaaaacattccaagaactttcatcagagattttacttgacaggaaaggccatgtgaggacatagggagaaagcagccaccattggcaagccaagagagagccctcaccaggaacgattggaccagcaccttgatcttggattttctagcctccagaactagatgatttacacaatgaagaaagtacatgcactttgggcttctgtatgcctgctgcttaatcttgcccctgcccctcttaatgctgattctgaggaagatgaagaacacacaattatcacagatacggagttgccaccactgaaacttatgcattcattttgtgcattcaaggcggatgatggcccatgtaaagcaatcatgaaaagatttttcttcaatattttcactcgacagtgcgaagaatttatatatgggggatgtgaaggaaatcagaatcgatttgaaagtctggaagagtgcaaaaaaatgtgtacaagag

SEQ ID NO: 191406 - DNA, 687 bp, Homo sapiens
  Payload ID: 17807
  Gene Name: tissue factor pathway inhibitor (lipoprotein -associated coagulation inhibitor)
  ENST ID: ENST00000435414
  CDS Start-End: 41-687
attgtaggaacagcagtctcagcggttagcagcacaagagatgatttacacaatgaagaaagtacatgcactttgggcttctgtatgcctgctgcttaatcttgcccctgcccctcttaatgctgattctgaggaagatgaagaacacacaattatcacagatacggagttgccaccactgaaacttatgcattcattttgtgcattcaaggcggatgatggcccatgtaaagcaatcatgaaaagatttttcttcaatattttcactcgacagtgcgaagaatttatatatgggggatgtgaaggaaatcagaatcgatttgaaagtctggaagagtgcaaaaaaatgtgtacaagagaaaagccagatttctgctttttggaagaagatcctggaatatgtcgaggttatattaccaggtatttttataacaatcagacaaaacagtgtgaacgtttcaagtatggtggatgcctgggcaatatgaacaattttgagacactggaagaatgcaagaacatttgtgaagatggtccgaatggtttccaggtggataattatggaacccagctcaatgctgtgaataactccctgactccgcaatcaaccaaggttcccagcctttttgaatttcacggtccctcatggtgtctcactccagcagacagaggattgtgtcgtgccaa

SEQ ID NO: 191407 - DNA, 2444 bp, Homo sapiens
  Payload ID: 17808
  Gene Name: tissue factor pathway inhibitor 2
  Uniprot ID: P48307
  ENST ID: ENST00000222543
  CDS Start-End: 314-1021
attactgacacaaacgctccctcagggcgtccccgtctggactacaggagaaagtttgggaggcaggttcaacttttcaacttggcggggaattcctctccctcttacacagtttgcagcgcgggggcggcggggtgacagtccccgtgcatgaatcagccacccctcaggctccgccccggcgggggtcggccggacgctcgccccgcataaagcgggcacccgggccgcctggagcagaaagccgcgcacctcctcccgccaggcgctttctcggacgccttgcccagcgggccgcccgaccccctgcaccatggaccccgctcgccccctggggctgtcgattctgctgcttttcctgacggaggctgcactgggcgatgctgctcaggagccaacaggaaataacgcggagatctgtctcctgcccctagactacggaccctgccgggccctacttctccgttactactacgacaggtacacgcagagctgccgccagttcctgtacgggggctgcgagggcaacgccaacaatttctacacctgggaggcttgcgacgatgcttgctggaggatagaaaaagttcccaaagtttgccggctgcaagtgagtgtggacgaccagtgtgaggggtccacagaaaagtatttctttaatctaagttccatgacatgtgaaaaattcttttccggtgggtgtcaccggaaccggattgagaacaggtttccagatgaagctacttgtatgggcttctgcgcaccaaagaaaattccatcattttgctacagtccaaaagatgagggactgtgctctgccaatgtgactcgctattattttaatccaagatacagaacctgtgatgctttcacctatactggctgtggagggaatgacaataactttgttagcagggaggattgcaaacgtgcatgtgcaaaagctttgaaaaagaaaaagaagatgccaaagcttcgctttgccagtagaatccggaaaattcggaagaagcaattttaaacattcttaatatgtcatcttgtttgtctttatggcttatttgcctttatggttgtatctgaagaataatatgacagcatgaggaaacaaatcattggtgatttattcaccagtttttattaatacaagtcactttttaaaaaatttggatttttttatatataactagctgctattcaaatgtgagtctaccatttttaatttatggttcaactgtttgtgagactgaattcttgcaatgcataagatataaaagcaaatatgactcactcatttcttggggtcgtattcctgatttcagaagaggatcataactgaaacaacataagacaatataatcatgtgcttttaacatatttgagaataaaaaggactagcaaataaaactcattttgcatttaaaagttggattatattttagtcccaagaagacaaagtcgcagattaacaacactttaaaaatattactcccattttattgtgttagattgcagtacaatgaatgaataaggggatttatttaaaagatcttaactttcttgactgatttaaaaagctaatcaatttattaaagccagaaatgttctcctctgggaaagcaatttctatctatttatctaccaatccccactcacatgtatatgtttgtgtttacatagagatagatggttttaagggttttcctattgttaaattatttcctaagacattgtgggttggagaccactaaacttataaaaaaccaaggaaagtaaagtttttcaaatgtttatactgtttaaggtgtttatttatataaaccatgcatgagaaaccatgcataaatttaataatttaaatttcaccagtaaattatcattgattaaatatggtcataccaatgaaataggttttttctttctctgtaataaaacaatttttctaaattcttatgttttcatagcaagattaacatatttaattacaaattaaatatgcaaaatgacaaatgcgtttaccttttgcttgaacaatctttcatttaaaaatttatcccagttattttgacaaataggtatatgcctgagaactttgaatgatgctgaaagctagaagcaaaccaggtactcttcagtcagggactggttgaagattttatggatgaggagttagcaaaatatctatatatgcatatcttctgactcccaggatacataagaaacacagggcctagaacagtatgaataaacacacatatacacaaacatcacagaagatactaaagatattaaaaatgtttacctatagaggtttggagagaacagaggggtggacagttgtggagataatatttgtgtaaatataactgtgatatagtttttatcttggaccatgtaaatatttgacataattaataatcaaaattaaataaaaaagaaaaagc

SEQ ID NO: 191408 - DNA, 781 bp, Homo sapiens
  Payload ID: 17808
  Gene Name: tissue factor pathway inhibitor 2
  ENST ID: ENST00000451238
  CDS Start-End: 1-324
gaggcttgcgacgatgcttgctggaggatagaaaaagttcccaaagtttgccggctgcaagtgagtgtggacgaccagtgtgaggggtccacagaaaagtatttctttaatctaagttccatgacatgtgaaaaattcttttccggtgggtgtcaccggaaccggattgagaacaggtttccagatgaagctacttgtatgggcttctgcgcaccaaagaaaaatacagaacctgtgatgctttcacctatactggctgtggagggaatgacaataactttgttagcagggaggattgcaaacgtgcatgtgcaaaagctttgaaaaagaaaaagaagatgccaaagcttcgctttgccagtagaatccggaaaattcggaagaagcaattttaaacattcttaatatgtcatcttgtttgtctttatggcttatttgcctttatggttgtatctgaagaataatatgacagcatgaggaaacaaatcattggtgatttattcaccagtttttattaatacaagtcactttttaaaaaatttggatttttttatatataactagctgctattcaaatgtgagtctaccatttttaatttatggttcaactgtttgtgagactgaattcttgcaatgcataagatataaaagcaaatatgactcactcatttcttggggtcgtattcctgatttcagaagaggatcataactgaaacaacataagacaatataatcatgtgcttttaacatatttgagaataaaaaggactagcaaataaaa

SEQ ID NO: 191409 - DNA, 1362 bp, Homo sapiens
  Payload ID: 17809
  Gene Name: tissue specific transplantation antigen P35B
  Uniprot ID: Q13630
  ENST ID: ENST00000425753
  CDS Start-End: 105-1070
tcccggccccgccccccacctggctccgcgggcagccggagcgcacccggccggaagccgctgtcggggagccggcggtggggctggacgcaggtgcaactgacatgggtgaaccccagggatccatgcggattctagtgacagggggctctgggctggtaggcaaagccatccagaaggtggtagcagatggagctggacttcctggagaggactgggtgtttgtctcctctaaagacgccgatctcacggatacagcacagacccgcgccctgtttgagaaggtccaacccacacacgtcatccatcttgctgcaatggtggggggcctgttccggaatatcaaatacaatttggacttctggaggaaaaacgtgcacatgaacgacaacgtcctgcactcggcctttgaggtgggcgcccgcaaggtggtgtcctgcctgtccacctgtatcttccctgacaagacgacctacccgatagatgagaccatgatccacaatgggcctccccacaacagcaattttgggtactcgtatgccaagaggatgatcgacgtgcagaacagggcctacttccagcagtacggctgcaccttcaccgctgtcatccccaccaacgtcttcgggccccacgacaacttcaacatcgaggatggccacgtgctgcctggcctcatccacaaggtgcacctggccaagagcagcggctcggccctgacggtgtggggtacagggaatccgcggaggcagttcatatactcgctggacctggcccagctctttatctgggtcctgcgggagtacaatgaagtggagcccatcatcctctccgtgggcgaggaagatgaggtctccatcaaggaggcagccgaggcggtggtggaggccatggacttccatggggaagtcacctttgatacaaccaagtcggatgggcagtttaagaagacagccagtaacagcaagctgaggacctacctgcccgacttccggttcacacccttcaagcaggcggtgaaggagacctgtgcttggttcactgacaactacgagcaggcccggaagtgaagctggaagacaggatcaggtgccagcggaccatcggctggcagagcccagcggccaccacccgtcaaccctgccaggagctgagggcaccacccagcaacctgggcctgcattccatccgctctgcagccccaagcatctttccagtggggcccccattcacgttggtcctcagggaaaccagggtcccgggcaggcccggcgctttgctccccacaccagccccctgcgcgtgtccactctgatcctgcatcccactccctgggagccaataaagtgcattttcacaggc

SEQ ID NO: 191410 - DNA, 869 bp, Homo sapiens
  Payload ID: 17809
  Gene Name: tissue specific transplantation antigen P35B
  ENST ID: ENST00000529048
  CDS Start-End: 65-869
ggtgaggtggcaccggactcagccgcgccctgggccctggatgctccgtgagagtgcaactgacatgggtgaaccccagggatccatgcggattctagtgacagggggctctgggctggtaggcaaagccatccagaaggtggtagcagatggagctggacttcctggagaggactgggtgtttgtctcctctaaagacgccgatctcacggatacagcacagacccgcgccctgtttgagaaggtccaacccacacacgtcatccatcttgctgcaatggtggggggcctgttccggaatatcaaatacaatttggacttctggaggaaaaacgtgcacatgaacgacaacgtcctgcactcggcctttgaggtgggcgcccgcaaggtggtgtcctgcctgtccacctgtatcttccctgacaagacgacctacccgatagatgagaccatgatccacaatgggcctccccacaacagcaattttgggtactcgtatgccaagaggatgatcgacgtgcagaacagggcctacttccagcagtacggctgcaccttcaccgctgtcatccccaccaacgtcttcgggccccacgacaacttcaacatcgaggatggccacgtgctgcctggcctcatccacaaggtgcacctggccaagagcagcggctcggccctgacggtgtggggtacagggaatccgcggaggcagttcatatactcgctggacctggcccagctctttatctgggtcctgcgggagtacaatgaagtggagcccatcatcctctccgtgggcgaggaagatgaggtctccatcaaggaggcagccgaggcggtggtggaggccatggacttccatggggaag

SEQ ID NO: 191411 - DNA, 762 bp, Homo sapiens
  Payload ID: 17809
  Gene Name: tissue specific transplantation antigen P35B
  ENST ID: ENST00000524719
  CDS Start-End: 1-195
acagtgggcgaggaagatgaggtctccatcaaggaggcagccgaggcggtggtggaggccatggacttccatggggaagtcacctttgatacaaccaagtcggatgggcagtttaagaagacagccagtaacagcaagctgaggacctacctgcccgacttccggttcacacccttcaagcagggtgagccctgaccccacagccctccacttggtggaggcctgccccagcccctccctcatgctcgctaccagggcagaggtgaggtgccccctcagagcctgtactgccctggaggtgggacaccaaagctctgaggggtgacttccctgtccctgggcctcctccccccacttcctcccatgcggccccgaccctccctgtccatggccctcacctgcctgcctctgcagcggtgaaggagacctgtgcttggttcactgacaactacgagcaggcccggaagtgaagctggaagacaggatcaggtgccagcggaccatcggctggcagagcccagcggccaccacccgtcaaccctgccaggagctgagggcaccacccagcaacctgggcctgcattccatccgctctgcagccccaagcatctttccagtggggcccccattcacgttggtcctcagggaaaccagggtcccgggcaggcccggcgctttgctccccacaccagccccctgcgcgtgtccactctgatcctgcatcccactccctgggagccaataaagtgcattttcacaggc

SEQ ID NO: 191412 - DNA, 488 bp, Homo sapiens
  Payload ID: 17809
  Gene Name: tissue specific transplantation antigen P35B
  ENST ID: ENST00000526290
  CDS Start-End: 133-488
gttgtttgctgcttgctgcccgagcctgggcgtacccatgggcgcgggtgacagtgcaagtgcttgggacgacaacccgggctcctcatcgcggccggaatccaagaggctgcggcgcgaggtgcaactgacatgggtgaaccccagggatccatgcggattctagtgacagggggctctgggctggtaggcaaagccatccagaaggtggtagcagatggagctggacttcctggagaggactgggtgtttgtctcctctaaagacgccgatctcacggatacagcacagacccgcgccctgtttgagaaggtccaacccacacacgtcatccatcttgctgcaatggtggggggcctgttccggaatatcaaatacaatttggacttctggaggaaaaacgtgcacatgaacgacaacgtcctgcactcggcctttgaggtgggcgcccgcaaggtggtgtcctgcctgtccacctgtatcttccc

SEQ ID NO: 191413 - DNA, 412 bp, Homo sapiens
  Payload ID: 17809
  Gene Name: tissue specific transplantation antigen P35B
  ENST ID: ENST00000527006
  CDS Start-End: 312-412
gtgtttctgggtccttcctgccaggtggctggcctggcctgggtgtgcttggctgtgttcctggaaaaacaaacaccctcccatctcttcctggaagcctgcaccctcatatcagccaggccctggggccaccctcccttttgactgtccctcctgccatagtcccacccagttcctgcacttggcacccaaccctggggtgctggttccctccagagcctcctgacagcctggcttcctacagggatacagcacagacccgcgccctgtttgagaaggtccaacccacacacgtcatccatcttgctgcaatggtggggggcctgttccggaatatcaaatacaatttggacttctggaggaaaaacgtgcacatgaacgacaacgtcctgcactcggcctttgaggtggg

SEQ ID NO: 191414 - DNA, 1324 bp, Homo sapiens
  Payload ID: 17809
  Gene Name: tissue specific transplantation antigen P35B
  Uniprot ID: Q13630
  ENST ID: ENST00000529064
  CDS Start-End: 67-1032
tggacgcaggtgaggtggcaccggactcagccgcgccctgggccctggatgctccgtgcaactgacatgggtgaaccccagggatccatgcggattctagtgacagggggctctgggctggtaggcaaagccatccagaaggtggtagcagatggagctggacttcctggagaggactgggtgtttgtctcctctaaagacgccgatctcacggatacagcacagacccgcgccctgtttgagaaggtccaacccacacacgtcatccatcttgctgcaatggtggggggcctgttccggaatatcaaatacaatttggacttctggaggaaaaacgtgcacatgaacgacaacgtcctgcactcggcctttgaggtgggcgcccgcaaggtggtgtcctgcctgtccacctgtatcttccctgacaagacgacctacccgatagatgagaccatgatccacaatgggcctccccacaacagcaattttgggtactcgtatgccaagaggatgatcgacgtgcagaacagggcctacttccagcagtacggctgcaccttcaccgctgtcatccccaccaacgtcttcgggccccacgacaacttcaacatcgaggatggccacgtgctgcctggcctcatccacaaggtgcacctggccaagagcagcggctcggccctgacggtgtggggtacagggaatccgcggaggcagttcatatactcgctggacctggcccagctctttatctgggtcctgcgggagtacaatgaagtggagcccatcatcctctccgtgggcgaggaagatgaggtctccatcaaggaggcagccgaggcggtggtggaggccatggacttccatggggaagtcacctttgatacaaccaagtcggatgggcagtttaagaagacagccagtaacagcaagctgaggacctacctgcccgacttccggttcacacccttcaagcaggcggtgaaggagacctgtgcttggttcactgacaactacgagcaggcccggaagtgaagctggaagacaggatcaggtgccagcggaccatcggctggcagagcccagcggccaccacccgtcaaccctgccaggagctgagggcaccacccagcaacctgggcctgcattccatccgctctgcagccccaagcatctttccagtggggcccccattcacgttggtcctcagggaaaccagggtcccgggcaggcccggcgctttgctccccacaccagccccctgcgcgtgtccactctgatcctgcatcccactccctgggagccaataaagtgcattttcacaggc

SEQ ID NO: 191415 - DNA, 823 bp, Homo sapiens
  Payload ID: 17809
  Gene Name: tissue specific transplantation antigen P35B
  ENST ID: ENST00000530474
  CDS Start-End: 50-397
agccgctgtcggggagccggcggtggggctggacgcaggtgcaactgacatgggtgaaccccagggatccatgcggattctagtgacagggggctctgggctggtaggcaaagccatccagaaggtggtagcagatggagctggacttcctggagaggactgggtgtttgtctcctctaaagacgccgatctcacgtggctggcctggcctgggtgtgcttggctgtgttcctggaaaaacaaacaccctcccatctcttcctggaagcctgcaccctcatatcagccaggccctggggccaccctcccttttgactgtccctcctgccatagtcccacccagttcctgcacttggcacccaaccctggggtgctggttccctccagagcctcctgacagcctggcttcctacagggatacagcacagacccgcgccctgtttgagaaggtccaacccacacacgtcatccatcttgctgcaatggtggggggcctgttccggaatatcaaatacaatttggacttctggaggaaaaacgtgcacatgaacgacaacgtcctgcactcggcctttgaggtgggcgcccgcaaggtggtgtcctgcctgtccacctgtatcttccctgacaagacgacctacccgatagatgagaccatgatccacaatgggcctccccacaacagcaattttgggtactcgtatgccaagaggatgatcgacgtgcagaacagggcctacttccagcagtacggctgcaccttcaccgctgtcatccccaccaacgtcttcgggccccacgacaacttcaacatcgaggatgg

SEQ ID NO: 191416 - DNA, 871 bp, Homo sapiens
  Payload ID: 17809
  Gene Name: tissue specific transplantation antigen P35B
  ENST ID: ENST00000533817
  CDS Start-End: 276-871
ggccccctcccctaagggctggccctggggccctgccgggggagcccgagcaggtttccggctcccaggatgggatccttgagggtggctgcgccccgaggcctgtcctgccctggaggaatctggctcgccagggctctccaggaccagccagcctcgagtgggcgtgggctgcacacaggcgccgtctcgtgcctgtccctagcatgcgggctttagctgcgaaccgtgttaacgacctgtgccaggagcccccgtcccaaggtgcaactgacatgggtgaaccccagggatccatgcggattctagtgacagggggctctgggctggtaggcaaagccatccagaaggtggtagcagatggagctggacttcctggagaggactgggtgtttgtctcctctaaagacgccgatctcacggatacagcacagacccgcgccctgtttgagaaggtccaacccacacacgtcatccatcttgctgcaatggtggggggcctgttccggaatatcaaatacaatttggacttctggaggaaaaacgtgcacatgaacgacaacgtcctgcactcggcctttgaggtgggcgcccgcaaggtggtgtcctgcctgtccacctgtatcttccctgacaagacgacctacccgatagatgagaccatgatccacaatgggcctccccacaacagcaattttgggtactcgtatgccaagaggatgatcgacgtgcagaacagggcctacttccagcagtacggctgcaccttcaccgctgtcatccccaccaacgtcttcgggccccacgacaacttcaacatcgaggatggccacgtgctgcctggcctcatccacaaggtgcacctggccaa

SEQ ID NO: 191417 - DNA, 1362 bp, Homo sapiens; identical to SEQ ID NO: 191409
  Payload ID: 17809
  Gene Name: tissue specific transplantation antigen P35B
  Uniprot ID: Q13630
  ENST ID: ENST00000612580
  CDS Start-End: 105-1070

SEQ ID NO: 191418 - DNA, 1324 bp, Homo sapiens; identical to SEQ ID NO: 191414
  Payload ID: 17809
  Gene Name: tissue specific transplantation antigen P35B
  Uniprot ID: Q13630
  ENST ID: ENST00000633782
  CDS Start-End: 67-1032

SEQ ID NO: 191419 - DNA, 823 bp, Homo sapiens; identical to SEQ ID NO: 191415
  Payload ID: 17809
  Gene Name: tissue specific transplantation antigen P35B
  ENST ID: ENST00000632250
  CDS Start-End: 50-397

SEQ ID NO: 191420 - DNA, 762 bp, Homo sapiens
  Payload ID: 17809
  Gene Name: tissue specific transplantation antigen P35B
  ENST ID: ENST00000633885
  CDS Start-End: 1-195
acagtgggcgaggaagatgaggtctccatcaaggaggcagccgaggcggtggtggaggccatggacttccatggggaagtcacctttgatacaaccaagtcggatgggcagtttaagaagacagccagtaacagcaagctgaggacctacctgcccgacttccggttcacacccttcaagcagggtgagccctgaccccacagccctccacttggtggaggcctgccccagcccctccctcatgctcgctaccagggcagaggtgaggtgccccctcagagcctgtactgccctggaggtgggacaccaaagctctgaggggtgacttccctgtccctgggcctcctccccccacttcctcccatgcggccccaaccctccctgtccatggccctcacctgcctgcctctgcagcggtgaaggagacctgtgcttggttcactgacaactacgagcaggcccggaagtgaagctggaagacaggatcaggtgccagcggaccatcggctggcagagcccagcggccaccacccgtcaaccctgccaggagctgagggcaccacccagcaacctgggcctgcattccatccgctctgcagccccaagcatctttccagtggggcccccattcacgttggtcctcagggaaaccagggtcccgggcaggcccggcgctttgctccccacaccagccccctgcgcgtgtccactctgatcctgcatcccactccctgggagccaataaagtgcattttcacaggc

SEQ ID NO: 191421 - DNA, 871 bp, Homo sapiens
  Payload ID: 17809
  Gene Name: tissue specific transplantation antigen P35B
  ENST ID: ENST00000632379
  CDS Start-End: 207-871
ggccccctcccctaagggctggccctggggccctgccgggggagccggagcaggtttccggctcccaggatgggatccttgagggtggctgcgccccgaggcctgtcctgccctggaggaatctggctcgccagggctctccaggaccagccagcctcgagtgggcgtgggctgcacacaggcgccgtctcgtgcctgtccctagcatgcgggctttagctgcgaaccgtgttaacgacctgtgccaggagcccccgtcccaaggtgcaactgacatgggtgaaccccagggatccatgcggattctagtgacagggggctctgggctggtaggcaaagccatccagaaggtggtagcagatggagctggacttcctggagaggactgggtgtttgtctcctctaaagacgccgatctcacggatacagcacagacccgcgccctgtttgagaaggtccaacccacacacgtcatccatcttgctgcaatggtggggggcctgttccggaatatcaaatacaatttggacttctggaggaaaaacgtgcacatgaacgacaacgtcctgcactcggcctttgaggtgggcgcccgcaaggtggtgtcctgcctgtccacctgtatcttccctgacaagacgacctacccgatagatgagaccatgatccacaatgggcctccccacaacagcaattttgggtactcgtatgccaagaggatgatcgacgtgcagaacagggcctacttccagcagtacggctgcaccttcaccgctgtcatccccaccaacgtcttcgggccccacgacaacttcaacatcgaggatggccacgtgctgcctggcctcatccacaaggtgcacctggccaa

SEQ ID NO: 191422 - DNA, 488 bp, Homo sapiens; identical to SEQ ID NO: 191412
  Payload ID: 17809
  Gene Name: tissue specific transplantation antigen P35B
  ENST ID: ENST00000632368
  CDS Start-End: 133-488

SEQ ID NO: 191423 - DNA, 412 bp, Homo sapiens; identical to SEQ ID NO: 191413
  Payload ID: 17809
  Gene Name: tissue specific transplantation antigen P35B
  ENST ID: ENST00000633095
  CDS Start-End: 312-412

SEQ ID NO: 191424 - DNA, 869 bp, Homo sapiens; identical to SEQ ID NO: 191410
  Payload ID: 17809
  Gene Name: tissue specific transplantation antigen P35B
  ENST ID: ENST00000633165
  CDS Start-End: 65-869

SEQ ID NO: 191425 - DNA, 32767 bp, Homo sapiens
  Payload ID: 17810
  Gene Name: titin
  ENST ID: ENST00000342175
  CDS Start-End: 226-81582
gagcagtcgtgcattcccagcctcgcctcgggtgtagggattgcatagaaaagcaaaactacacagtcttgactgtgtagttttgtttttaggattagaggctcaccgattcatgtcggagatggtcagaaaaaccaactctccataggacgtcgtttcagaagcaaccttgggcttagtcccaccctttttaggcactcttgagaaatcagagtgcctagaaagatgacaactcaagcaccgacgtttacgcagccgttacaaagcgttgtggtactggagggtagtaccgcaacctttgaggctcacattagtggttttccagttcctgaggtgagctggtttagggatggccaggtgatttccacttccactctgcccggcgtgcagatctcctttagcgatggccgcgctaaactgacgatccccgccgtgactaaagccaacagtggacgatattccctgaaagccaccaatggatctggacaagcgactagtactgctgagcttctcgtgaaagctgagacagcaccacccaacttcgttcaacgactgcagagcatgaccgtgagacaaggaagccaagtgagactccaagtgagagtgactggaatccctacacctgtggtgaagttctaccgggatggagccgaaatccagagctcccttgatttccaaatttcacaagaaggcgacctctacagcttactgattgcagaagcataccctgaggactcagggacctattcagtaaatgccaccaatagcgttggaagagctacttcgactgctgaattactggttcaaggtgaagaagaagtacctgctaaaaagacaaagacaattgtttcgactgctcagatctcagaatcaagacaaacccgaattgaaaagaagattgaagcccactttgatgccagatcaattgcaacagttgagatggtcatagatggtgccgctgggcaacagctgccacataaaacacctcccaggattcctccgaagccaaagtcaagatccccaacaccaccgtctattgctgccaaagcacagctggctcggcagcagtccccatcgcccataagacactccccttccccggtcagacacgtgcgggcaccgaccccatctccggtcaggtccgtgtctccagcagcaagaatctccacatcccccatcaggtctgttaggtctccattgctcatgcgtaagactcaggcatccaccgtggccacaggtcctgaagtgcctcccccttggaagcaagagggctacgtggcctcctcatctgaggctgagatgagagagacaacgctgacaacctctactcagatcaggacagaagagagatgggaagggagatacggtgtccaggagcaagtgaccatcagtggtgctgcgggtgctgccgccagtgtgtcggccagtgctagctacgcagcagaggctgttgccactggtgctaaagaggtgaaacaagatgctgacaaaagtgcagctgttgcgactgttgttgctgccgttgatatggccagagtgagagaaccagtgatcagcgctgtagagcagactgctcagaggacaaccacgactgctgtgcacatccaacctgctcaagaacaggtaagaaaggaagcggagaagactgctgtaactaaggtagtagtggccgccgataaagccaaggaacaagaattaaaatcaagaaccaaagaagtaattaccacaaagcaagagcagatgcacgtaactcatgagcagataagaaaagaaactgaaaaaacatttgtaccaaaggtagtaatttccgcagctaaagccaaagaacaagaaactagaatttctgaagaaattactaagaaacagaaacaagtaactcaagaagcaataatgaaggaaactaggaaaacagttgtacctaaagtcatagttgccacacccaaagtcaaagaacaagatttagtatcaagaggtagagaaggcattactaccaaaagagaacaagtgcaaataactcaggagaagatgagaaaggaagccgagaaaactgccttgtctacaatagcagttgctactgctaaagccaaagaacaagaaacaatactgagaactagagaaactatggctactagacaagaacaaatccaagttacccatggaaaggtggacgttggaaaaaaggctgaagctgtagcaacagttgttgctgcagtagaccaggcccgagtcagagagcccagagagcctgggcatcttgaagaatcctatgctcagcagaccactttggagtacggatataaggaacgcatttccgccgcaaaggtagctgagcctccccaacgtccagcctcagaaccccacgttgtccctaaagcagtcaagcctagagtaatccaggctccttctgagactcatatcaaaactactgatcaaaagggaatgcacatatcatcacagatcaagaaaactacagatctaacaacggaaagattagtccatgtggataaacgcccccgcacagctagccctcactttactgtttcaaaaatttctgttcctaagacagaacatggatatgaggcatcaatagccggtagtgctattgccacattacaaaaagagttgtcagccacatcttctgctcagaagatcaccaaatcggtgaaggctcctactgtgaagcccagtgagactagagtaagggcagagcccacacccttgccacagttccccttcgctgacacaccagatacttacaagagtgaagctggcgttgaggtgaaaaaggaagtaggggtgagcatcactggcaccaccgtccgtgaagagcgctttgaagtactgcacggacgcgaagccaaggtaacagaaacagcaagagtaccagcacctgttgaaattcctgttactccaccaactttggtctcgggcttaaaaaatgtgactgtcatagaaggtgaatctgtcaccttggagtgccacatctctggatacccatccccgacagtgacatggtacagggaagactaccaaatcgaaagttccattgacttccagataaccttccagagtggaattgctcgtcttatgattcgcgaagcatttgcggaagacagcgggcgatttacttgcagtgctgtaaatgaggctggaaccgtcagcacatcctgctatctggctgtgcaggtgtcagaagaatttgaaaaggaaaccacagccgtgactgagaaatttactacagaagagaaacgctttgttgagtcaagagatgtggttatgactgatactagcctcacagaggaacaagcagggcctggagaacctgccgcgccttactttattacaaaaccagtggtccagaaactggtggaaggtgggagcgtggtgtttggatgccaagttggcggcaacccaaagccccatgtatactggaaaaaatctggtgttcctctaaccactggatacagatacaaagtgagttacaacaaacaaaccggtgaatgcaagctggtgatttctatgacttttgctgatgatgctggagaatacactattgttgttcgcaataagcatggagaaacttctgcatctgcttccttgcttgaagaagctgattatgagttactgatgaagtcccagcaagaaatgctttatcagacacaagtgactgcatttgttcaagaacctaaagttggagaaacagcacctggatttgtatactctgagtatgaaaaagagtatgaaaaagaacaagccttaattaggaagaaaatggccaaagatactgtagtggtcagaacttatgtagaagatcaggaattccatatttcttcctttgaagagagacttattaaagaaattgaatatagaataataaagactacattagaagaacttcttgaagaagatggagaagaaaagatggcagttgacatttctgaatctgaagctgttgaatcaggatttgattcaagaatcaagaattatagaattcttgaggggatgggtgtcacttttcattgcaagatgtctggatatccattaccaaagattgcttggtacaaagatggcaagcgcatcaaacatggagaaagataccaaatggactttctacaagatggcagagctagtctgcgtatacctgttgttcttccagaagatgaaggaatctacactgcatttgccagcaatattaaaggaaatgcaatttgctcagggaaattgtatgtggagcctgctgcaccacttggagctccgacttacattcccacactagagccagtgagcagaatcagatctctctctccacgttcagtgagcaggtctcctatacgcatgtctcctgcacggatgtcacctgcaaggatgtctcctgcacggatgtcccctgcaagaatgtcccctggacgtaggctggaggagacagatgagtcacaacttgagagactatataaaccagtctttgtgttaaaacctgtttctttcaaatgtttagaagggcaaactgccagatttgacttaaaggttgttggtagacctatgccagagacgttctggtttcatgatggccagcaaattgtcaatgactatacccataaagtagtcattaaagaagatggtactcaatcactaattattgtccctgccacacccagtgattctggggaatggactgtggttgcccaaaacagggcaggcagatcttcaatttcagtgattttaactgtggaagctgtggaacatcaggtaaaaccgatgtttgtagaaaaactgaaaaatgtcaatataaaggaaggttcccgacttgaaatgaaagtcagagctacgggtaaccccaaccctgacattgtatggttgaaaaacagtgacatcattgtgcctcataaatatcccaaaatcagaattgaaggaaccaagggagaagctgcccttaaaatcgattccactgtcagccaagattctgcctggtatactgcgactgctattaataaagctggcagagacactacaagatgcaaagtaaatgttgaagttgagtttgcagagcctgagccagagagaaagttaatcatcccacgggggacatatagagcaaaggagattgcagccccagaactggagcccctccatttgcgatatggccaagagcaatgggaagaaggtgatctctatgacaaagagaaacaacagaaaccatttttcaagaaaaaactcacttccttaagacttaagcgctttgggcctgcccactttgaatgcaggctaacacccattggtgacccaacgatggtggtggagtggctccatgatggaaagccacttgaagcagccaacaggctccgtatgatcaatgaatttgggtactgcagccttgattatggcgttgcatattctagagacagtggtatcattacttgcagagccactaacaaatatggaacagatcacacatctgctacccttattgttaaagatgagaaaagtcttgtggaagaatcccaattgcctgaggggaggaaaggcttacagagaattgaagaattagagagaatggctcatgaaggtgcacttacaggtgtaacaacagatcagaaagaaaagcaaaagccagacattgtcttgtacccagagccagttagagtacttgaaggggagactgcaaggttccgctgcagggtaacaggctaccctcagcccaaagtcaactggtacctcaatggacagctcatccgcaaaagcaaaaggttcagagttcgctatgatggtatccattacctggacatcgtggactgcaaatcatatgacacaggtgaagtgaaggtcaccgcggaaaatcctgaaggtgtgatagagcataaagtgaagcttgagattcaacagagggaagattttaggtctgtccttaggagagctcctgaaccaaggcctgagtttcacgtacatgaaccaggaaagcttcagtttgaagtacaaaaagtggatagacctgttgacaccactgaaaccaaagaagttgtgaagttgaaaagggctgaaagaattacccatgaaaaagtgcctgaagagtcggaagagctgcgcagtaaattcaagcgcagaacagaagagggctattatgaagccattaccgctgtggagctcaagtctcgaaagaaggatgaatcctatgaggaactcctcaggaagacaaaagatgaacttctccactggaccaaagagttaactgaagaggaaaagaaagctcttgccgaagaaggcaaaatcacgattccaacttttaaacctgacaagattgaactaagtcctagtatggaggctccaaaaatcttcgaaagaatccagagccaaacagtgggccaaggatctgatgcacacttccgggtcagagtcgtggggaaaccagaccccgaatgtgaatggtacaaaaatggtgtcaaaattgaacggtctgaccggatctactggtactggcccgaagacaatgtttgtgaattggtcataagagatgtgactgctgaggactctgccagcatcatggtaaaagccatcaacatagctggagaaacctccagtcacgcattcttacttgtccaagccaagcaattgatcactttcacacaggaattacaagatgttgttgctaaggaaaaagacactatggcaacctttgaatgtgaaacttcagaaccatttgtcaaagtgaaatggtataaagatggtatggaggttcatgagggagataaatacaggatgcactctgacagaaaggttcacttcctctccatactgaccattgatacgtctgatgctgaagattacagctgtgtacttgtggaagatgaaaatgtcaaaacgactgctaaacttattgttgaaggtgcagttgttgagtttgtgaaagaacttcaggacatagaagttccagaatcatattcaggagaattagagtgcattgtatccccagaaaatatagaaggaaaatggtatcataatgatgtggagcttaaatccaatggcaaatatacaattacatctcgtcgtggacgtcagaacctcacggtcaaggatgtaaccaaggaggaccagggagaatacagctttgtcatcgacgggaaaaagacaacctgtaaattaaagatgaaaccccgccccattgctatcctacaaggacttagtgaccaaaaagtctgtgagggtgacattgttcagcttgaagttaaagtctccttggaaagtgtggaaggcgtctggatgaaagacggccaagaagtgcagcccagtgacagggttcacattgtgatagacaaacaatctcatatgctgctcattgaagacatgactaaggaagatgctggaaattactctttcaccattccagcccttggcctctccaccagtgggcgtgtctctgtctatagtgtggacgtgataacacctctaaaagatgttaatgtgattgaaggcaccaaggctgtgcttgaatgtaaggtgtcagtccctgatgtgacttctgttaagtggtacttaaatgatgaacaaatcaagcctgatgaccgtgtacaggccattgtgaaaggtactaaacagcgactagtcattaaccgaactcatgcttcagacgaaggaccttacaagctgatagttggcagagttgaaaccaactgtaatctctctgtagaaaaaattaaaattatcagaggtcttcgtgaccttacctgtacagaaactcaaaatgtggtgtttgaggttgagctgtcccactctggaattgatgtcctgtggaattttaaggacaaggaaatcaagcccagttctaaatataaaattgaagcacatggaaaaatatataaattgacagttctaaatatgatgaaagatgatgaaggaaaatacacattttacgcgggagaaaatatgacatctggaaaacttactgtggcaggtggggccatctccaagccactcacagatcagaccgtagctgaatcccaggaagctgtgtttgaatgtgaagttgccaacccagattccaaaggcgaatggttgagggatggcaaacacctaccactgactaacaacatcagaagtgagtctgatggccacaaaaggagacttatcattgctgccaccaaattagatgacattggagaatatacctacaaggtggccacctccaaaacatctgccaaactcaaagttgaagctgtcaaaattaagaagactctgaagaacctcacagtgacagaaacacaggatgctgttttcactgtcgagcttacacaccctaatgtcaaaggtgtccagtggatcaaaaatggagttgtgctggaatccaatgaaaagtatgctatctctgtcaaaggaacaatttactctctgaggattaaaaactgtgccatcgtggatgagtctgtttatggcttcaggcttggaaggcttggagccagtgccagactgcacgtggagactgtcaagatcattaaaaagccaaaggatgtgacagccttggaaaatgccactgttgcctttgaagttagtgtttcccatgacactgttccagtaaaatggttccataagagtgtggaaattaagccaagtgacaaacacagactggtctcagaaaggaaagtccacaagctgatgctgcagaacatctccccctcagatgctggggaatacacagctgtggtcgggcaattggaatgcaaagcaaaactgtttgtggagacattacatattacaaaaaccatgaaaaatatcgaggtgcctgagaccaaaactgcctcttttgagtgtgaggtgtcccacttcaatgtcccttccatgtggctgaagaatggtgtggaaattgagatgagtgaaaagttcaagatagttgtgcagggaaaactccatcagctgatcatcatgaacaccagcacagaggactcggcagaatacacatttgtctgtggcaatgaccaagtcagtgccaccctgacagtcaccccaatcatgattacttccatgctgaaagacatcaacgctgaagaaaaagacactattacttttgaggtgacagtgaactatgaaggcatctcttacaaatggttaaagaatggtgtggaaatcaaatcaactgacaagtgccagatgagaaccaaaaagctcacacactcactgaacatcaggaatgttcactttggggatgctgctgactacacctttgtggctggaaaagcaacatcaacagccacactttatgtggaagctcgtcatatagaatttaggaaacacattaaggacattaaggtactggagaagaagcgagccatgtttgaatgtgaagtttctgaacctgacatcactgtacagtggatgaaagatgaccaggaactgcagatcacagacagaataaagattcagaaggagaaatatgtccaccgccttctgatcccatccacccggatgtctgatgctgggaagtacacagtggtggcaggaggcaacgtgtcaactgcaaaactctttgtagaaggcagagatgttcgcatccgaagtattaaaaaggaggttcaggtcattgagaaacagcgtgctgttgttgaatttgaggtcaatgaagacgatgttgatgcccactggtataaagatggcattgaaatcaatttccaagttcaagaacgacacaaatatgtagtggaaagaagaatccaccgaatgtttatctctgagaccagacagagcgatgcaggagaatacacctttgtggcaggaaggaacaggagttctgtcactctctatgtcaatgctcctgaaccgccccaagttctgcaggagctccagcctgtcactgtgcagtctggcaagcctgcccgcttctgtgccgtgatatccggaagaccacagcccaaaatttcctggtacaaggaagagcagctgctttccactggcttcaagtgcaaatttcttcatgatgggcaagaatacacgcttttgctaattgaagccttcccagaggatgcggcagtctatacctgtgaagccaagaatgactatggtgttgccacaacatcagcttcactctcagtggaagttccagaagttgtgtctcctgatcaggaaatgcctgtttatccacctgccatcatcaccccgcttcaggacactgtcacttctgaagggcagccagcccgttttcaatgccgggtttctggaacagatctaaaagtgtcgtggtacagcaaagacaagaaaatcaagccatctcggttctttagaatgactcaatttgaagacacttatcaactggaaattgccgaagcttatccagaagatgaaggaacttacacgtttgttgctagtaatgctgtaggccaagtatcaagcacagccaacctgagtctggaagtgcaagccctagataggcaaagttctgggaaagatgtaagagagtccaccaagtcccaggcagtggcagattcctctttcacaaaggaggagagcaaaatatctcaaaaggaaattaagtcatttcaaggatcatcatatgaatatgaagtgcaggtttttgaaagtgtatctcaaagttccatccacacagctgcatctgttcaagatacacagttgtgccatactgcatccctttcacaaattgcagaaagcactgagctatctaaggaatgtgctaaagagtccacgggtgaggcgcccaagattttcctgcatcttcaggacgtcactgtaaagtgcggtgacacggctcaattcctctgtgttttaaaagatgattctttcattgatgtaacctggactcacgaaggtgcaaagatagaggaatccgagagactgaaacaatcacaaaatggaaatattcagtttcttaccatatgtaatgttcagctggtagaccaaggactatacagctgcattgtacacaatgactgtggagagaggacaacgtcagcagtactaagtgtagaaggtgctcctgaatcaattttgcatgagaggattgaacaagagattgagatggaaatgaaagagttttctagttcttttctgtctgccgaggaagaaggacttcatagcgccgaacttcaattatctaaaataaatgaaacacttgaacttttgtctgaatctccagtttacccaactaaatttgattccgaaaaggaaggcactggcccaattttcatcaaagaagtgtcaaatgctgatataagcatgggggatgtggctacactgtctgtaactgtcattggcatccccaaacctaaaattcagtggttctttaatggagtgctattaaccccttctgctgactacaaatttgtttttgacggtgatgatcatagcctgatcattctgttcaccaaattggaggatgagggagagtatacatgtatggccagtaatgactatggaaagacaatatgtagtgcctatctaaaaattaattccaaaggagagggtcacaaagacactgaaacagaatcagcagtggcaaaatctctggaaaagctgggaggtccttgtcctcctcacttccttaaggagttaaaaccaattcgctgtgctcaagggcttcctgccatctttgagtacacagtggttggagagcctgcccctactgttacatggttcaaagaaaacaagcagctttgcaccagtgtttattacactatcattcataaccctaatggctctggaactttcattgtcaatgaccctcagagggaagacagtggcctctatatctgtaaagcagagaatatgttgggtgagtccacctgtgcagcagagctgcttgtgcttctggaagacacagacatgactgataccccctgcaaagcaaagtccacaccagaggctcctgaggattttccacagacacccttaaagggtcccgcagttgaagcacttgactcagagcaggaaattgcaacgtttgtaaaagacaccattttgaaagctgctttaattacagaagaaaaccagcaactatcttatgagcatattgctaaagccaatgaattgagcagtcagcttcctttgggagctcaggaattgcaatccattttggagcaagacaagctcactcctgaaagcaccagggaatttctttgcatcaatggcagtattcactttcagcctctcaaggaaccatctcccaacctacagctgcagattgtacagtcccagaaaaccttctccaaagaaggtattctaatgcctgaagagcctgagacacaggcagttctatcagataccgagaaaatcttcccaagtgccatgtccatagaacaaattaattcattaacagttgagcctctgaaaactttattagctgaacctgaagggaattatccacagtcttcaatagaacctccaatgcattcttatctaacctctgtggctgaggaagtactttcaccaaaagaaaagacagtatctgacaccaacagagagcaaagagtgactcttcaaaagcaagaggcacaaagtgcgctcatcttgagtcagagcttagctgagggacacgtggagagtctccagagtcctgatgtcatgatctctcaggtaaactatgagcccctagtcccttcagaacactcatgcacagaaggaggtaaaattttgatagaaagtgcaaatccactggaaaatgcagggcaagattctgcggtcagaattgaggaaggcaagtccttaagatttccactagcacttgaagaaaagcaggtactgctcaaagaagagcattctgacaacgtggtgatgcccccagaccaaatcattgagtctaaaagagagcccgtggcaataaagaaagtgcaggaggtacagggaagggaccttctttctaaggaaagcttgctttctggtattccagaagagcagagattaaacctgaaaattcaaatctgccgggctttgcaagcagccgtggccagcgagcagccaggtcttttctctgagtggctaagaaatattgaaaaggtggaggtcgaggctgtaaacatcacccaagagcccagacacatcatgtgcatgtaccttgttacttcggcaaagtctgtaacagaagaagtaaccatcattattgaagatgttgatcctcaaatggctaacctgaaaatggaacttagggatgctttgtgtgctattatatatgaggaaatagacatcctaacagctgagggtcctagaattcagcaaggagccaaaacaagtttgcaagaagaaatggattctttttcaggttcacagaaggttgaacccattactgaaccagaagttgaatctaaatatctgatctcaactgaagaggtcagttattttaacgtgcaaagtagggttaaatatttggatgccacacctgtcactaaaggggttgcttcagctgttgtctctgacgaaaaacaagatgagagtctgaaaccatcagaggaaaaagaggagtcttcctctgaaagtggtactgaggaggttgctacagtaaagatacaggaagctgagggtggcttaatcaaagaggatggccccatgatacatacacctttagtggacactgtttctgaggaaggtgatattgtacacctcacaacatccataacaaatgctaaagaggtgaattggtattttgagaataaactggtgccttcagatgaaaagttcaagtgtttacaagatcaaaatacatatacgctagtcatcgacaaagtaaataccgaagaccatcaaggagagtatgtctgtgaggccttgaatgacagcggaaaaacagcaacttcagccaaactcactgtagtaaaaagagctgccccagtgatcaagaggaaaatcgaacccctggaagtagcactgggccacctagccaaattcacctgtgagatccaaagtgctcccaatgtccggttccagtggtttaaagctggccgagaaatttatgagagtgacaagtgttctattcgatcttcaaagtatatctccagccttgaaatcctgagaacccaggtggttgactgcggcgagtatacatgcaaagcttccaatgagtatggcagtgtcagctgtacagccacactaactgtgacagtgcctggaggtgaaaagaaagttcgcaaattacttccggaacgtaaacctgaaccaaaggaagaagttgttctgaaaagcgttctaagaaaaagacctgaagaagaagaacctaaagtagaacctaaaaaactagaaaaagttaaaaaacctgcagtaccagaaccaccacctccaaaacctgttgaagaggttgaagtacctactgttacaaaaagggaaaggaagattcctgaaccaacaaaagtgcctgaaatcaagccagcaatacctctccctgcacctgaaccgaaaccaaagcccgaagcagaagtgaaaacaatcaaaccacctcctgtggaacctgaaccaacccccatcgctgccccagtaacagtgccagtggttggaaagaaagcagaagccaaagcacctaaggaagaggctgccaagccaaaaggtcctatcaaaggtgtacccaaaaagactccttcaccaatagaagccgaaaggagaaagttaaggccaggaagtggtggagagaaacctcctgatgaagccccgttcacctaccagctaaaggctgtgccactgaagtttgtgaaagaaatcaaagacatcatcttgacagaatcagagttcgttggctcttcagcaatctttgaatgtttggtctccccttccactgcaattacaacctggatgaaagacggtagcaatatccgtgagagtcccaagcacaggtttattgcagatggtaaagacagaaagctgcacatcattgatgttcaactttccgatgctggtgaatacacctgtgttttacgtttgggaaacaaagaaaagacctccacggctaaacttgttgtagaagaacttcctgtgcgttttgtaaaaacactggaagaggaagtcacagtggtcaaaggacagccattgtacttgagctgcgagttaaacaaagagcgtgacgtggtctggaggaaggatggcaagattgtggtggagaaacctggccgaattgtgccaggcgtcattggcttgatgcgggctctgaccatcaacgatgcagatgacacagatgctggaacatacacagttactgtggaaaacgccaacaacctggagtgttcatcttgcgtaaaagtagtagaagtcattagagattggctggtgaaacctatacgagaccagcatgtgaaacccaaggggacagctatttttgcctgtgatatagcaaaagatactccaaacattaagtggttcaaaggatatgatgaaatccctgcggaaccaaatgataagactgaaatactgagagatggaaatcatctgtacctcaaaattaagaatgctatgccagaagatattgctgagtatgcagtggaaattgaaggaaaaagataccctgcaaagctgacacttggagagcgtgaagttgaactgcttaaaccaatagaggacgttaccatttatgagaaagaaagtgcaagctttgatgcagaaatctcagaggcagacattcctggacaatggaaactgaaaggagaacttctaaggccctcacctacttgtgaaatcaaagcagaaggtggaaaacgcttcttaactttgcacaaagtcaaactggaccaagctggtgaagtcctctaccaggcccttaatgcaattacaactgccattttgacagtaaaagaaatcgaacttgactttgctgtgcccctgaaggatgtcactgttccagaaaggcgacaggctcgattcgaatgtgtcctcacccgagaggcaaatgttatatggtccaaaggacctgatataattaagtcatctgacaaatttgatatcatcgctgatggaaagaaacatattcttgttattaatgattctcaatttgatgatgaaggggtctatactgctgaggtggagggcaagaagacctcagctcggttgtttgtcacaggtataagactgaaattcatgtcacctcttgaagatcaaacagtaaaagaaggtgaaacagcaacttttgtttgtgaactttctcatgaaaaaatgcatgtagtctggttcaaaaatgatgccaaactccatacaagcagaacagtactcatctcttctgagggcaagactcacaaattggaaatgaaagaagtgacattggatgatatatctcagataaaagctcaagtcaaggagctgagctccacagcacagctgaaggtcttagaggccgatccctacttcactgtgaaattacatgacaaaactgcagtggagaaggatgagattactttgaagtgtgaagtgagcaaagatgtaccagtgaaatggttcaaagatggtgaagagattgtcccttcacccaaatattctatcaaggcagatggcctgcgccgcatcttaaaaatcaaaaaggcggaccttaaagataaaggcgaatatgtgtgtgactgtggcacagacaagaccaaggcaaatgttactgttgaggctcgactaataaaagtggaaaagcctctgtacggagtagaggtgtttgttggtgaaacagcccactttgaaattgaactttctgaacctgatgttcacggccagtggaagctgaaaggacagcctttgacagcttcccctgactgtgaaatcattgaggatggaaagaagcatattctgatccttcataactgtcagctgggtatgacaggagaggtttccttccaggctgctaatgccaaatctgcagccaatctgaaagtgaaagaattgcctcttatcttcatcacacctctcagtgatgttaaagtcttcgagaaagatgaggctaagtttgagtgtgaagtatccagggagcccaaaacattccgttggctaaaaggaacccaggaaatcacaggtgatgacagatttgagcttataaaggatggcactaagcattcaatggtgatcaagtcagctgcttttgaagatgaagcaaaatacatgtttgaagctgaagataagcacacaagtggcaaactgatcattgaaggaatccggctcaaattcctcacccctctcaaagatgtaactgccaaagagaaggaaagtgctgtatttactgtggagttatctcatgataacatccgagttaaatggttcaagaatgaccagcgcctacacaccaccaggtcggtctcaatgcaagacgaagggaaaactcattcgatcacattcaaagacctgtctattgatgacacctcccaaattagagtagaagctatggggatgagttcagaagctaaactcactgtgcttgagggagacccatattttacaggaaaacttcaagattatactggtgtagagaaagatgaagttattctacagtgtgaaattagcaaagcagatgcaccagtgaaatggtttaaggatgggaaggaaataaagccatccaaaaatgctgttattaaggcagatggcaagaaacgcatgctaatcctaaagaaagccttgaaatcagatattggacagtacacctgtgactgtgggacagataagacctcaggaaaacttgacattgaggatcgggaaattaaactggtgcgacccctgcacagtgtggaggtgatggagactgagacagcacgctttgaaaccgaaatctctgaagatgatatccacgccaactggaaactcaagggagaggccctactccaaacacctgattgtgaaattaaggaagaaggcaaaatacactcccttgttttgcacaactgtcgcctggaccagacgggtggggtggatttccaagctgccaatgttaaatctagtgcccacctccgagttaagccacgagtaattggtcttctgaggcctttaaaggatgtcaccgtgactgcaggggaaacagccaccttcgactgcgagctctcctacgaagatatcccagtggaatggtatctcaaagggaagaaactagagcccagcgataaggtggtcccacgttcagaaggaaaagttcatacacttactctgagggatgtaaagttagaagatgctggggaagtccaactaacagcaaaagatttcaaaactcacgccaacctctttgtgaaagaacccccagttgaattcactaagcctcttgaggaccagacggtcgaagagggagccactgcagtgctggagtgtgaagtctccagagaaaatgctaaggtgaaatggttcaaaaatgggacagaaatcctcaaaagcaagaagtatgaaattgttgctgatggcagggtcagaaaacttgttatacatgactgtaccccagaggatattaaaacatacacttgtgatgctaaggattttaagacttcctgtaacctgaatgtcgtgcctcctcatgtggaattcttaagaccactcaccgaccttcaagttagagaaaaagaaatggctcgatttgagtgtgaactttcccgagaaaatgctaaggttaagtggtttaaagatggtgctgaaattaaaaagggcaaaaaatatgacatcatatccaagggagcagtgcgcattcttgtcatcaacaaatgtctactggatgatgaagctgaatattcctgtgaagtaaggacagcgagaacttctggcatgctgacagttctggaagaagaagctgtctttaccaaaaatcttgccaacattgaagttagtgaaacagacactataaaactggtttgtgaagtctccaaacctggcgcagaagtgatttggtataaaggggatgaggagatcattgaaacaggaagatatgaaatactgactgaaggacggaagagaatcctggtcattcagaacgctcaccttgaggatgctggcaactacaactgtcgactcccaagctctcgaaccgatggcaaagtcaaagtacatgaactggctgctgaatttatctcaaagcctcaaaaccttgaaatacttgaaggagaaaaggctgaatttgtctgctctatatcaaaagaaagctttccagtccagtggaagagggatgataagacacttgaatctggagataaatatgacgttattgctgatggtaaaaagagggtcctagttgtgaaagatgccacattacaagatatgggcacttacgttgtcatggtaggggccgccagagcagcagctcacttgacagtcattgaaaaactcaggatcgtagttcctcttaaggacacccgggtgaaggaacaacaggaagttgtcttcaactgtgaagtcaatactgaaggtgccaaagccaaatggttcagaaatgaagaagctatatttgatagttcaaaatacatcattctccaaaaagacctagtctacaccctcagaattagagatgcacacttagatgaccaagccaactataatgtgtctttgaccaatcacagaggtgaaaatgttaaaagtgcagccaatctaatagtagaagaggaagaccttaggattgttgagcctcttaaagatattgaaacaatggagaagaaatctgtcacattctggtgcaaggtgaatcgtctcaatgtaacactgaagtggaccaaaaatggtgaagaagtgccttttgacaaccgtgtctcatacagagttgataagtacaagcacatgttaaccattaaagactgtggcttcccagatgaaggtgaatacattgtcactgctggacaagataaatctgttgctgagcttctcatcatagaagccccgacagaatttgtggaacacttggaagatcagacagtcactgagttcgatgacgctgtcttctcctgccagctctccagagagaaagccaatgtaaaatggtacagaaatgggagagaaatcaaagaaggcaaaaaatacaaatttgaaaaagatggaagtatacacagactcattataaaagattgcaggctggatgatgagtgtgaatatgcttgcggggtagaagacaggaagtctcgtgctagactttttgtggaagaaattcctgttgagatcatcaggcctccacaagatattcttgaagcccctggtgctgatgttgtctttttagcagaactcaataaagataaggtggaagtccaatggctaagaaataacatggttgttgtccagggtgataaacaccagatgatgagtgaaggaaagatacatcgactacagatttgtgatattaagccccgtgaccagggtgaatacagatttattgccaaagacaaagaagccagagctaagcttgaactggcagctgcaccaaaaatcaagacagctgaccaagaccttgtggttgatgttggcaagcctctgacaatggtggtgccatatgatgcctaccccaaagcagaagctgaatggtttaaagaaaatgaacctttatctacaaaaaccattgatactacggctgaacaaacttctttcagaattttagaagccaagaaaggagacaaagggaggtataaaattgtgcttcagaacaaacatggaaaagcagaaggattcatcaatttaaaagttattgatgttcctgggccagtacgtaacttagaagtgacagaaacatttgatggtgaagtgagccttgcttgggaagaacctttaactgatggtggaagcaaaatcataggttacgttgttgaaagacgtgacattaagagaaagacctgggttctggccacagaccgtgcagagagttgtgagtttactgtcactggtctacagaaaggaggagttgagtacctattccgtgtgagtgcaagaaacagagttggcactggtgagccagtagaaactgacaatcctgtagaagcaaggagtaaatatgatgttccaggccctcctttgaatgtaaccatcactgatgtgaatcgatttggtgtctcactgacatgggaaccaccagagtatgatggaggtgctgagatcacaaactacgtcattgaattaagagacaagacttctatcaggtgggatactgccatgactgtgagagctgaagacctgtctgcaactgttactgatgtggtagaaggacaggagtacagtttccgagtgagagcccaaaatcgaattggagttggaaaaccaagtgcagccacacccttcgtcaaagttgctgatccaattgagagaccaagtcctcctgtaaacctaacttcctcagatcagactcagtcatcagttcagctcaaatgggaacctcctctgaaagatggaggaagcccaatattaggctatataattgagcgatgcgaagaaggaaaagataattggattcgttgcaatatgaaacttgtccctgaactgacttacaaggttaccggattggaaaaaggaaataaatatttatatagagtatctgcagaaaataaagctggtgtttcagatccatctgaaattcttggtcctctcaccgctgacgatgcatttgttgaaccaacaatggatttaagtgcatttaaagatggtctggaagttattgtcccaaatcctatcacgatcctggttccaagtacaggctatccaaggccaactgcaacctggtgttttggagataaagtactagaaacaggggaccgggtgaaaatgaagaccttgtctgcctatgccgaacttgtcatttctccaagtgaacgttcagacaagggcatttatacactgaaattagaaaaccgtgtgaaaacaatttctggggaaattgatgtcaatgtaattgctcgcccaagtgcacccaaagaattgaaatttggtgatataaccaaggactcagtacatttgacttgggaaccacctgatgatgatggaggaagtccgttaactggatacgttgttgaaaaacgagaagtcagccggaaaacatggactaaagttatggactttgtgactgatctagaattcacagttcctgatcttgttcaaggaaaagagtacttatttaaagtttgtgctcgtaacaaatgtggccctggagaacctgcatatgttgatgaacctgtaaatatgtcaactcctgcaacggtacctgacccaccagagaatgttaaatggagagatcgaacagccaatagcatcttcttaacatgggatccacctaaaaatgatggtggttcacgcatcaaaggatatatagttgaaagatgtccacgtggttctgataaatgggttgcctgtggagaacctgttgcagaaacaaaaatggaagtgacaggtcttgaggaaggcaaatggtatgcctaccgcgtgaaggccttaaacaggcagggtgctagcaaaccaagcagacccacagaggaaatccaggctgtggacacacaagaggccccagaaatcttcctcgatgtgaagctccttgctggtctcactgtaaaagctgggaccaagattgaacttcctgccaccgtaaccggaaaacctgaacctaaaataacttggacaaaggctgatatgattctgaagcaggacaaaagaattaccattgaaaatgtccctaagaaatccacagtgactattgttgatagtaagagaagtgacactggcacatatatcattgaggctgtgaatgtgtgtggccgggccactgctgtggtggaagtgaacgtcttagataaacccggaccaccagctgcctttgacatcacagatgtaaccaatgagtcatgtcttctaacatggaacccaccacgcgatgatggtggatctaagatcacaaactatgttgtggagagacgagcaactgatagtgaagtgtggcacaagctctcatccaccgtcaaggatacaaacttcaaggccaccaaattaatccccaataaagagtacatcttcagagttgctgcagaaaacatgtatggtgttggtgaaccagttcaggcctctccaataacagccaaatatcagtttgatccacctggtcctccaactcgcctagaaccttctgatatcactaaagacgcagtgactctcacatggtgtgagccagatgatgatggtggcagcccaatcacaggatactgggttgaaagactggatcctgatacagataaatgggttagatgcaataagatgccagtaaaggacacaacatacagagtgaaaggtctcactaataagaaaaaatacagattccgtgtgttggctgaaaatcttgctggacctggaaaaccaagcaaatcaactgaaccaatcttaataaaggatcccatagatcctccatggccccctggaaaaccaactgtaaaagatgtaggcaaaacatcagtaaggttgaattggacaaaaccagaacatgatggaggtgcaaagattgagtcttatgtcattgaaatgctgaagactggaacagatgagtgggtcagagtggcggaaggggttcccaccactcagcacttgctcccagggctcatggaaggacaggaatactcattccgagttagagctgtgaataaggctggggaaagtgaacccagtgaacccagtgaccctgtgctttgccgggagaagctatatcctccatcaccaccacgctggcttgaagttattaatatcacaaaaaatacagcagacctaaaatggacagttcctgagaaagatggagggtcccccatcaccaactacattgtggaaaagagagacgtcaggcgaaaaggctggcaaacagtggataccactgtcaaggacaccaagtgcacagtcaccccactgactgagggctctttatatgtgttccgagttgctgcagaaaatgctataggacaaagcgactacaccgaaattgaggactctgtgctggccaaagacacctttaccactcctggaccaccctacgccctggcagtggttgatgtgacaaaacgacatgttgacctaaagtgggagccacctaaaaatgatggtggaagaccaatacagagatatgtcattgagaagaaagaaaggttaggtacccgttgggtgaaagctggaaagactgcaggacctgactgtaacttcagagtaactgatgtcatcgaaggaacagaggtccagtttcaggttcgggctgaaaatgaagctggagttggccacccaagtgaacccacagaaatcctatccattgaagatccaacaagtcctccctcaccaccccttgacctacatgtgactgatgctgggagaaaacacattgccattgcttggaagcctccagagaaaaatggtggaagtcctatcataggataccatgttgaaatgtgtccagtaggcactgagaaatggatgagagttaattctcgcccaataaaggacttgaaattcaaggttgaagaaggtgttgttcctgacaaagaatatgtcctgagagtgagagcagtcaatgctattggtgtcagcgagccatctgaaatctctgaaaatgtggttgccaaagacccagactgcaagccaacaattgacctggagactcatgacattattgttattgaaggtgaaaagttaagcattcctgttcccttcagagctgtcccagttccaactgttagttggcataaagatggcaaagaagttaaagcaagtgatagattaacaatgaagaatgatcacatctctgcacaccttgaagttcccaagagtgtccgtgcagatgccggaatttataccattacactggagaataagctcggctcagcaacagcctcaatcaatgtcaaagtcataggcctacctggaccatgcaaagatattaaagcaagtgacattaccaagagttcttgtaagttaacttgggaacctccagaatttgatggtggaaccccaattcttcattatgtcctggagcgcagagaagctgggaggagaacatatataccagtcatgtctggtgagaacaaactgtcatggactgtgaaggatctcataccaaatggtgaatacttcttccgtgttaaagcagtcaacaaggttggtggaggagaatatattgaactgaaaaatccagtcattgctcaagatccaaagcaaccccctgatccacctgtagatgtagaggttcataatcctacagcggaggcaatgactattacatggaagccacctttgtatgatggagggagcaagataatgggctacatcatagagaagattgctaagggtgaagaaaggtggaagagatgcaatgaacacctggtaccaatcctgacctatacagcaaaaggacttgaagaggggaaagagtaccaattccgtgtgcgagcagagaacgccgcgggtattagtgaaccttctcgggctactcctccaaccaaagctgtagatcccattgatgcccccaaagtcattctgagaacaagcctagaagtgaaacgaggtgatgaaatagcacttgatgcaagtatttctggatcaccttacccaactattacatggataaaggatgaaaatgttattgtaccagaggaaattaagaagcgtgcagcacccttggttaggagaaggaagggtgaagttcaagaagaagaaccatttgtcctgcctctgacacagcgtttgagtattgacaacagcaaaaagggagaatctcagctacgcgtccgagattctctccgacctgaccatggtctgtatatgatcaaagttgaaaatgaccacggtattgcaaaagctccttgtactgtcagtgtgttagatacaccgggaccaccaatcaactttgtatttgaagatatcagaaagacctcagtcctttgtaaatgggaaccaccccttgatgatggtggcagtgaaatcataaactacactttggaaaagaaagacaagacaaaacccgactcagaatggattgttgtcacttcaacacttagacattgcaaatattcagtaacaaaactgattgaaggaaaagagtacctcttccgtgtaagagctgaaaacagatttgggccaggtccaccatgtgtttcaaagccacttgtggctaaagatccatttggaccacctgatgcaccagataagcccattgtggaagatgttaccagcaacagtatgctagtgaaatggaatgaaccaaaagataatggaagccccattttgggttactggcttgaaaaacgtgaagttaacagtacacattggtctcgtgtcaacaaaagccttctgaatgccttgaaagccaatgtagatggcttattagaaggactcacctatgtcttcagagtatgtgctgaaaatgcagctggacctggaaagttcagtccaccttcagatcccaaaacagcacatgatccaatctctcctcctgggccacctatcccaagagtcactgacacaagctctacaactattgaactagaatgggaacccccagctttcaatggtggtggggaaattgttggctattttgttgataagcagttggttggcacaaatgaatggtcacgctgcacagagaagatgatcaaggtccgtcagtacaccgtcaaagaaatccgagagggtgctgattacaaacttcgggtgagtgctgtcaatgccgcaggggaaggaccgcctggagaaacacaacctgttactgtggctgaaccacaagagcctccagctgtggaactggatgtttctgtcaagggtggaatacaaataatggctgggaagactcttagaattccagctgtggtgactggtcgccctgtacctacaaaagtatggaccaaagaagaaggggagctggataaagaccgtgttgtaatagacaacgttggaaccaaatctgaactaattatcaaggatgcactgcgaaaagaccatggcagatatgtgattacagctacaaatagctgtggttccaaatttgcagcagccagggtagaagtttttgatgtccctggtccagttcttgacttaaaacctgttgtaacaaacagaaaaatgtgtctacttaactggtctgatccagaagatgatggaggaagtgaaataacaggctttatcattgaaagaaaagatgccaagatgcatacttggagacaaccaatagagactgagagatctaaatgtgacatcacaggtctgcttgagggacaagaatataagttccgtgttattgccaagaacaagtttggctgtggccctcctgttgaaataggaccaattcttgcagttgatccactaggtcctccaacatctccagagaggctcacatacactgaaaggacaaagtccactatcacacttgactggaaagagccccgcagtaatggtggcagtcccatccaaggatatatcattgaaaaacggcgtcatgacaaacctgactttgaaagagttaacaagcgactctgcccaaccacatcttttctggttgaaaatcttgatgaacaccaaatgtatgagttccgtgtcaaagctgtcaatgaaattggtgaaagtgaaccatccctacctcttaatgtagtcatacaagatgatgaagtgcctccaactattaagttgcgtctgagtgttcgaggagacactatcaaagttaaggcaggagagcctgtccacatccctgcagatgtgacaggccttccaatgcctaagattgaatggtccaaaaatgaaactgtaattgaaaaacccactgatgcacttcagataaccaaggaagaggtatcccgaagtgaggcaaaaactgagcttagcattcccaaagcggtccgggaggacaaaggcacttacacagttactgcttccaatcgccttggctcagtgttccgaaatgttcacgttgaagtatatgaccgcccatccccaccaagaaatcttgctgttactgacattaaagctgaatcttgctacttgacatgggatgcccctcttgataatggtggcagtgaaatcacccattatgttattgacaaacgtgatgcaagtaggaagaaagcagaatgggaggaagtcaccaacactgctgtagagaaaagatatgggatctggaaacttatccccaatggtcagtatgagttccgagtcagggcagtgaataaatatggaatcagtgatgagtgcaaatcagataaagtagtcattcaagatccttatcgccttcctggacctccaggaaaaccaaaagttttggcacgcaccaaaggatcaatgctagtgagctggactcctcctttggacaatggtggctctccaattactggctactggctggagaaaagagaagagggaagtccttattggtcacgtgttagccgagcaccaataaccaaagtgggattgaaaggcgtggaatttaatgttcctcgtttgcttgaaggcgttaaataccagttcagagccatggcaataaatgctgcaggaattggtcctcccagtgaaccatcagatccagaggttgcaggagatcccatatttccaccggggccaccttcttgcccagaagttaaagataaaacgaagtcaagcatctcactaggatggaaacctccagccaaagatggtggcagcccaatcaaaggatacattgtagaaatgcaagaagaaggtactactgactggaaaagagtaaatgaaccagacaaacttataactacctgtgaatgtgtggtgcctaatctgaaagagctcaggaagtacagattcagagtgaaagctgtcaatgaagctggtgaatctgaaccaagtgatacaactggggagatccctgccactgatattcaagaggaaccagaagttttcattgacattggagcacaggactgtctggtttgtaaagctggctcacagattaggattcctgctgtcatcaagggacgcccaacaccaaaatcatcttgggaatttgatggaaaggcaaagaaagcaatgaaggatggagttcatgacatacccgaagatgcacagctggagactgctgaaaactcctcagtaattattattccggagtgtaaacgatctcatacaggcaaatacagcatcacagccaagaataaagcaggacaaaagactgcaaattgcagagttaaagtcatggatgtaccaggcccacccaaagatctgaaagtcagtgatatcacaaggggtagttgcagactttcatggaagatgccagacgacgatggaggagacaggatcaaaggctatgttattgagaagaggactattgatggaaaagcctggaccaaagtcaatccagactgtggaagcaccacatttgtagtgcctgatctcctctctgaacagcaatatttcttccgtgtgcgagcagaaaaccgttttggtattggcccacctgtggaaaccattcagaggaccactgccagagatccgatatatcctcctgatcctcctattaaactcaagattggcctcatcacaaagaacacagtgcatctgtcatggaaacccccgaagaatgatgggggctcccctgttacccactatattgttgagtgccttgcatgggaccctactgggacaaagaaagaagcctggaggcagtgcaataagcgtgatgtggaagaactgcaatttactgttgaagacctagtagagggtggggaatatgaattccgagtcaaagctgtcaatgctgcaggagtcagcaagccttcagccactgttggccctgtgactgtcaaagaccagacatgcccaccatcaattgatctaaaagaattcatggaggttgaagaaggaaccaatgttaacattgtggccaaaattaaaggtgtgccattcccgacactaacctggtttaaagctcctccaaagaagcctgataacaaagaacctgttctctatgacacccatgtcaacaaactggtggtagatgatacttgcactttagttattccgcagtctcgcaggagtgacactggcttatataccatcacagctgtaaataatctgggaacagcatcaaaggagatgagactgaatgtcctgggtcgtcctggccctccagtgggacccataaaatttgaatctgtttcagcagatcaaatgacactatcttggtttccacctaaagatgatggtgggtctaagattacaaactatgtaattgagaaaagagaagctaacaggaagacatgggtccatgtctccagtgaacctaaggagtgcacgtacacgattcccaaattgctagaaggccatgaatatgtattccgaatcatggcccagaataaatatggcattggagaacctcttgacagtgaacctgaaacagcaagaaacctcttctctgtccctggagcaccagataaaccaacagttagcagcgtgactcgtaactccatgactgtcaactgggaagagccagaatatgatggaggctctcctgtgacagggtactggctggaaatgaaagacaccacttcaaagagatggaagagagttaaccgagatcctatcaaagccatgactttgggtgtttcttataaagtgactggtcttattgaaggttccgactatcaattccgggtatatgcaatcaatgctgctggcgtgggtccagcaagtctgccatcagacccagcgactgctagagatccaattgcccctcctggtcctccatttcccaaagtgacagattggactaaatcatctgcagatctggagtggtctcccccactaaaagatggtggatccaaagtaactggatacatcgttgaatataaagaagaaggaaaagaagaatgggaaaagggtaaagataaagaagtgagaggaacaaagcttgttgtgacaggattaaaggaaggagcattctacaaatttagagttagagcagtcaacattgctggcattggagaacctggagaggtcacagatgtcattgaaatgaaggacagacttgtttcacctgaccttcagctagatgccagtgtcagagatagaattgttgtccatgctggaggggtgatccgaatcattgcctatgtgtctggaaagcctcctccaaccgtcacctggaacatgaatgaaagaaccttacctcaagaagccaccattgagaccacagccattagctcatccatggtcatcaagaactgccagaggagccatcaaggcgtctattctcttcttgccaaaaatgaagccggagaaagaaagaagacaattattgttgatgtattagatgttccaggtcccgttggaacaccattcctagctcacaacctaaccaatgagtcctgcaaactgacatggttttctccagaagatgatggaggctctccaatcaccaattatgtcattgaaaagcgtgaatctgaccgcagagcatggaccccagtgacatatacagttacccgacaaaatgctactgtccagggtctcattcaaggaaaagcctactttttccgaattgcggctgaaaatagtattggcatgggtccatttgttgagacatcagaggcacttgttatcagagagccaataactgtaccagagcgtcctgaagacctggaagtcaaagaagttactaaaaatactgtaactttgacttggaatcctcctaagtatgatggtgggtcagaaattattaactatgtcctagaaagtcggctcattgggactgagaagttccacaaagttacaaatgacaacttgcttagcagaaaatacactgttaaaggcttaaaagaaggtgatacctatgagtaccgtgtcagtgctgtcaacattgttggacaaggcaaaccatcattttgcaccaaaccaattacttgcaaggatgagctggcacccccaacgcttcacctcgacttcagagataagctcacgattcgagttggtgaagcttttgccctcactggccgttactcaggcaaaccaaagcctaaggtttcctggttcaaagatgaagctgatgtgctggaagatgatcgcactcatataaagactacaccagcaacacttgctttagagaagatcaaggccaaacgttcagattccggcaaatactgtgtggttgtggagaacagtacaggctctaggaaaggtttctgtcaagttaatgttgttgaccgtcctggaccaccagtaggaccagttagttttgatgaggtgaccaaagattacatggttatctcttggaagcctcctttagatgatggaggcagtaaaatcaccaattatattattgagaagaaggaagtgggtaaagacgtctggatgccagtgacatctgcaagtgctaaaacaacatgcaaagtttctaaactacttgaaggaaaagattatattttccggatacatgctgaaaatctgtatggaataagtgatcctctggtgtctgattcaatgaaagccaaagatcgtttcagggttcctgatgcacctgatcagccaattgttacagaagttaccaaagactctgcattagtaacctggaataagccacatgatggaggaaaacccatcacaaactacatcctggaaaagagagaaactatgtctaaacgatgggctagagttaccaaagatcctattcatccatacactaaatttagggttcctgatcttctagaaggatgtcagtatgaattccgggtttctgcagaaaatgaaattggtattggagatccaagcccaccatccaaaccagtctttgctaaagatccaattgctaaaccaagtccacctgttaatcctgaagcaatagatacaacatgcaattcagtcgatctaacttggcagccaccacgtcatgatggtgggagcaagattctgggttatattgttgagtaccaga

SEQ ID NO: 191426 - DNA, 32767 bp, Homo sapiens
  Payload ID: 17810
  Gene Name: titin
  Uniprot ID: Q8WZ42
  ENST ID: ENST00000342992
  CDS Start-End: 224-100495
gcagtcgtgcattcccagcctcgcctcgggtgtagggattgcatagaaaagcaaaactacacagtcttgactgtgtagttttgtttttaggattagaggctcaccgattcatgtcggagatggtcagaaaaaccaactctccataggacgtcgtttcagaagcaaccttgggcttagtcccaccctttttaggcactcttgagaaatcagagtgcctagaaagatgacaactcaagcaccgacgtttacgcagccgttacaaagcgttgtggtactggagggtagtaccgcaacctttgaggctcacattagtggttttccagttcctgaggtgagctggtttagggatggccaggtgatttccacttccactctgcccggcgtgcagatctcctttagcgatggccgcgctaaactgacgatccccgccgtgactaaagccaacagtggacgatattccctgaaagccaccaatggatctggacaagcgactagtactgctgagcttctcgtgaaagctgagacagcaccacccaacttcgttcaacgactgcagagcatgaccgtgagacaaggaagccaagtgagactccaagtgagagtgactggaatccctacacctgtggtgaagttctaccgggatggagccgaaatccagagctcccttgatttccaaatttcacaagaaggcgacctctacagcttactgattgcagaagcataccctgaggactcagggacctattcagtaaatgccaccaatagcgttggaagagctacttcgactgctgaattactggttcaaggtgaagaagaagtacctgctaaaaagacaaagacaattgtttcgactgctcagatctcagaatcaagacaaacccgaattgaaaagaagattgaagcccactttgatgccagatcaattgcaacagttgagatggtcatagatggtgccgctgggcaacagctgccacataaaacacctcccaggattcctccgaagccaaagtcaagatccccaacaccaccgtctattgctgccaaagcacagctggctcggcagcagtccccatcgcccataagacactccccttccccggtcagacacgtgcgggcaccgaccccatctccggtcaggtccgtgtctccagcagcaagaatctccacatcccccatcaggtctgttaggtctccattgctcatgcgtaagactcaggcatccaccgtggccacaggtcctgaagtgcctcccccttggaagcaagagggctacgtggcctcctcatctgaggctgagatgagagagacaacgctgacaacctctactcagatcaggacagaagagagatgggaagggagatacggtgtccaggagcaagtgaccatcagtggtgctgcgggtgctgccgccagtgtgtcggccagtgctagctacgcagcagaggctgttgccactggtgctaaagaggtgaaacaagatgctgacaaaagtgcagctgttgcgactgttgttgctgccgttgatatggccagagtgagagaaccagtgatcagcgctgtagagcagactgctcagaggacaaccacgactgctgtgcacatccaacctgctcaagaacaggtaagaaaggaagcggagaagactgctgtaactaaggtagtagtggccgccgataaagccaaggaacaagaattaaaatcaagaaccaaagaagtaattaccacaaagcaagagcagatgcacgtaactcatgagcagataagaaaagaaactgaaaaaacatttgtaccaaaggtagtaatttccgcagctaaagccaaagaacaagaaactagaatttctgaagaaattactaagaaacagaaacaagtaactcaagaagcaataagacaggaaactgagataactgctgcatccatggtggtagttgccactgcaaagtccacaaaactagaaacagtcccgggagctcaagaagaaactaccacacaacaagatcaaatgcacctaagttatgaaaagataatgaaggaaactaggaaaacagttgtacctaaagtcatagttgccacacccaaagtcaaagaacaagatttagtatcaagaggtagagaaggcattactaccaaaagagaacaagtgcaaataactcaggagaagatgagaaaggaagccgagaaaactgccttgtctacaatagcagttgctactgctaaagccaaagaacaagaaacaatactgagaactagagaaactatggctactagacaagaacaaatccaagttacccatggaaaggtggacgttggaaaaaaggctgaagctgtagcaacagttgttgctgcagtagaccaggcccgagtcagagagcccagagagcctgggcatcttgaagaatcctatgctcagcagaccactttggagtacggatataaggaacgcatttccgccgcaaaggtagctgagcctccccaacgtccagcctcagaaccccacgttgtccctaaagcagtcaagcctagagtaatccaggctccttctgagactcatatcaaaactactgatcaaaagggaatgcacatatcatcacagatcaagaaaactacagatctaacaacggaaagattagtccatgtggataaacgcccccgcacagctagccctcactttactgtttcaaaaatttctgttcctaagacagaacatggatatgaggcatcaatagccggtagtgctattgccacattacaaaaagagttgtcagccacatcttctgctcagaagatcaccaaatcggtgaaggctcctactgtgaagcccagtgagactagagtaagggcagagcccacacccttgccacagttccccttcgctgacacaccagatacttacaagagtgaagctggcgttgaggtgaaaaaggaagtaggggtgagcatcactggcaccaccgtccgtgaagagcgctttgaagtactgcacggacgcgaagccaaggtaacagaaacagcaagagtaccagcacctgttgaaattcctgttactccaccaactttggtctcgggcttaaaaaatgtgactgtcatagaaggtgaatctgtcaccttggagtgccacatctctggatacccatccccgacagtgacatggtacagggaagactaccaaatcgaaagttccattgacttccagataaccttccagagtggaattgctcgtcttatgattcgcgaagcatttgcggaagacagcgggcgatttacttgcagtgctgtaaatgaggctggaaccgtcagcacatcctgctatctggctgtgcaggtgtcagaagaatttgaaaaggaaaccacagccgtgactgagaaatttactacagaagagaaacgctttgttgagtcaagagatgtggttatgactgatactagcctcacagaggaacaagcagggcctggagaacctgccgcgccttactttattacaaaaccagtggtccagaaactggtggaaggtgggagcgtggtgtttggatgccaagttggcggcaacccaaagccccatgtatactggaaaaaatctggtgttcctctaaccactggatacagatacaaagtgagttacaacaaacaaaccggtgaatgcaagctggtgatttctatgacttttgctgatgatgctggagaatacactattgttgttcgcaataagcatggagaaacttctgcatctgcttccttgcttgaagaagctgattatgagttactgatgaagtcccagcaagaaatgctttatcagacacaagtgactgcatttgttcaagaacctaaagttggagaaacagcacctggatttgtatactctgagtatgaaaaagagtatgaaaaagaacaagccttaattaggaagaaaatggccaaagatactgtagtggtcagaacttatgtagaagatcaggaattccatatttcttcctttgaagagagacttattaaagaaattgaatatagaataataaagactacattagaagaacttcttgaagaagatggagaagaaaagatggcagttgacatttctgaatctgaagctgttgaatcaggatttgattcaagaatcaagaattatagaattcttgaggggatgggtgtcacttttcattgcaagatgtctggatatccattaccaaagattgcttggtacaaagatggcaagcgcatcaaacatggagaaagataccaaatggactttctacaagatggcagagctagtctgcgtatacctgttgttcttccagaagatgaaggaatctacactgcatttgccagcaatattaaaggaaatgcaatttgctcagggaaattgtatgtggagcctgctgcaccacttggagctccgacttacattcccacactagagccagtgagcagaatcagatctctctctccacgttcagtgagcaggtctcctatacgcatgtctcctgcacggatgtcacctgcaaggatgtctcctgcacggatgtcccctgcaagaatgtcccctggacgtaggctggaggagacagatgagtcacaacttgagagactatataaaccagtctttgtgttaaaacctgtttctttcaaatgtttagaagggcaaactgccagatttgacttaaaggttgttggtagacctatgccagagacgttctggtttcatgatggccagcaaattgtcaatgactatacccataaagtagtcattaaagaagatggtactcaatcactaattattgtccctgccacacccagtgattctggggaatggactgtggttgcccaaaacagggcaggcagatcttcaatttcagtgattttaactgtggaagctgtggaacatcaggtaaaaccgatgtttgtagaaaaactgaaaaatgtcaatataaaggaaggttcccgacttgaaatgaaagtcagagctacgggtaaccccaaccctgacattgtatggttgaaaaacagtgacatcattgtgcctcataaatatcccaaaatcagaattgaaggaaccaagggagaagctgcccttaaaatcgattccactgtcagccaagattctgcctggtatactgcgactgctattaataaagctggcagagacactacaagatgcaaagtaaatgttgaagttgagtttgcagagcctgagccagagagaaagttaatcatcccacgggggacatatagagcaaaggagattgcagccccagaactggagcccctccatttgcgatatggccaagagcaatgggaagaaggtgatctctatgacaaagagaaacaacagaaaccatttttcaagaaaaaactcacttccttaagacttaagcgctttgggcctgcccactttgaatgcaggctaacacccattggtgacccaacgatggtggtggagtggctccatgatggaaagccacttgaagcagccaacaggctccgtatgatcaatgaatttgggtactgcagccttgattatggcgttgcatattctagagacagtggtatcattacttgcagagccactaacaaatatggaacagatcacacatctgctacccttattgttaaagatgagaaaagtcttgtggaagaatcccaattgcctgaggggaggaaaggcttacagagaattgaagaattagagagaatggctcatgaaggtgcacttacaggtgtaacaacagatcagaaagaaaagcaaaagccagacattgtcttgtacccagagccagttagagtacttgaaggggagactgcaaggttccgctgcagggtaacaggctaccctcagcccaaagtcaactggtacctcaatggacagctcatccgcaaaagcaaaaggttcagagttcgctatgatggtatccattacctggacatcgtggactgcaaatcatatgacacaggtgaagtgaaggtcaccgcggaaaatcctgaaggtgtgatagagcataaagtgaagcttgagattcaacagagggaagattttaggtctgtccttaggagagctcctgaaccaaggcctgagtttcacgtacatgaaccaggaaagcttcagtttgaagtacaaaaagtggatagacctgttgacaccactgaaaccaaagaagttgtgaagttgaaaagggctgaaagaattacccatgaaaaagtgcctgaagagtcggaagagctgcgcagtaaattcaagcgcagaacagaagagggctattatgaagccattaccgctgtggagctcaagtctcgaaagaaggatgaatcctatgaggaactcctcaggaagacaaaagatgaacttctccactggaccaaagagttaactgaagaggaaaagaaagctcttgccgaagaaggcaaaatcacgattccaacttttaaacctgacaagattgaactaagtcctagtatggaggctccaaaaatcttcgaaagaatccagagccaaacagtgggccaaggatctgatgcacacttccgggtcagagtcgtggggaaaccagaccccgaatgtgaatggtacaaaaatggtgtcaaaattgaacggtctgaccggatctactggtactggcccgaagacaatgtttgtgaattggtcataagagatgtgactgctgaggactctgccagcatcatggtaaaagccatcaacatagctggagaaacctccagtcacgcattcttacttgtccaagccaagcaattgatcactttcacacaggaattacaagatgttgttgctaaggaaaaagacactatggcaacctttgaatgtgaaacttcagaaccatttgtcaaagtgaaatggtataaagatggtatggaggttcatgagggagataaatacaggatgcactctgacagaaaggttcacttcctctccatactgaccattgatacgtctgatgctgaagattacagctgtgtacttgtggaagatgaaaatgtcaaaacgactgctaaacttattgttgaaggtgcagttgttgagtttgtgaaagaacttcaggacatagaagttccagaatcatattcaggagaattagagtgcattgtatccccagaaaatatagaaggaaaatggtatcataatgatgtggagcttaaatccaatggcaaatatacaattacatctcgtcgtggacgtcagaacctcacggtcaaggatgtaaccaaggaggaccagggagaatacagctttgtcatcgacgggaaaaagacaacctgtaaattaaagatgaaaccccgccccattgctatcctacaaggacttagtgaccaaaaagtctgtgagggtgacattgttcagcttgaagttaaagtctccttggaaagtgtggaaggcgtctggatgaaagacggccaagaagtgcagcccagtgacagggttcacattgtgatagacaaacaatctcatatgctgctcattgaagacatgactaaggaagatgctggaaattactctttcaccattccagcccttggcctctccaccagtgggcgtgtctctgtctatagtgtggacgtgataacacctctaaaagatgttaatgtgattgaaggcaccaaggctgtgcttgaatgtaaggtgtcagtccctgatgtgacttctgttaagtggtacttaaatgatgaacaaatcaagcctgatgaccgtgtacaggccattgtgaaaggtactaaacagcgactagtcattaaccgaactcatgcttcagacgaaggaccttacaagctgatagttggcagagttgaaaccaactgtaatctctctgtagaaaaaattaaaattatcagaggtcttcgtgaccttacctgtacagaaactcaaaatgtggtgtttgaggttgagctgtcccactctggaattgatgtcctgtggaattttaaggacaaggaaatcaagcccagttctaaatataaaattgaagcacatggaaaaatatataaattgacagttctaaatatgatgaaagatgatgaaggaaaatacacattttacgcgggagaaaatatgacatctggaaaacttactgtggcaggtggggccatctccaagccactcacagatcagaccgtagctgaatcccaggaagctgtgtttgaatgtgaagttgccaacccagattccaaaggcgaatggttgagggatggcaaacacctaccactgactaacaacatcagaagtgagtctgatggccacaaaaggagacttatcattgctgccaccaaattagatgacattggagaatatacctacaaggtggccacctccaaaacatctgccaaactcaaagttgaagctgtcaaaattaagaagactctgaagaacctcacagtgacagaaacacaggatgctgttttcactgtcgagcttacacaccctaatgtcaaaggtgtccagtggatcaaaaatggagttgtgctggaatccaatgaaaagtatgctatctctgtcaaaggaacaatttactctctgaggattaaaaactgtgccatcgtggatgagtctgtttatggcttcaggcttggaaggcttggagccagtgccagactgcacgtggagactgtcaagatcattaaaaagccaaaggatgtgacagccttggaaaatgccactgttgcctttgaagttagtgtttcccatgacactgttccagtaaaatggttccataagagtgtggaaattaagccaagtgacaaacacagactggtctcagaaaggaaagtccacaagctgatgctgcagaacatctccccctcagatgctggggaatacacagctgtggtcgggcaattggaatgcaaagcaaaactgtttgtggagacattacatattacaaaaaccatgaaaaatatcgaggtgcctgagaccaaaactgcctcttttgagtgtgaggtgtcccacttcaatgtcccttccatgtggctgaagaatggtgtggaaattgagatgagtgaaaagttcaagatagttgtgcagggaaaactccatcagctgatcatcatgaacaccagcacagaggactcggcagaatacacatttgtctgtggcaatgaccaagtcagtgccaccctgacagtcaccccaatcatgattacttccatgctgaaagacatcaacgctgaagaaaaagacactattacttttgaggtgacagtgaactatgaaggcatctcttacaaatggttaaagaatggtgtggaaatcaaatcaactgacaagtgccagatgagaaccaaaaagctcacacactcactgaacatcaggaatgttcactttggggatgctgctgactacacctttgtggctggaaaagcaacatcaacagccacactttatgtggaagctcgtcatatagaatttaggaaacacattaaggacattaaggtactggagaagaagcgagccatgtttgaatgtgaagtttctgaacctgacatcactgtacagtggatgaaagatgaccaggaactgcagatcacagacagaataaagattcagaaggagaaatatgtccaccgccttctgatcccatccacccggatgtctgatgctgggaagtacacagtggtggcaggaggcaacgtgtcaactgcaaaactctttgtagaaggcagagatgttcgcatccgaagtattaaaaaggaggttcaggtcattgagaaacagcgtgctgttgttgaatttgaggtcaatgaagacgatgttgatgcccactggtataaagatggcattgaaatcaatttccaagttcaagaacgacacaaatatgtagtggaaagaagaatccaccgaatgtttatctctgagaccagacagagcgatgcaggagaatacacctttgtggcaggaaggaacaggagttctgtcactctctatgtcaatgctcctgaaccgccccaagttctgcaggagctccagcctgtcactgtgcagtctggcaagcctgcccgcttctgtgccgtgatatccggaagaccacagcccaaaatttcctggtacaaggaagagcagctgctttccactggcttcaagtgcaaatttcttcatgatgggcaagaatacacgcttttgctaattgaagccttcccagaggatgcggcagtctatacctgtgaagccaagaatgactatggtgttgccacaacatcagcttcactctcagtggaagttccagaagttgtgtctcctgatcaggaaatgcctgtttatccacctgccatcatcaccccgcttcaggacactgtcacttctgaagggcagccagcccgttttcaatgccgggtttctggaacagatctaaaagtgtcgtggtacagcaaagacaagaaaatcaagccatctcggttctttagaatgactcaatttgaagacacttatcaactggaaattgccgaagcttatccagaagatgaaggaacttacacgtttgttgctagtaatgctgtaggccaagtatcaagcacagccaacctgagtctggaagctcctgaatcaattttgcatgagaggattgaacaagagattgagatggaaatgaaagctgccccagtgatcaagaggaaaatcgaacccctggaagtagcactgggccacctagccaaattcacctgtgagatccaaagtgctcccaatgtccggttccagtggtttaaagctggccgagaaatttatgagagtgacaagtgttctattcgatcttcaaagtatatctccagccttgaaatcctgagaacccaggtggttgactgcggcgagtatacatgcaaagcttccaatgagtatggcagtgtcagctgtacagccacactaactgtgacagaggcatatccaccaacctttctctccagacctaagtcccttacaacttttgtgggtaaggcagccaagttcatctgcacagtgacagggactcctgtgatagaaaccatttggcagaaagatggtgctgcactctcaccttcacctaactggaggatttccgacgcagaaaacaaacacattttagaactctcaaaccttaccattcaagatagaggagtttattcttgtaaggcttccaacaagtttggagcagacatctgccaagcagagttgatcatcattgataagccacatttcattaaagaattagagcctgtgcagtccgctatcaataagaaggtccaccttgagtgccaagtagatgaagacagaaaagtcacagttacgtggagcaaagatgggcaaaaactccccccagggaaagattataagatctgttttgaagataaaatagcaacacttgagattcctttggccaaactgaaagattcaggaacctatgtctgtacagcttcaaatgaggctggaagcagctcctgctcagccacagtcactgtcagagagccaccatccttcgtgaagaaggtggatccctcttatttaatgctcccaggtgaatcagcacgcctccattgcaagctgaaaggctcacctgtgatccaggttacttggtttaaaaataacaaagaactcagtgaaagtaacacagtccgaatgtattttgtcaattctgaggctatacttgatattacggatgtaaaagttgaagacagtgggagttactcatgtgaagcagtgaatgacgtcggcagtgatagctgcagtactgaaatagttatcaaagaacctccttctttcatcaaaactcttgagcctgcagacatagtgagaggaacaaatgctctacttcagtgtgaagtctcaggcactggaccatttgaaattagctggttcaaagacaagaaacaaattcgaagtagtaaaaaatacagattgttttctcagaagtctcttgtgtgtctggagatcttttcgtttaatagtgcagatgttggtgaatatgaatgtgttgttgctaatgaagtcggcaagtgtggctgcatggcaacccacttactcaaagaacctccaacctttgtaaagaaagtagatgatttgattgcactaggaggacaaaccgttaccctgcaagctgctgtgagagggtcagagcccatttctgtcacatggatgaaaggtcaagaggtcatcagagaagacggaaaaatcaaaatgagcttttccaatggtgttgcagtcttgataatccctgatgttcagattagttttggaggcaaatacacgtgcctggctgaaaatgaagctggaagccaaacatctgttggggaattaatagttaaagaacctgccaaaatcattgagcgagcagaactgatccaggtgacagcaggagatcccgccacactggagtacacagtggcaggcacgccagaactgaagcccaaatggtacaaagatgggagacccttggtcgccagtaaaaaataccgaataagttttaaaaacaatgttgcccagctcaaattttattcagctgagctgcacgacagtggccaatacacatttgagatttccaatgaagtgggcagcagctcctgtgagactacattcactgtattagatcgagacattgctccattttttaccaaacccttgcgcaacgtggatagtgttgttaatggtacctgcagactggactgcaaaattgcaggctccctccccatgagggtgtcctggtttaaggatggcaaagaaatagctgcttctgacagatacaggatagcatttgtggaaggcacagcctctttggagatcatcagagtagacatgaatgatgcagggaatttcacttgtcgagccacaaattccgtgggaagcaaagacagcagtggagccctgattgtgcaagaaccacccagttttgtaactaaacccggctcaaaggatgttctgcctggctcagcagtctgcctgaagagcactttccaaggatctactcctctcacaatcagatggtttaagggcaacaaagagctggtttctggtggaagctgctatattaccaaagaagctttagagagttccctggaactctatttagtaaaaacctctgattcgggcacgtacacatgtaaagtcagcaatgtcgctggaggggtggaatgcagtgcaaacttgtttgtaaaagaacctgccacatttgttgaaaagttagagccatcacagctgttaaagaagggagatgccacccagctagcctgcaaagtaactggtacccctccaattaaaataacatggtttgcaaatgatagagaaattaaggagagcagcaaacacagaatgtcttttgtggagtctactgcagttctaagactgacagatgttggcatcgaagacagtggtgaatatatgtgtgaggcccaaaatgaggctggcagtgaccactgcagtagcattgtaatagtcaaagagtcaccttattttaccaaggaatttaagccaattgaagtcttaaaggagtacgatgtcatgttgctggctgaggtggcaggcactcctccctttgagatcacttggttcaaagataacacaatcctgcgaagtggtagaaagtataagactttcattcaggatcatctggttagcctgcagatcctcaagtttgtagctgcagatgctggcgaataccagtgtcgggtgaccaatgaggtgggcagcagcatctgcagtgccagggtgactttaagagaacccccatccttcataaagaagatcgagagtaccagctccctccggggaggcacagctgccttccaggccactctgaagggctccttgccaattacggtgacttggctaaaagacagcgatgaaatcactgaagacgataatataagaatgacctttgagaacaatgtggccagtttgtacctcagtggcattgaagtcaagcatgatgggaaatatgtctgtcaggccaaaaatgatgcaggaatacaaagatgttctgcattactctcagtaaaagaacctgcaacaatcaccgaggaagctgtgtctatagatgtcacccaaggagacccagccactttgcaggttaaattttcagggactaaggagattacagccaaatggtttaaagatggccaagaactgaccctgggctcaaaatataaaatcagtgtcactgatacagtctcaatactgaagattatttctacagaaaagaaagatagtggagaatatactttcgaggtccaaaatgatgttgggaggagcagctgcaaggctagaattaatgtattagatcttatcatacctccttcattcaccaaaaagctgaagaaaatggacagcattaaaggttctttcattgatttagaatgtatagtggctgggtcacatcccataagcatccagtggttcaaagatgaccaagaaatatcagctagtgaaaagtacaaattctcttttcatgacaatactgccttcttggaaatcagccagctggaaggtacagacagtgggacatacacttgttctgccacaaataaggcagggcacaaccaatgcagtgggcatctgacagtcaaagaacccccttactttgtggaaaagccacagtcacaagatgtcaatcccaacacaagggtacagttaaaggctcttgtgggtggcactgcacccatgacaataaagtggtttaaagataacaaagagttacactcaggagcagcccgctcagtttggaaggatgacacctctaccagtctagagctctttgcagccaaagctaccgattctggaacctacatttgccaactaagcaatgatgttggcacagcaaccagcaaagccactctctttgtaaaagaacctcctcaattcattaagaagcccagtccagtcttagtgctgaggaatggacagtcaacaacatttgaatgccaaataacaggcactcctaaaatccgagtgtcttggtatctagacgggaatgaaataacagccattcagaaacatggcatttccttcattgatggtttagccactttccagatttctggtgccagggtagaaaatagtgggacttatgtgtgtgaagctcgaaatgacgcaggcacggcgagctgcagcattgaactcaaagtgaaagaaccccccacctttatcagagagctgaagcctgtggaggtagtaaaatatagtgacgtggagctggagtgtgaagttacgggaacacctccgtttgaagtcacttggctgaagaataacagggaaattcgaagcagcaaaaaatacacattgaccgacagagtgtctgtgtttaacctccatataaccaagtgtgacccttcagacactggggaataccagtgcattgtatccaatgaaggcggcagctgctcatgcagtactagagttgccctgaaagaaccaccatcattcattaagaagatagaaaataccactactgttttgaaaagttctgccacctttcagagtaccgtggcaggttctcctcctatttctataacctggctaaaggatgatcagattcttgatgaagatgataatgtctatatttcatttgtggacagtgtggccacacttcaaatcagaagtgtggataatggacacagtgggagatatacctgtcaagccaagaatgagtcaggagttgagaggtgttatgctttccttttagtacaagaaccagctcaaatcgtagagaaagctaaatcagttgatgttacggagaaagatcccatgaccttggaatgtgttgtggctggaacaccagaactcaaagtgaaatggcttaaagacgggaaacaaatagttcccagtagatacttttcaatgagttttgaaaataacgtggccagttttagaattcagtcagtaatgaagcaggacagcggtcagtacactttcaaggtggaaaatgacttcggaagcagtagctgtgatgcctacttaagagtgctagatcaaaatattcctccatcattcaccaaaaaattaaccaaaatggataaagttctgggctcttctattcatatggagtgcaaggtgtctggttcacttcccattagtgctcagtggtttaaggatggaaaagaaatatctacaagtgcaaaatacagacttgtgtgccatgagagatctgtgtctctggaagttaataatctggaattagaagatactgcaaattacacatgcaaagtgtcaaatgtagcaggagatgatgcatgcagtggcatcttaactgtgaaagaaccaccaagcttcctagtgaaacctgggcgacagcaagccatacctgattctacagtggaatttaaggcaatactaaaaggaacaccaccatttaaaataaaatggtttaaggatgatgtggaacttgtctcaggtcctaaatgtttcattggcttggaagggtcgactagcttcttaaatctctactcagtggatgcttctaagactggacagtatacttgccatgttaccaatgatgttggtagcgactcttgtactacgatgttgcttgtgacagaaccaccaaagtttgtaaagaaattagaagcctccaaaattgtgaaagcaggtgactcttcacgacttgaatgcaagatagctggatccccagaaatcagagttgtgtggttccgaaatgaacatgaacttccagccagtgataagtacagaatgactttcattgactcagtggccgtcatacagatgaacaatctcagtactgaggacagtggagatttcatttgtgaggctcagaatcccgctggcagcacaagctgcagtaccaaggttatagtaaaagagccacctgtttttagcagcttccctcctatagtagaaacccttaaaaatgctgaagtcagtcttgaatgtgaactttcgggaacaccaccgtttgaggtggtatggtacaaagacaagcggcaactcagaagcagcaagaaatacaagattgcatccaaaaacttccacacaagtattcacattctcaatgtggacacttcagacatcggtgaataccactgcaaagcacagaatgaagtgggaagtgatacttgtgtttgtactgtaaaattgaaagaaccaccaagatttgtctccaaactgaacagcctcactgttgtagccggagagcctgctgaattacaagcatccatagaaggcgcccagcctatttttgtccagtggcttaaagagaaggaagaagtgattagagaaagtgaaaacatcaggattacatttgtggaaaatgttgcaactctacagtttgcaaaagcagagccagctaatgctggaaagtatatctgccaaatcaagaatgatggtggaatgagggagaacatggccacactgatggtcttagagcccgcagtcattgttgagaaggcaggaccgatgacggtgactgtaggagaaacgtgcactctggagtgtaaggtggctggcactccggaactctctgttgaatggtacaaggatggaaagctgttgaccagcagccaaaaacacaaatttagcttctacaacaaaatctcttccttaaggattctctcagttgaaaggcaagatgcaggcacatacactttccaggttcaaaataatgttgggaaaagcagctgcacagctgtggttgatgtttcagaccgagcagttcctccctctttcacacgaagactgaaaaatactggtggggtgttaggtgcttcttgcatcttggaatgcaaagtagctggatcatcacctatttcagttgcctggtttcatgagaaaaccaagattgtcagtggagcaaagtaccaaaccacattttcagataatgtctgcacattgcagttgaattctctggattcctcagatatgggcaattacacatgcgtggctgctaatgtcgctgggtctgatgaatgtcgtgcagtgctaactgtacaagaaccaccctcttttgtgaaagaacctgaacctttggaagtactaccaggcaaaaatgtaaccttcacaagcgttattagaggaacccctccattcaaagtcaactggttcagaggtgccagagaactagtgaaaggagaccggtgcaacatctattttgaagacactgtggcagaactggaattatttaatattgacatatctcagagtggggaatacacctgtgtggtttctaacaacgctggccaagcatcttgcactacccgtctctttgtgaaagaaccagctgcatttttgaagagattaagtgatcattctgtagaaccagggaagtccataattctggagagcacctacactggaacacttccaatttctgtcacttggaaaaaggatggttttaacataactacctctgaaaaatgtaacatagtcacaacagagaaaacttgtatcctggaaattctgaatagcacaaaaagagatgcagggcagtattcctgcgagattgaaaatgaggcaggaagggatgtttgtggagctctggtatctacattagaaccgccttattttgttacggaactggaacctctggaggcagcagttggagattcggtttctttacaatgccaagttgctgggacaccagaaattacagtgtcttggtacaaaggagataccaaattacggccaactcctgaatacaggacctactttacaaacaatgtggccacacttgtttttaataaagtgaacatcaatgacagtggagagtacacatgcaaagcagaaaatagtataggaactgcttcttctaagactgtgttcagaattcaagagcgccaactcccaccttcttttgcaagacaattaaaggacattgaacaaactgtggggttacctgttacactcacttgtcgattaaatggctctgcacccatccaagtgtgctggtatagagatggagtacttttaagagacgatgaaaatctacagacttcatttgtagataatgtggcaactttaaaaattttgcaaactgacttgagtcactctggccagtactcttgctcagcttccaacccacttggaacagcatcttctagtgctagactcacagcaagagaacccaagaaatctcccttctttgacatcaagcctgtatctatagatgttattgctggagaaagtgctgattttgagtgtcatgttactggtgctcaaccgatgcgaatcacttggtcaaaagataacaaggagatccgtcctggaggaaactatacaatcacatgtgtgggaaacactcctcatttgagaattcttaaagtaggcaaaggagactctggtcaatatacttgccaagcaaccaatgatgttggcaaagacatgtgctcagctcagctcagtgtaaaagaacctccaaagtttgttaagaaattagaagcttcaaaagttgcaaagcagggagaatccattcaactggaatgtaaaataagtggctccccagaaatcaaagtttcatggttccgaaatgacagcgaacttcatgaaagttggaaatacaacatgtcattcattaattctgtggcattgcttacgatcaatgaagctagtgctgaagacagcggggactacatttgtgaggctcataatggtgttggtgacgccagctgcagcacagcgttgacagtgaaagcacctcctgttttcacccagaagccttctccagtaggagctcttaaaggttctgatgtgattctccaatgtgaaatttcgggaactcccccatttgaagtagtatgggttaaagatcgaaagcaggttagaaacagcaagaaatttaaaatcacttcaaaacattttgatacaagtcttcatatccttaatcttgaagcctccgatgtcggggaatatcactgcaaagctactaatgaggtgggaagtgacacgtgttcttgctctgtcaagttcaaagaacctccacgattcgtgaaaaagctaagtgacacctcaacccttattggggatgctgttgagttacgggccatagtggagggcttccagccaatttctgttgtctggctgaaagatagaggtgaagtcatcagagagagtgaaaataccaggatttcattcattgataacattgcaaccctccagctggggagtccagaagcatctaattctggaaaatatatatgccaaatcaaaaacgatgctggaatgagagaatgctctgcagtcttgactgtactagaaccagcaagaatcatagagaagcccgaacccatgactgtcactactggaaatccttttgcattagagtgtgtagtgactggaacaccagaactctcagccaagtggttcaaagatggaagagaattgtctgcagacagcaaacatcacattacattcatcaataaagtggcttcccttaaaatcccctgtgccgaaatgagtgacaaaggattatatagctttgaagtgaaaaacagtgttggcaaaagtaactgcactgtatccgtccatgtttctgatcggattgtgcctccttccttcatccgcaagctgaaagacgtgaatgccatcctgggggcctcagttgttttggagtgccgagtctctggctcagccccgatttcagttggctggtttcaggatggaaatgagattgttagtgggcccaaatgtcagtccagcttttcggaaaacgtctgtactttgaatctgagcttgttggagccctccgacacaggcatatacacgtgtgtggctgccaatgtagctggttccgatgagtgctcagcagtcctgactgtgcaagaaccaccatcttttgaacaaacccctgattctgtggaagttttgcctggaatgagcctcacattcaccagtgtcatcagaggcacccctcctttcaaggtcaagtggtttaaaggcagcagggaactggtgcctggggagtcatgcaacatctctctggaagattttgtcacagaactggagttgtttgaggtgcagccattagaaagtggagactattcttgcctcgttacaaatgatgctggcagtgcttcctgtaccacacatctttttgtgaaagaaccagccacctttgtgaaaagattggctgatttcagtgttgagacaggaagccccatagttctcgaggccacatacactggcacacctccaatctcagtgagctggataaaggacgagtatcttatttcacaatctgagagatgcagtattactatgacagaaaaatctaccatactggaaattcttgagagcacaatagaggattatgcacagtacagctgcctgatagaaaatgaggctggtcaagatatctgtgaagctctggtgtctgtcttagaaccaccgtactttattgaacctctggaacatgtggaagcagtcattggagaacctgcaactttacagtgtaaagtggatggaactccagaaattagaatttcttggtataaagaacacacaaagctacgatcagctcctgcatataaaatgcaattcaaaaataacgttgcttccttagtaatcaacaaagtggatcacagtgatgtgggagagtattcatgcaaggcagacaacagtgtgggggcagtcgcttcttcagctgtgcttgttatcaaagcgcgcaaacttccacctttctttgcaagaaaactgaaagacgttcatgagactctaggcttcccagttgcatttgaatgccgcatcaatggctcagaacctcttcaagtgtcttggtacaaggatggggttcttttgaaagatgatgctaatttgcagacatcttttgttcataatgtagcaactcttcagattttacaaactgaccagagccacatagggcagtataattgctctgcttctaatcctcttgggactgcttcatccagtgccaagctcattctctcagagcatgaagtgcctcctttctttgatctaaagcctgtatcagtagatcttgctcttggagaaagtggtacttttaaatgtcatgtaactgggactgcaccaatcaaaatcacttgggccaaagataaccgagagattcgccctggaggcaactacaagatgactttggtagaaaatactgccactctgacagttctcaaagtaggcaaaggcgatgccgggcagtacacctgctatgcaagcaacatcgctggaaaagactcttgttctgctcagctgggtgtacaagaaccacccaggttcattaagaagctagaaccttcaagaattgtgaaacaggatgaattcacaaggtatgaatgcaaaatcggtgggtctccagaaatcaaagttttatggtataaggacgagactgaaattcaagagagcagtaaattcagaatgtcattcgttgactcggtggctgtgctggaaatgcacaatctcagtgttgaagacagtggagactacacctgtgaggcccacaatgcagcaggcagtgccagcagcagcacatccttaaaagttaaagaaccacccattttccgcaaaaagcctcatcctatagagacactgaaaggagctgatgttcaccttgaatgtgagcttcagggcactcccccatttcacgtttcttggtataaagacaagagagaacttaggagcggcaagaagtacaagataatgtctgagaacttcctaaccagtatccacatcctgaatgtcgatgctgcagacattggggaatatcagtgtaaagccacaaatgatgtgggaagcgacacttgcgttggttccatcgctctcaaagcaccaccaagatttgtgaagaagctcagtgacatatctactgtcgttggtaaagaagttcagctgcagactaccattgaaggcgctgaacccatttcagtggtgtggttcaaagataagggagaaatcgttagagaaagtgacaacatatggatttcttattcagaaaacattgcaaccttacagttttcaagagtggaaccagccaatgctggaaaatacacttgtcagatcaaaaacgatgctgggatgcaagagtgcttcgccacgctatccgttctcgagcctgcaacaattgtagaaaagccagaatccataaaagttaccacgggagacacctgtaccttggagtgtacagtagctggcacccctgaactcagtactaagtggtttaaggatggaaaagagctaacaagtgacaacaaatacaaaataagcttcttcaacaaagtatccggccttaagatcatcaatgtagcaccgagtgacagtggggtatacagttttgaggtgcagaaccctgttggcaaagacagctgcacagcttcattgcaggtttcagaccgaaccgttcctccttcattcacaagaaaattgaaagagacaaatggtctatccggctcctcagttgtaatggagtgtaaagtctatgggtcacctccaatctctgtctcctggttccatgaaggaaatgagatcagtagtggaaggaaataccagaccaccctgacagataatacttgtgctttaactgtgaacatgctggaagaatcagacagtggtgactacacatgtatagctactaatatggctggttctgatgaatgtagtgctcctttgactgtgagagaaccaccatcttttgttcagaaacctgatcccatggatgttttaactgggaccaatgtaactttcacaagtatcgtaaaaggaacacctcctttcagtgttagctggttcaaaggtagcagtgaactagtaccaggtgacagatgcaacgtgtctttggaggattcagttgctgaactggagttgttcgatgtagatacatcacaaagtggagaatatacttgcatagttagcaatgaagctggcaaggcttcttgtacaacacatctctacataaaagccccagccaaatttgtgaagaggctgaatgattacagcatagagaaaggaaaacccctgatcctagagggtacattcactggaactcctcccatttcggttacctggaagaaaaatggcataaatgtaactccttctcagaggtgtaatataactacgactgaaaaatcggcaatcctggaaattccaagtagcacagtagaggatgcaggacaatacaactgctacattgaaaatgcctctggaaaagattcctgttcagcacaaatactcatactagaaccaccgtattttgtcaagcagttggagccggttaaggtgtctgttggagattctgcctctctacaatgccagcttgctggaacccctgaaattggggtatcctggtataaaggagatacaaaattgagacccactacgacttacaaaatgcattttaggaataatgttgctacactggttttcaaccaggttgatattaatgatagtggagaatatatctgcaaagctgaaaacagcgtgggagaagtttctgcatcaactttccttaccgttcaagagcaaaaacttccaccatcattttctcgacaattgagagatgttcaagaaacagttggactgccagttgtttttgattgtgccataagtggatcagaacctatctccgtgtcttggtataaagacggcaagccattgaaagacagcccaaatgtacaaacatcatttttagacaatacagccacactcaatatttttaaaactgaccggagccttgcaggccagtattcctgcacagctacaaaccctataggctctgcttcttccagtgccaggctcattctcacagaggggaagaacccacccttctttgacatccgtcttgcccctgtggatgctgtggtgggagaaagtgctgactttgagtgccacgtcacgggcacacaaccgataaaggtcagctgggccaaagacagcagagaaatacgaagtggcggaaagtaccagattagttatctggaaaacagcgcccacctgacagtcctcaaagtagacaaaggagattctggacaatatacctgctatgctgtgaatgaagtgggaaaagactcttgcacagctcagctgaatataaaagagcggctcatcccaccaagtttcactaaaagactctcagagacagtagaagaaacagaagggaattctttcaaacttgagggacgtgtggctggttcccaacctataactgttgcctggtacaaaaataatatagagatacaaccaacttctaactgtgaaataacattcaagaacaacacgttagtgctgcaagtcaggaaagcaggcatgaacgacgctggtttgtacacatgcaaagtgtccaatgatgcaggctctgctctgtgcacgtcttcaatcgtcatcaaagaacctaagaagccacctgtatttgatcagcaccttactccagtaacagtgagtgaaggagaatacgtgcagctcagctgccatgtccagggatctgagccaattaggatccagtggttgaaggctggcagggaaataaagccttcagacagatgcagcttcagctttgctagtgggacagctgtactggaactcagagatgtggctaaagcagattcgggagattatgtgtgtaaagcttcaaatgtggctggaagtgacactaccaaatcaaaagtgaccattaaagacaaaccagctgtggccccagcaaccaagaaagctgcggtagatggaagactcttttttgtgtcagaacctcagagtatcagagtcgtagaaaaaaccactgcgaccttcattgcaaaagttggaggtgacccaatcccaaatgttaaatggacaaaagggaagtggagacagctgaaccaaggaggtcgtgttttcatccaccaaaaaggcgatgaagcaaaactggagattagggacaccacaaaaactgattctgggttataccgatgcgtggcatttaacgaacatggtgaaattgaaagtaatgttaacttacaggtggatgaaaggaagaaacaagagaaaattgaaggcgatcttagagcaatgctgaaaaagactccaatcttaaagaaaggagctggagaagaagaggaaattgatatcatggaacttctcaaaaatgttgatcctaaagaatatgaaaaatatgcccgcatgtatggaatcactgacttccgaggtcttcttcaagcatttgaactgctcaagcaaagccaagaagaagagacacatagactggaaattgaggaaatagagaggtcagagagggacgaaaaggaatttgaggaacttgtatcatttattcagcaaagactgtcacagacagagcctgtcactctgatcaaggacattgaaaatcagacagttttgaaagataatgatgctgtctttgaaattgacattaaaattaattatccagaaatcaagctttcgtggtacaaaggaactgaaaaactggaacccagtgataaatttgaaataagcattgatggtgaccgacatacactcagagtcaaaaactgtcaacttaaagaccagggcaattatcgattggtttgtggtccacacatcgctagcgctaaactaactgtaattgagcctgcatgggaacggcatcttcaggatgtgactctgaaagaaggccagacttgcaccatgacatgccaattttctgtaccaaatgtaaaatctgaatggttcagaaatggcagaatccttaaaccccaaggtagacataaaacagaagtggaacacaaagtccataaattgaccattgcagatgttcgagcagaagaccagggtcagtacacctgcaaatatgaagaccttgaaacttcagcagaactcagaatcgaagctgaaccaattcagtttacaaagcgcatacagaacatcgtggtgagtgagcatcagtctgccacctttgagtgtgaagtgtcctttgatgatgccattgtaacatggtacaaaggaccaacagaactgacagagagccagaaatacaacttcaggaatgatggccgctgccattatatgaccatccacaatgtgaccccagacgatgaaggtgtctactcggtcatcgctcggctggagccaagaggtgaagcaagaagcacggcagagctgtacctaacgacgaaagaaatcaaacttgagctgaagcctcctgatattcctgactccagagttccaatcccaaccatgcctatcagagcagtgccaccagaagaaatccctcctgtggttgctcctcctatcccccttttgctaccaacacccgaagaaaagaaaccaccaccaaaacgtattgaagttaccaaaaaggctgtgaagaaagatgccaaaaaagttgttgcaaagcccaaagagatgacaccacgtgaagagattgtcaagaagcctccacctcctactaccttaattccagcaaaagctcctgaaatcattgatgtatcctctaaagctgaagaagtaaaaataatgactataaccagaaagaaagaggttcagaaagaaaaagaagctgtgtatgagaaaaagcaagcagtccacaaggagaagagagtcttcattgaatctttcgaagaaccttatgacgaactggaggtagaaccatacacagagccatttgaacaaccttattatgaagaaccagatgaagactatgaagagattaaggtagaagctaaaaaagaagttcacgaggaatgggaagaagattttgaagaagggcaagaatactatgaaagggaagaaggctatgacgaaggggaggaagagtgggaagaggcttaccaagaaagggaagtaattcaagttcaaaaggaggtctatgaagaatcacatgagagaaaagttccagccaaagtacctgaaaagaaagcaccaccacctcctaaagttataaagaagccagtaattgaaaaaattgaaaagacttctcgaagaatggaggaagaaaaagttcaagtcaccaaagtacctgaagtttcaaagaagattgttccacaaaaaccttcccggactccagtacaggaagaagttattgaagtgaaagtaccagctgtgcatacaaagaagatggttatttcagaagaaaagatgttctttgcttctcacacagaggaggaggtgtcagtcacagtccccgaggtacaaaaggaaattgttactgaagagaaaattcacgttgccatttccaaaagggttgaaccaccacctaaagtccctgagctacctgagaaaccagctccagaagaagtggcccctgttcctatccctaaaaaagtggagcccccagcaccaaaagttcctgaggttcccaagaaacccgtgccagaggagaaaaagccagttcctgtgcctaagaaggaacctgctgctcccccaaaagtcccagaggtgccaaagaaacctgtccctgaagaaaagattcccgttcctgttgcaaagaaaaaggaagctcccccagctaaagttcctgaagtacagaagggagttgtgacagaagaaaaaataaccattgtaactcaaagagaggaatctccaccaccagcagtgccagaaataccaaagaagaaagttcctgaagaaaggaaacctgttcctcggaaggaggaagaagttccaccaccaccaaaagtgccagctctgcctaagaaacccgtcccagaggagaaagttgcagtgccagttcctgtcgctaagaaagctcctcctccccgagctgaagtctctaagaaaactgttgtagaagaaaagagatttgttgctgaagaaaaactatccttcgcagttcctcaaagagtggaagtcacgcggcacgaagtatctgcagaggaggaatggagttactcagaagaggaggaaggtgtgtccatttcagtttatagagaagaagaaagagaggaggaggaagaagcagaggttacagaatatgaagtgatggaagagcctgaggaatatgttgtggaagaaaagctgcacattatttctaagagagtggaagctgagccagctgaagtgacagagaggcaggagaagaaaattgtactgaaaccaaaaattcctgctaaaatagaggagcctccaccggctaaagttcctgaagcacctaagaaaattgtgccagaaaagaaagttcctgctccagttcctaaaaaggaaaaggtgcccccacctaaagtgccagaagagccaaagaaaccagttccagaaaaaaaggttcctccaaaagtcattaagatggaagaacctctcccagccaaagtgactgagaggcacatgcaaattacccaggaagaaaaagttcttgttgctgtaactaaaaaagaggcgcctccaaaagcaagagtgccagaggaaccgaagagagctgtcccagaagaaaaagttctgaaactcaaacctaaaagagaggaggaaccaccagctaaagtgactgaattcagaaaaagagtggttaaagaagaaaaagtatcaattgaagctccaaaaagagaacctcaacccatcaaagaagtaactataatggaagagaaagaaagggcttataccctagaagaagaagctgtttcagtacaacgggaagaagaatatgaggaatatgaagaatatgattataaagaatttgaggagtatgaaccaacagaagaatatgaccaatatgaagaatacgaggagcgggagtatgaacgatatgaagagcatgaagaatacatcacagaaccagagaagcctatccctgtaaagcctgtcccagaagaaccagttcccacaaaaccaaaggccccaccggctaaagtgctgaagaaagctgtccctgaagaaaaagtaccagtgcccattcctaagaaactcaaacctccaccacccaaagtgcctgaagaaccaaagaaagtttttgaggaaaaaatacgtatttcaattaccaaacgtgaaaaagagcaggtgactgaacccgctgctaaagtgcccatgaagcccaagagggttgtcgcagaagaaaaagtacctgtccctagaaaagaagtagcaccacctgttagagtgccagaagtgcctaaagaacttgaaccagaagaggttgcctttgaagaggaagttgtaacccatgtagaagaatatcttgtagaagaagaagaagagtacattcatgaagaagaggagttcataactgaggaagaagtggtgccagtgataccagtcaaagtgcctgaggtacccaggaaacctgttccagaagagaagaaacctgttcctgttcccaagaagaaggaagctccaccggcaaaagtgcctgaggttcctaagaagccagaggagaaagttcctgtgcttattcctaaaaaggagaagcctccgccagcaaaagttcctgaagtgcccaagaaacctgtgccagaggagaaagtaccagtaccagttcctaaaaaggtggaagctccacctgccaaagtgccagaggtacccaagaagcctgtgcctgagaagaaggtgccagttcctgctcctaagaaagtggaggctccacctgcaaaagtgccagaggtgcccaagaagctcatcccagaagaaaagaaaccaacacctgttccgaaaaaagtggaagcaccaccacccaaagtgccaaagaaacgtgaaccagttccagttcctgtagctctacctcaggaagaggaagttctatttgaagaagaaattgttcctgaagaggaagttctacctgaggaagaggaagttctacctgaggaagaggaagttctacctgaagaagaggaagttctacctgaagaagaggaaattccacctgaggaagaggaagttcctcccgaagaagaatatgtacctgaggaagaagaatttgtacctgaagaagaagtccttccagaagttaaacctaaggtgccagtacctgcaccagtgcctgaaattaagaagaaagtgacagagaagaaagtggtcattcccaagaaagaggaggctccccctgccaaagttcctgaggtgcctaagaaggtggaagaaaaacgaatcattctccctaaagaagaggaagttctaccagttgaagtgactgaggagcctgaagaagagcctatttcagaagaagaaatcccagaagaaccacctagcatagaggaagttgaagaggtggcaccacctagagtgcctgaagtgattaagaaagcagtacctgaagcacctactcctgttcctaaaaaagtggaggcaccaccagctaaagtgtcaaagaaaattcctgaggaaaaagtacctgttcctgttcagaaaaaagaggcacccccagccaaagtgcctgaagtaccaaagaaagtcccagaaaagaaagtccttgtgcctaaaaaggaagctgttcccccagctaaagggagaactgtccttgaagaaaaagtatcagttgccttccgccaagaagtagtagtaaaagaaagactagaattagaagtagtagaagcagaagtggaagaaattccggaagaagaagagttccatgaagttgaagaatattttgaagaaggcgagtttcatgaagtagaagaattcatcaaattagaacaacatagagttgaagaagaacacagagttgaaaaagttcatagggtaatagaagtttttgaggctgaagaagtggaagtatttgaaaaaccaaaagctccacctaaagggcctgagatatctgagaaaatcatccctccaaaaaaaccgcccactaaagttgttcctcgaaaagagccaccagctaaagtaccggaggtgcctaagaaaattgtggtagaagaaaaagtacgtgttcctgaagagcccagagttccaccaactaaagtgcctgaagtgctgccaccgaaggaagtggtcccagaaaagaaagtaccggtgcctcctgccaaaaagccagaagctccacctcctaaagtgcctgaggctcccaaagaagttgttcctgaaaagaaagtgccagtgcctcctcctaaaaagcctgaagtgccacccacaaaagtcccagaggtgccaaaggcagctgtcccagaaaagaaggtgcctgaagctattcctcccaaaccggaaagtcctccccctgaagtgccagaggctccgaaagaagttgttcctgaaaagaaagtgccagcggctcctcctaaaaagcctgaagtcacacctgttaaagtgcctgaggctcccaaagaagttgttcctgaaaagaaagtgccagtgcctcctcctaaaaagcctgaagtgccacccacaaaagtcccagaggtgccaaaggtagctgtcccagaaaagaaggtgcctgaagctattcctcccaaaccggaaagtcctccccctgaagtgttcgaggagcctgaggaagttgccctagaagagcctcctgctgaagttgtggaagagccagagccagcggcgcctccacaagtgaccgtaccacctaagaaacctgtcccagaaaagaaagcacctgctgtcgttgccaaaaaacctgaactaccaccagtgaaagtgcccgaggtgcccaaggaggttgttcctgaaaagaaggtgcctctggtggttcccaaaaagccagaagccccacctgctaaagtgcctgaagttccaaaagaagttgttccagaaaagaaagtagctgttcccaaaaagccagaagtcccaccagcaaaagtgccagaagtgccaaagaaacctgtcttggaagagaaaccagctgttcctgttccagaaagagcggagtctcctcccccagaagtatatgaagaacctgaggaaattgctcctgaagaggaaattgctcctgaagaggaaaagccagttcctgttgcagaagaggaggaaccagaggttccacctccagcagtgcctgaagagcccaagaagatcatccca

SEQ ID NO: 191427 - DNA, 32767 bp, Homo sapiens
  Payload ID: 17810
  Gene Name: titin
  Uniprot ID: Q8WZ42
  ENST ID: ENST00000359218
  CDS Start-End: 226-81381
gagcagtcgtgcattcccagcctcgcctcgggtgtagggattgcatagaaaagcaaaactacacagtcttgactgtgtagttttgtttttaggattagaggctcaccgattcatgtcggagatggtcagaaaaaccaactctccataggacgtcgtttcagaagcaaccttgggcttagtcccaccctttttaggcactcttgagaaatcagagtgcctagaaagatgacaactcaagcaccgacgtttacgcagccgttacaaagcgttgtggtactggagggtagtaccgcaacctttgaggctcacattagtggttttccagttcctgaggtgagctggtttagggatggccaggtgatttccacttccactctgcccggcgtgcagatctcctttagcgatggccgcgctaaactgacgatccccgccgtgactaaagccaacagtggacgatattccctgaaagccaccaatggatctggacaagcgactagtactgctgagcttctcgtgaaagctgagacagcaccacccaacttcgttcaacgactgcagagcatgaccgtgagacaaggaagccaagtgagactccaagtgagagtgactggaatccctacacctgtggtgaagttctaccgggatggagccgaaatccagagctcccttgatttccaaatttcacaagaaggcgacctctacagcttactgattgcagaagcataccctgaggactcagggacctattcagtaaatgccaccaatagcgttggaagagctacttcgactgctgaattactggttcaaggtgaagaagaagtacctgctaaaaagacaaagacaattgtttcgactgctcagatctcagaatcaagacaaacccgaattgaaaagaagattgaagcccactttgatgccagatcaattgcaacagttgagatggtcatagatggtgccgctgggcaacagctgccacataaaacacctcccaggattcctccgaagccaaagtcaagatccccaacaccaccgtctattgctgccaaagcacagctggctcggcagcagtccccatcgcccataagacactccccttccccggtcagacacgtgcgggcaccgaccccatctccggtcaggtccgtgtctccagcagcaagaatctccacatcccccatcaggtctgttaggtctccattgctcatgcgtaagactcaggcatccaccgtggccacaggtcctgaagtgcctcccccttggaagcaagagggctacgtggcctcctcatctgaggctgagatgagagagacaacgctgacaacctctactcagatcaggacagaagagagatgggaagggagatacggtgtccaggagcaagtgaccatcagtggtgctgcgggtgctgccgccagtgtgtcggccagtgctagctacgcagcagaggctgttgccactggtgctaaagaggtgaaacaagatgctgacaaaagtgcagctgttgcgactgttgttgctgccgttgatatggccagagtgagagaaccagtgatcagcgctgtagagcagactgctcagaggacaaccacgactgctgtgcacatccaacctgctcaagaacaggtaagaaaggaagcggagaagactgctgtaactaaggtagtagtggccgccgataaagccaaggaacaagaattaaaatcaagaaccaaagaagtaattaccacaaagcaagagcagatgcacgtaactcatgagcagataagaaaagaaactgaaaaaacatttgtaccaaaggtagtaatttccgcagctaaagccaaagaacaagaaactagaatttctgaagaaattactaagaaacagaaacaagtaactcaagaagcaataatgaaggaaactaggaaaacagttgtacctaaagtcatagttgccacacccaaagtcaaagaacaagatttagtatcaagaggtagagaaggcattactaccaaaagagaacaagtgcaaataactcaggagaagatgagaaaggaagccgagaaaactgccttgtctacaatagcagttgctactgctaaagccaaagaacaagaaacaatactgagaactagagaaactatggctactagacaagaacaaatccaagttacccatggaaaggtggacgttggaaaaaaggctgaagctgtagcaacagttgttgctgcagtagaccaggcccgagtcagagagcccagagagcctgggcatcttgaagaatcctatgctcagcagaccactttggagtacggatataaggaacgcatttccgccgcaaaggtagctgagcctccccaacgtccagcctcagaaccccacgttgtccctaaagcagtcaagcctagagtaatccaggctccttctgagactcatatcaaaactactgatcaaaagggaatgcacatatcatcacagatcaagaaaactacagatctaacaacggaaagattagtccatgtggataaacgcccccgcacagctagccctcactttactgtttcaaaaatttctgttcctaagacagaacatggatatgaggcatcaatagccggtagtgctattgccacattacaaaaagagttgtcagccacatcttctgctcagaagatcaccaaatcggtgaaggctcctactgtgaagcccagtgagactagagtaagggcagagcccacacccttgccacagttccccttcgctgacacaccagatacttacaagagtgaagctggcgttgaggtgaaaaaggaagtaggggtgagcatcactggcaccaccgtccgtgaagagcgctttgaagtactgcacggacgcgaagccaaggtaacagaaacagcaagagtaccagcacctgttgaaattcctgttactccaccaactttggtctcgggcttaaaaaatgtgactgtcatagaaggtgaatctgtcaccttggagtgccacatctctggatacccatccccgacagtgacatggtacagggaagactaccaaatcgaaagttccattgacttccagataaccttccagagtggaattgctcgtcttatgattcgcgaagcatttgcggaagacagcgggcgatttacttgcagtgctgtaaatgaggctggaaccgtcagcacatcctgctatctggctgtgcaggtgtcagaagaatttgaaaaggaaaccacagccgtgactgagaaatttactacagaagagaaacgctttgttgagtcaagagatgtggttatgactgatactagcctcacagaggaacaagcagggcctggagaacctgccgcgccttactttattacaaaaccagtggtccagaaactggtggaaggtgggagcgtggtgtttggatgccaagttggcggcaacccaaagccccatgtatactggaaaaaatctggtgttcctctaaccactggatacagatacaaagtgagttacaacaaacaaaccggtgaatgcaagctggtgatttctatgacttttgctgatgatgctggagaatacactattgttgttcgcaataagcatggagaaacttctgcatctgcttccttgcttgaagaagctgattatgagttactgatgaagtcccagcaagaaatgctttatcagacacaagtgactgcatttgttcaagaacctaaagttggagaaacagcacctggatttgtatactctgagtatgaaaaagagtatgaaaaagaacaagccttaattaggaagaaaatggccaaagatactgtagtggtcagaacttatgtagaagatcaggaattccatatttcttcctttgaagagagacttattaaagaaattgaatatagaataataaagactacattagaagaacttcttgaagaagatggagaagaaaagatggcagttgacatttctgaatctgaagctgttgaatcaggatttgattcaagaatcaagaattatagaattcttgaggggatgggtgtcacttttcattgcaagatgtctggatatccattaccaaagattgcttggtacaaagatggcaagcgcatcaaacatggagaaagataccaaatggactttctacaagatggcagagctagtctgcgtatacctgttgttcttccagaagatgaaggaatctacactgcatttgccagcaatattaaaggaaatgcaatttgctcagggaaattgtatgtggagcctgctgcaccacttggagctccgacttacattcccacactagagccagtgagcagaatcagatctctctctccacgttcagtgagcaggtctcctatacgcatgtctcctgcacggatgtcacctgcaaggatgtctcctgcacggatgtcccctgcaagaatgtcccctggacgtaggctggaggagacagatgagtcacaacttgagagactatataaaccagtctttgtgttaaaacctgtttctttcaaatgtttagaagggcaaactgccagatttgacttaaaggttgttggtagacctatgccagagacgttctggtttcatgatggccagcaaattgtcaatgactatacccataaagtagtcattaaagaagatggtactcaatcactaattattgtccctgccacacccagtgattctggggaatggactgtggttgcccaaaacagggcaggcagatcttcaatttcagtgattttaactgtggaagctgtggaacatcaggtaaaaccgatgtttgtagaaaaactgaaaaatgtcaatataaaggaaggttcccgacttgaaatgaaagtcagagctacgggtaaccccaaccctgacattgtatggttgaaaaacagtgacatcattgtgcctcataaatatcccaaaatcagaattgaaggaaccaagggagaagctgcccttaaaatcgattccactgtcagccaagattctgcctggtatactgcgactgctattaataaagctggcagagacactacaagatgcaaagtaaatgttgaagttgagtttgcagagcctgagccagagagaaagttaatcatcccacgggggacatatagagcaaaggagattgcagccccagaactggagcccctccatttgcgatatggccaagagcaatgggaagaaggtgatctctatgacaaagagaaacaacagaaaccatttttcaagaaaaaactcacttccttaagacttaagcgctttgggcctgcccactttgaatgcaggctaacacccattggtgacccaacgatggtggtggagtggctccatgatggaaagccacttgaagcagccaacaggctccgtatgatcaatgaatttgggtactgcagccttgattatggcgttgcatattctagagacagtggtatcattacttgcagagccactaacaaatatggaacagatcacacatctgctacccttattgttaaagatgagaaaagtcttgtggaagaatcccaattgcctgaggggaggaaaggcttacagagaattgaagaattagagagaatggctcatgaaggtgcacttacaggtgtaacaacagatcagaaagaaaagcaaaagccagacattgtcttgtacccagagccagttagagtacttgaaggggagactgcaaggttccgctgcagggtaacaggctaccctcagcccaaagtcaactggtacctcaatggacagctcatccgcaaaagcaaaaggttcagagttcgctatgatggtatccattacctggacatcgtggactgcaaatcatatgacacaggtgaagtgaaggtcaccgcggaaaatcctgaaggtgtgatagagcataaagtgaagcttgagattcaacagagggaagattttaggtctgtccttaggagagctcctgaaccaaggcctgagtttcacgtacatgaaccaggaaagcttcagtttgaagtacaaaaagtggatagacctgttgacaccactgaaaccaaagaagttgtgaagttgaaaagggctgaaagaattacccatgaaaaagtgcctgaagagtcggaagagctgcgcagtaaattcaagcgcagaacagaagagggctattatgaagccattaccgctgtggagctcaagtctcgaaagaaggatgaatcctatgaggaactcctcaggaagacaaaagatgaacttctccactggaccaaagagttaactgaagaggaaaagaaagctcttgccgaagaaggcaaaatcacgattccaacttttaaacctgacaagattgaactaagtcctagtatggaggctccaaaaatcttcgaaagaatccagagccaaacagtgggccaaggatctgatgcacacttccgggtcagagtcgtggggaaaccagaccccgaatgtgaatggtacaaaaatggtgtcaaaattgaacggtctgaccggatctactggtactggcccgaagacaatgtttgtgaattggtcataagagatgtgactgctgaggactctgccagcatcatggtaaaagccatcaacatagctggagaaacctccagtcacgcattcttacttgtccaagccaagcaattgatcactttcacacaggaattacaagatgttgttgctaaggaaaaagacactatggcaacctttgaatgtgaaacttcagaaccatttgtcaaagtgaaatggtataaagatggtatggaggttcatgagggagataaatacaggatgcactctgacagaaaggttcacttcctctccatactgaccattgatacgtctgatgctgaagattacagctgtgtacttgtggaagatgaaaatgtcaaaacgactgctaaacttattgttgaaggtgcagttgttgagtttgtgaaagaacttcaggacatagaagttccagaatcatattcaggagaattagagtgcattgtatccccagaaaatatagaaggaaaatggtatcataatgatgtggagcttaaatccaatggcaaatatacaattacatctcgtcgtggacgtcagaacctcacggtcaaggatgtaaccaaggaggaccagggagaatacagctttgtcatcgacgggaaaaagacaacctgtaaattaaagatgaaaccccgccccattgctatcctacaaggacttagtgaccaaaaagtctgtgagggtgacattgttcagcttgaagttaaagtctccttggaaagtgtggaaggcgtctggatgaaagacggccaagaagtgcagcccagtgacagggttcacattgtgatagacaaacaatctcatatgctgctcattgaagacatgactaaggaagatgctggaaattactctttcaccattccagcccttggcctctccaccagtgggcgtgtctctgtctatagtgtggacgtgataacacctctaaaagatgttaatgtgattgaaggcaccaaggctgtgcttgaatgtaaggtgtcagtccctgatgtgacttctgttaagtggtacttaaatgatgaacaaatcaagcctgatgaccgtgtacaggccattgtgaaaggtactaaacagcgactagtcattaaccgaactcatgcttcagacgaaggaccttacaagctgatagttggcagagttgaaaccaactgtaatctctctgtagaaaaaattaaaattatcagaggtcttcgtgaccttacctgtacagaaactcaaaatgtggtgtttgaggttgagctgtcccactctggaattgatgtcctgtggaattttaaggacaaggaaatcaagcccagttctaaatataaaattgaagcacatggaaaaatatataaattgacagttctaaatatgatgaaagatgatgaaggaaaatacacattttacgcgggagaaaatatgacatctggaaaacttactgtggcaggtggggccatctccaagccactcacagatcagaccgtagctgaatcccaggaagctgtgtttgaatgtgaagttgccaacccagattccaaaggcgaatggttgagggatggcaaacacctaccactgactaacaacatcagaagtgagtctgatggccacaaaaggagacttatcattgctgccaccaaattagatgacattggagaatatacctacaaggtggccacctccaaaacatctgccaaactcaaagttgaagctgtcaaaattaagaagactctgaagaacctcacagtgacagaaacacaggatgctgttttcactgtcgagcttacacaccctaatgtcaaaggtgtccagtggatcaaaaatggagttgtgctggaatccaatgaaaagtatgctatctctgtcaaaggaacaatttactctctgaggattaaaaactgtgccatcgtggatgagtctgtttatggcttcaggcttggaaggcttggagccagtgccagactgcacgtggagactgtcaagatcattaaaaagccaaaggatgtgacagccttggaaaatgccactgttgcctttgaagttagtgtttcccatgacactgttccagtaaaatggttccataagagtgtggaaattaagccaagtgacaaacacagactggtctcagaaaggaaagtccacaagctgatgctgcagaacatctccccctcagatgctggggaatacacagctgtggtcgggcaattggaatgcaaagcaaaactgtttgtggagacattacatattacaaaaaccatgaaaaatatcgaggtgcctgagaccaaaactgcctcttttgagtgtgaggtgtcccacttcaatgtcccttccatgtggctgaagaatggtgtggaaattgagatgagtgaaaagttcaagatagttgtgcagggaaaactccatcagctgatcatcatgaacaccagcacagaggactcggcagaatacacatttgtctgtggcaatgaccaagtcagtgccaccctgacagtcaccccaatcatgattacttccatgctgaaagacatcaacgctgaagaaaaagacactattacttttgaggtgacagtgaactatgaaggcatctcttacaaatggttaaagaatggtgtggaaatcaaatcaactgacaagtgccagatgagaaccaaaaagctcacacactcactgaacatcaggaatgttcactttggggatgctgctgactacacctttgtggctggaaaagcaacatcaacagccacactttatgtggaagctcgtcatatagaatttaggaaacacattaaggacattaaggtactggagaagaagcgagccatgtttgaatgtgaagtttctgaacctgacatcactgtacagtggatgaaagatgaccaggaactgcagatcacagacagaataaagattcagaaggagaaatatgtccaccgccttctgatcccatccacccggatgtctgatgctgggaagtacacagtggtggcaggaggcaacgtgtcaactgcaaaactctttgtagaaggcagagatgttcgcatccgaagtattaaaaaggaggttcaggtcattgagaaacagcgtgctgttgttgaatttgaggtcaatgaagacgatgttgatgcccactggtataaagatggcattgaaatcaatttccaagttcaagaacgacacaaatatgtagtggaaagaagaatccaccgaatgtttatctctgagaccagacagagcgatgcaggagaatacacctttgtggcaggaaggaacaggagttctgtcactctctatgtcaatgctcctgaaccgccccaagttctgcaggagctccagcctgtcactgtgcagtctggcaagcctgcccgcttctgtgccgtgatatccggaagaccacagcccaaaatttcctggtacaaggaagagcagctgctttccactggcttcaagtgcaaatttcttcatgatgggcaagaatacacgcttttgctaattgaagccttcccagaggatgcggcagtctatacctgtgaagccaagaatgactatggtgttgccacaacatcagcttcactctcagtggaagttccagaagttgtgtctcctgatcaggaaatgcctgtttatccacctgccatcatcaccccgcttcaggacactgtcacttctgaagggcagccagcccgttttcaatgccgggtttctggaacagatctaaaagtgtcgtggtacagcaaagacaagaaaatcaagccatctcggttctttagaatgactcaatttgaagacacttatcaactggaaattgccgaagcttatccagaagatgaaggaacttacacgtttgttgctagtaatgctgtaggccaagtatcaagcacagccaacctgagtctggaaggatttagcaaatttgaagaaaatacatcaaactcccaatggcatgtctctttatcagtttcatttaagaaggagccccttggccaaaagcccagcttcatccagcctctgtcaagcctcagggtgcacaacggggagacagtcagatttcatgcgagggtttctggcattcccaagccagaaatccaatggtttcataaccagcagctaattctaccaacaaaagatgtagttttccattttgaggagtccacaggcatggctttaatgcttatagttgatgcttactcagagcatgctgggcagtactcttgcaaagcagccaatagtgctggggaagccacttgtgcagctacactcacagtgactccaaaagctcctgaatcaattttgcatgagaggattgaacaagagattgagatggaaatgaaagagttttctagttcttttctgtctgccgaggaagaaggacttcatagcgccgaacttcaattatctaaaataaatgaaacacttgaacttttgtctgaatctccagtttacccaactaaatttgattccgaaaaggaaggcactggcccaattttcatcaaagaagtgtcaaatgctgatataagcatgggggatgtggctacactgtctgtaactgtcattggcatccccaaacctaaaattcagtggttctttaatggagtgctattaaccccttctgctgactacaaatttgtttttgacggtgatgatcatagcctgatcattctgttcaccaaattggaggatgagggagagtatacatgtatggccagtaatgactatggaaagacaatatgtagtgcctatctaaaaattaattccaaaggagagggtcacaaagacactgaaacagaatcagcagtggcaaaatctctggaaaagctgggaggtccttgtcctcctcacttccttaaggagttaaaaccaattcgctgtgctcaagggcttcctgccatctttgagtacacagtggttggagagcctgcccctactgttacatggttcaaagaaaacaagcagctttgcaccagtgtttattacactatcattcataaccctaatggctctggaactttcattgtcaatgaccctcagagggaagacagtggcctctatatctgtaaagcagagaatatgttgggtgagtccacctgtgcagcagagctgcttgtgcttctggaagacacagacatgactgataccccctgcaaagcaaagtccacaccagaggctcctgaggattttccacagacacccttaaagggtcccgcagttgaagcacttgactcagagcaggaaattgcaacgtttgtaaaagacaccattttgaaagctgctttaattacagaagaaaaccagcaactatcttatgagcatattgctaaagccaatgaattgagcagtcagcttcctttgggagctcaggaattgcaatccattttggagcaagacaagctcactcctgaaagcaccagggaatttctttgcatcaatggcagtattcactttcagcctctcaaggaaccatctcccaacctacagctgcagattgtacagtcccagaaaaccttctccaaagaaggtattctaatgcctgaagagcctgagacacaggcagttctatcagataccgagaaaatcttcccaagtgccatgtccatagaacaaattaattcattaacagttgagcctctgaaaactttattagctgaacctgaagggaattatccacagtcttcaatagaacctccaatgcattcttatctaacctctgtggctgaggaagtactttcaccaaaagaaaagacagtatctgacaccaacagagagcaaagagtgactcttcaaaagcaagaggcacaaagtgcgctcatcttgagtcagagcttagctgagggacacgtggagagtctccagagtcctgatgtcatgatctctcaggtaaactatgagcccctagtcccttcagaacactcatgcacagaaggaggtaaaattttgatagaaagtgcaaatccactggaaaatgcagggcaagattctgcggtcagaattgaggaaggcaagtccttaagatttccactagcacttgaagaaaagcaggtactgctcaaagaagagcattctgacaacgtggtgatgcccccagaccaaatcattgagtctaaaagagagcccgtggcaataaagaaagtgcaggaggtacagggaagggaccttctttctaaggaaagcttgctttctggtattccagaagagcagagattaaacctgaaaattcaaatctgccgggctttgcaagcagccgtggccagcgagcagccaggtcttttctctgagtggctaagaaatattgaaaaggtggaggtcgaggctgtaaacatcacccaagagcccagacacatcatgtgcatgtaccttgttacttcggcaaagtctgtaacagaagaagtaaccatcattattgaagatgttgatcctcaaatggctaacctgaaaatggaacttagggatgctttgtgtgctattatatatgaggaaatagacatcctaacagctgagggtcctagaattcagcaaggagccaaaacaagtttgcaagaagaaatggattctttttcaggttcacagaaggttgaacccattactgaaccagaagttgaatctaaatatctgatctcaactgaagaggtcagttattttaacgtgcaaagtagggttaaatatttggatgccacacctgtcactaaaggggttgcttcagctgttgtctctgacgaaaaacaagatgagagtctgaaaccatcagaggaaaaagaggagtcttcctctgaaagtggtactgaggaggttgctacagtaaagatacaggaagctgagggtggcttaatcaaagaggatggccccatgatacatacacctttagtggacactgtttctgaggaaggtgatattgtacacctcacaacatccataacaaatgctaaagaggtgaattggtattttgagaataaactggtgccttcagatgaaaagttcaagtgtttacaagatcaaaatacatatacgctagtcatcgacaaagtaaataccgaagaccatcaaggagagtatgtctgtgaggccttgaatgacagcggaaaaacagcaacttcagccaaactcactgtagtaaaaagagctgccccagtgatcaagaggaaaatcgaacccctggaagtagcactgggccacctagccaaattcacctgtgagatccaaagtgctcccaatgtccggttccagtggtttaaagctggccgagaaatttatgagagtgacaagtgttctattcgatcttcaaagtatatctccagccttgaaatcctgagaacccaggtggttgactgcggcgagtatacatgcaaagcttccaatgagtatggcagtgtcagctgtacagccacactaactgtgacagtgcctggaggtgaaaagaaagttcgcaaattacttccggaacgtaaacctgaaccaaaggaagaagttgttctgaaaagcgttctaagaaaaagacctgaagaagaagaacctaaagtagaacctaaaaaactagaaaaagttaaaaaacctgcagtaccagaaccaccacctccaaaacctgttgaagaggttgaagtacctactgttacaaaaagggaaaggaagattcctgaaccaacaaaagtgcctgaaatcaagccagcaatacctctccctgcacctgaaccgaaaccaaagcccgaagcagaagtgaaaacaatcaaaccacctcctgtggaacctgaaccaacccccatcgctgccccagtaacagtgccagtggttggaaagaaagcagaagccaaagcacctaaggaagaggctgccaagccaaaaggtcctatcaaaggtgtacccaaaaagactccttcaccaatagaagccgaaaggagaaagttaaggccaggaagtggtggagagaaacctcctgatgaagccccgttcacctaccagctaaaggctgtgccactgaagtttgtgaaagaaatcaaagacatcatcttgacagaatcagagttcgttggctcttcagcaatctttgaatgtttggtctccccttccactgcaattacaacctggatgaaagacggtagcaatatccgtgagagtcccaagcacaggtttattgcagatggtaaagacagaaagctgcacatcattgatgttcaactttccgatgctggtgaatacacctgtgttttacgtttgggaaacaaagaaaagacctccacggctaaacttgttgtagaagaacttcctgtgcgttttgtaaaaacactggaagaggaagtcacagtggtcaaaggacagccattgtacttgagctgcgagttaaacaaagagcgtgacgtggtctggaggaaggatggcaagattgtggtggagaaacctggccgaattgtgccaggcgtcattggcttgatgcgggctctgaccatcaacgatgcagatgacacagatgctggaacatacacagttactgtggaaaacgccaacaacctggagtgttcatcttgcgtaaaagtagtagaagtcattagagattggctggtgaaacctatacgagaccagcatgtgaaacccaaggggacagctatttttgcctgtgatatagcaaaagatactccaaacattaagtggttcaaaggatatgatgaaatccctgcggaaccaaatgataagactgaaatactgagagatggaaatcatctgtacctcaaaattaagaatgctatgccagaagatattgctgagtatgcagtggaaattgaaggaaaaagataccctgcaaagctgacacttggagagcgtgaagttgaactgcttaaaccaatagaggacgttaccatttatgagaaagaaagtgcaagctttgatgcagaaatctcagaggcagacattcctggacaatggaaactgaaaggagaacttctaaggccctcacctacttgtgaaatcaaagcagaaggtggaaaacgcttcttaactttgcacaaagtcaaactggaccaagctggtgaagtcctctaccaggcccttaatgcaattacaactgccattttgacagtaaaagaaatcgaacttgactttgctgtgcccctgaaggatgtcactgttccagaaaggcgacaggctcgattcgaatgtgtcctcacccgagaggcaaatgttatatggtccaaaggacctgatataattaagtcatctgacaaatttgatatcatcgctgatggaaagaaacatattcttgttattaatgattctcaatttgatgatgaaggggtctatactgctgaggtggagggcaagaagacctcagctcggttgtttgtcacaggtataagactgaaattcatgtcacctcttgaagatcaaacagtaaaagaaggtgaaacagcaacttttgtttgtgaactttctcatgaaaaaatgcatgtagtctggttcaaaaatgatgccaaactccatacaagcagaacagtactcatctcttctgagggcaagactcacaaattggaaatgaaagaagtgacattggatgatatatctcagataaaagctcaagtcaaggagctgagctccacagcacagctgaaggtcttagaggccgatccctacttcactgtgaaattacatgacaaaactgcagtggagaaggatgagattactttgaagtgtgaagtgagcaaagatgtaccagtgaaatggttcaaagatggtgaagagattgtcccttcacccaaatattctatcaaggcagatggcctgcgccgcatcttaaaaatcaaaaaggcggaccttaaagataaaggcgaatatgtgtgtgactgtggcacagacaagaccaaggcaaatgttactgttgaggctcgactaataaaagtggaaaagcctctgtacggagtagaggtgtttgttggtgaaacagcccactttgaaattgaactttctgaacctgatgttcacggccagtggaagctgaaaggacagcctttgacagcttcccctgactgtgaaatcattgaggatggaaagaagcatattctgatccttcataactgtcagctgggtatgacaggagaggtttccttccaggctgctaatgccaaatctgcagccaatctgaaagtgaaagaattgcctcttatcttcatcacacctctcagtgatgttaaagtcttcgagaaagatgaggctaagtttgagtgtgaagtatccagggagcccaaaacattccgttggctaaaaggaacccaggaaatcacaggtgatgacagatttgagcttataaaggatggcactaagcattcaatggtgatcaagtcagctgcttttgaagatgaagcaaaatacatgtttgaagctgaagataagcacacaagtggcaaactgatcattgaaggaatccggctcaaattcctcacccctctcaaagatgtaactgccaaagagaaggaaagtgctgtatttactgtggagttatctcatgataacatccgagttaaatggttcaagaatgaccagcgcctacacaccaccaggtcggtctcaatgcaagacgaagggaaaactcattcgatcacattcaaagacctgtctattgatgacacctcccaaattagagtagaagctatggggatgagttcagaagctaaactcactgtgcttgagggagacccatattttacaggaaaacttcaagattatactggtgtagagaaagatgaagttattctacagtgtgaaattagcaaagcagatgcaccagtgaaatggtttaaggatgggaaggaaataaagccatccaaaaatgctgttattaaggcagatggcaagaaacgcatgctaatcctaaagaaagccttgaaatcagatattggacagtacacctgtgactgtgggacagataagacctcaggaaaacttgacattgaggatcgggaaattaaactggtgcgacccctgcacagtgtggaggtgatggagactgagacagcacgctttgaaaccgaaatctctgaagatgatatccacgccaactggaaactcaagggagaggccctactccaaacacctgattgtgaaattaaggaagaaggcaaaatacactcccttgttttgcacaactgtcgcctggaccagacgggtggggtggatttccaagctgccaatgttaaatctagtgcccacctccgagttaagccacgagtaattggtcttctgaggcctttaaaggatgtcaccgtgactgcaggggaaacagccaccttcgactgcgagctctcctacgaagatatcccagtggaatggtatctcaaagggaagaaactagagcccagcgataaggtggtcccacgttcagaaggaaaagttcatacacttactctgagggatgtaaagttagaagatgctggggaagtccaactaacagcaaaagatttcaaaactcacgccaacctctttgtgaaagaacccccagttgaattcactaagcctcttgaggaccagacggtcgaagagggagccactgcagtgctggagtgtgaagtctccagagaaaatgctaaggtgaaatggttcaaaaatgggacagaaatcctcaaaagcaagaagtatgaaattgttgctgatggcagggtcagaaaacttgttatacatgactgtaccccagaggatattaaaacatacacttgtgatgctaaggattttaagacttcctgtaacctgaatgtcgtgcctcctcatgtggaattcttaagaccactcaccgaccttcaagttagagaaaaagaaatggctcgatttgagtgtgaactttcccgagaaaatgctaaggttaagtggtttaaagatggtgctgaaattaaaaagggcaaaaaatatgacatcatatccaagggagcagtgcgcattcttgtcatcaacaaatgtctactggatgatgaagctgaatattcctgtgaagtaaggacagcgagaacttctggcatgctgacagttctggaagaagaagctgtctttaccaaaaatcttgccaacattgaagttagtgaaacagacactataaaactggtttgtgaagtctccaaacctggcgcagaagtgatttggtataaaggggatgaggagatcattgaaacaggaagatatgaaatactgactgaaggacggaagagaatcctggtcattcagaacgctcaccttgaggatgctggcaactacaactgtcgactcccaagctctcgaaccgatggcaaagtcaaagtacatgaactggctgctgaatttatctcaaagcctcaaaaccttgaaatacttgaaggagaaaaggctgaatttgtctgctctatatcaaaagaaagctttccagtccagtggaagagggatgataagacacttgaatctggagataaatatgacgttattgctgatggtaaaaagagggtcctagttgtgaaagatgccacattacaagatatgggcacttacgttgtcatggtaggggccgccagagcagcagctcacttgacagtcattgaaaaactcaggatcgtagttcctcttaaggacacccgggtgaaggaacaacaggaagttgtcttcaactgtgaagtcaatactgaaggtgccaaagccaaatggttcagaaatgaagaagctatatttgatagttcaaaatacatcattctccaaaaagacctagtctacaccctcagaattagagatgcacacttagatgaccaagccaactataatgtgtctttgaccaatcacagaggtgaaaatgttaaaagtgcagccaatctaatagtagaagaggaagaccttaggattgttgagcctcttaaagatattgaaacaatggagaagaaatctgtcacattctggtgcaaggtgaatcgtctcaatgtaacactgaagtggaccaaaaatggtgaagaagtgccttttgacaaccgtgtctcatacagagttgataagtacaagcacatgttaaccattaaagactgtggcttcccagatgaaggtgaatacattgtcactgctggacaagataaatctgttgctgagcttctcatcatagaagccccgacagaatttgtggaacacttggaagatcagacagtcactgagttcgatgacgctgtcttctcctgccagctctccagagagaaagccaatgtaaaatggtacagaaatgggagagaaatcaaagaaggcaaaaaatacaaatttgaaaaagatggaagtatacacagactcattataaaagattgcaggctggatgatgagtgtgaatatgcttgcggggtagaagacaggaagtctcgtgctagactttttgtggaagaaattcctgttgagatcatcaggcctccacaagatattcttgaagcccctggtgctgatgttgtctttttagcagaactcaataaagataaggtggaagtccaatggctaagaaataacatggttgttgtccagggtgataaacaccagatgatgagtgaaggaaagatacatcgactacagatttgtgatattaagccccgtgaccagggtgaatacagatttattgccaaagacaaagaagccagagctaagcttgaactggcagctgcaccaaaaatcaagacagctgaccaagaccttgtggttgatgttggcaagcctctgacaatggtggtgccatatgatgcctaccccaaagcagaagctgaatggtttaaagaaaatgaacctttatctacaaaaaccattgatactacggctgaacaaacttctttcagaattttagaagccaagaaaggagacaaagggaggtataaaattgtgcttcagaacaaacatggaaaagcagaaggattcatcaatttaaaagttattgatgttcctgggccagtacgtaacttagaagtgacagaaacatttgatggtgaagtgagccttgcttgggaagaacctttaactgatggtggaagcaaaatcataggttacgttgttgaaagacgtgacattaagagaaagacctgggttctggccacagaccgtgcagagagttgtgagtttactgtcactggtctacagaaaggaggagttgagtacctattccgtgtgagtgcaagaaacagagttggcactggtgagccagtagaaactgacaatcctgtagaagcaaggagtaaatatgatgttccaggccctcctttgaatgtaaccatcactgatgtgaatcgatttggtgtctcactgacatgggaaccaccagagtatgatggaggtgctgagatcacaaactacgtcattgaattaagagacaagacttctatcaggtgggatactgccatgactgtgagagctgaagacctgtctgcaactgttactgatgtggtagaaggacaggagtacagtttccgagtgagagcccaaaatcgaattggagttggaaaaccaagtgcagccacacccttcgtcaaagttgctgatccaattgagagaccaagtcctcctgtaaacctaacttcctcagatcagactcagtcatcagttcagctcaaatgggaacctcctctgaaagatggaggaagcccaatattaggctatataattgagcgatgcgaagaaggaaaagataattggattcgttgcaatatgaaacttgtccctgaactgacttacaaggttaccggattggaaaaaggaaataaatatttatatagagtatctgcagaaaataaagctggtgtttcagatccatctgaaattcttggtcctctcaccgctgacgatgcatttgttgaaccaacaatggatttaagtgcatttaaagatggtctggaagttattgtcccaaatcctatcacgatcctggttccaagtacaggctatccaaggccaactgcaacctggtgttttggagataaagtactagaaacaggggaccgggtgaaaatgaagaccttgtctgcctatgccgaacttgtcatttctccaagtgaacgttcagacaagggcatttatacactgaaattagaaaaccgtgtgaaaacaatttctggggaaattgatgtcaatgtaattgctcgcccaagtgcacccaaagaattgaaatttggtgatataaccaaggactcagtacatttgacttgggaaccacctgatgatgatggaggaagtccgttaactggatacgttgttgaaaaacgagaagtcagccggaaaacatggactaaagttatggactttgtgactgatctagaattcacagttcctgatcttgttcaaggaaaagagtacttatttaaagtttgtgctcgtaacaaatgtggccctggagaacctgcatatgttgatgaacctgtaaatatgtcaactcctgcaacggtacctgacccaccagagaatgttaaatggagagatcgaacagccaatagcatcttcttaacatgggatccacctaaaaatgatggtggttcacgcatcaaaggatatatagttgaaagatgtccacgtggttctgataaatgggttgcctgtggagaacctgttgcagaaacaaaaatggaagtgacaggtcttgaggaaggcaaatggtatgcctaccgcgtgaaggccttaaacaggcagggtgctagcaaaccaagcagacccacagaggaaatccaggctgtggacacacaagaggccccagaaatcttcctcgatgtgaagctccttgctggtctcactgtaaaagctgggaccaagattgaacttcctgccaccgtaaccggaaaacctgaacctaaaataacttggacaaaggctgatatgattctgaagcaggacaaaagaattaccattgaaaatgtccctaagaaatccacagtgactattgttgatagtaagagaagtgacactggcacatatatcattgaggctgtgaatgtgtgtggccgggccactgctgtggtggaagtgaacgtcttagataaacccggaccaccagctgcctttgacatcacagatgtaaccaatgagtcatgtcttctaacatggaacccaccacgcgatgatggtggatctaagatcacaaactatgttgtggagagacgagcaactgatagtgaagtgtggcacaagctctcatccaccgtcaaggatacaaacttcaaggccaccaaattaatccccaataaagagtacatcttcagagttgctgcagaaaacatgtatggtgttggtgaaccagttcaggcctctccaataacagccaaatatcagtttgatccacctggtcctccaactcgcctagaaccttctgatatcactaaagacgcagtgactctcacatggtgtgagccagatgatgatggtggcagcccaatcacaggatactgggttgaaagactggatcctgatacagataaatgggttagatgcaataagatgccagtaaaggacacaacatacagagtgaaaggtctcactaataagaaaaaatacagattccgtgtgttggctgaaaatcttgctggacctggaaaaccaagcaaatcaactgaaccaatcttaataaaggatcccatagatcctccatggccccctggaaaaccaactgtaaaagatgtaggcaaaacatcagtaaggttgaattggacaaaaccagaacatgatggaggtgcaaagattgagtcttatgtcattgaaatgctgaagactggaacagatgagtgggtcagagtggcggaaggggttcccaccactcagcacttgctcccagggctcatggaaggacaggaatactcattccgagttagagctgtgaataaggctggggaaagtgaacccagtgaacccagtgaccctgtgctttgccgggagaagctatatcctccatcaccaccacgctggcttgaagttattaatatcacaaaaaatacagcagacctaaaatggacagttcctgagaaagatggagggtcccccatcaccaactacattgtggaaaagagagacgtcaggcgaaaaggctggcaaacagtggataccactgtcaaggacaccaagtgcacagtcaccccactgactgagggctctttatatgtgttccgagttgctgcagaaaatgctataggacaaagcgactacaccgaaattgaggactctgtgctggccaaagacacctttaccactcctggaccaccctacgccctggcagtggttgatgtgacaaaacgacatgttgacctaaagtgggagccacctaaaaatgatggtggaagaccaatacagagatatgtcattgagaagaaagaaaggttaggtacccgttgggtgaaagctggaaagactgcaggacctgactgtaacttcagagtaactgatgtcatcgaaggaacagaggtccagtttcaggttcgggctgaaaatgaagctggagttggccacccaagtgaacccacagaaatcctatccattgaagatccaacaagtcctccctcaccaccccttgacctacatgtgactgatgctgggagaaaacacattgccattgcttggaagcctccagagaaaaatggtggaagtcctatcataggataccatgttgaaatgtgtccagtaggcactgagaaatggatgagagttaattctcgcccaataaaggacttgaaattcaaggttgaagaaggtgttgttcctgacaaagaatatgtcctgagagtgagagcagtcaatgctattggtgtcagcgagccatctgaaatctctgaaaatgtggttgccaaagacccagactgcaagccaacaattgacctggagactcatgacattattgttattgaaggtgaaaagttaagcattcctgttcccttcagagctgtcccagttccaactgttagttggcataaagatggcaaagaagttaaagcaagtgatagattaacaatgaagaatgatcacatctctgcacaccttgaagttcccaagagtgtccgtgcagatgccggaatttataccattacactggagaataagctcggctcagcaacagcctcaatcaatgtcaaagtcataggcctacctggaccatgcaaagatattaaagcaagtgacattaccaagagttcttgtaagttaacttgggaacctccagaatttgatggtggaaccccaattcttcattatgtcctggagcgcagagaagctgggaggagaacatatataccagtcatgtctggtgagaacaaactgtcatggactgtgaaggatctcataccaaatggtgaatacttcttccgtgttaaagcagtcaacaaggttggtggaggagaatatattgaactgaaaaatccagtcattgctcaagatccaaagcaaccccctgatccacctgtagatgtagaggttcataatcctacagcggaggcaatgactattacatggaagccacctttgtatgatggagggagcaagataatgggctacatcatagagaagattgctaagggtgaagaaaggtggaagagatgcaatgaacacctggtaccaatcctgacctatacagcaaaaggacttgaagaggggaaagagtaccaattccgtgtgcgagcagagaacgccgcgggtattagtgaaccttctcgggctactcctccaaccaaagctgtagatcccattgatgcccccaaagtcattctgagaacaagcctagaagtgaaacgaggtgatgaaatagcacttgatgcaagtatttctggatcaccttacccaactattacatggataaaggatgaaaatgttattgtaccagaggaaattaagaagcgtgcagcacccttggttaggagaaggaagggtgaagttcaagaagaagaaccatttgtcctgcctctgacacagcgtttgagtattgacaacagcaaaaagggagaatctcagctacgcgtccgagattctctccgacctgaccatggtctgtatatgatcaaagttgaaaatgaccacggtattgcaaaagctccttgtactgtcagtgtgttagatacaccgggaccaccaatcaactttgtatttgaagatatcagaaagacctcagtcctttgtaaatgggaaccaccccttgatgatggtggcagtgaaatcataaactacactttggaaaagaaagacaagacaaaacccgactcagaatggattgttgtcacttcaacacttagacattgcaaatattcagtaacaaaactgattgaaggaaaagagtacctcttccgtgtaagagctgaaaacagatttgggccaggtccaccatgtgtttcaaagccacttgtggctaaagatccatttggaccacctgatgcaccagataagcccattgtggaagatgttaccagcaacagtatgctagtgaaatggaatgaaccaaaagataatggaagccccattttgggttactggcttgaaaaacgtgaagttaacagtacacattggtctcgtgtcaacaaaagccttctgaatgccttgaaagccaatgtagatggcttattagaaggactcacctatgtcttcagagtatgtgctgaaaatgcagctggacctggaaagttcagtccaccttcagatcccaaaacagcacatgatccaatctctcctcctgggccacctatcccaagagtcactgacacaagctctacaactattgaactagaatgggaacccccagctttcaatggtggtggggaaattgttggctattttgttgataagcagttggttggcacaaatgaatggtcacgctgcacagagaagatgatcaaggtccgtcagtacaccgtcaaagaaatccgagagggtgctgattacaaacttcgggtgagtgctgtcaatgccgcaggggaaggaccgcctggagaaacacaacctgttactgtggctgaaccacaagagcctccagctgtggaactggatgtttctgtcaagggtggaatacaaataatggctgggaagactcttagaattccagctgtggtgactggtcgccctgtacctacaaaagtatggaccaaagaagaaggggagctggataaagaccgtgttgtaatagacaacgttggaaccaaatctgaactaattatcaaggatgcactgcgaaaagaccatggcagatatgtgattacagctacaaatagctgtggttccaaatttgcagcagccagggtagaagtttttgatgtccctggtccagttcttgacttaaaacctgttgtaacaaacagaaaaatgtgtctacttaactggtctgatccagaagatgatggaggaagtgaaataacaggctttatcattgaaagaaaagatgccaagatgcatacttggagacaaccaatagagactgagagatctaaatgtgacatcacaggtctgcttgagggacaagaatataagttccgtgttattgccaagaacaagtttggctgtggccctcctgttgaaataggaccaattcttgcagttgatccactaggtcctccaacatctccagagaggctcacatacactgaaaggacaaagtccactatcacacttgactggaaagagccccgcagtaatggtggcagtcccatccaaggatatatcattgaaaaacggcgtcatgacaaacctgactttgaaagagttaacaagcgactctgcccaaccacatcttttctggttgaaaatcttgatgaacaccaaatgtatgagttccgtgtcaaagctgtcaatgaaattggtgaaagtgaaccatccctacctcttaatgtagtcatacaagatgatgaagtgcctccaactattaagttgcgtctgagtgttcgaggagacactatcaaagttaaggcaggagagcctgtccacatccctgcagatgtgacaggccttccaatgcctaagattgaatggtccaaaaatgaaactgtaattgaaaaacccactgatgcacttcagataaccaaggaagaggtatcccgaagtgaggcaaaaactgagcttagcattcccaaagcggtccgggaggacaaaggcacttacacagttactgcttccaatcgccttggctcagtgttccgaaatgttcacgttgaagtatatgaccgcccatccccaccaagaaatcttgctgttactgacattaaagctgaatcttgctacttgacatgggatgcccctcttgataatggtggcagtgaaatcacccattatgttattgacaaacgtgatgcaagtaggaagaaagcagaatgggaggaagtcaccaacactgctgtagagaaaagatatgggatctggaaacttatccccaatggtcagtatgagttccgagtcagggcagtgaataaatatggaatcagtgatgagtgcaaatcagataaagtagtcattcaagatccttatcgccttcctggacctccaggaaaaccaaaagttttggcacgcaccaaaggatcaatgctagtgagctggactcctcctttggacaatggtggctctccaattactggctactggctggagaaaagagaagagggaagtccttattggtcacgtgttagccgagcaccaataaccaaagtgggattgaaaggcgtggaatttaatgttcctcgtttgcttgaaggcgttaaataccagttcagagccatggcaataaatgctgcaggaattggtcctcccagtgaaccatcagatccagaggttgcaggagatcccatatttccaccggggccaccttcttgcccagaagttaaagataaaacgaagtcaagcatctcactaggatggaaacctccagccaaagatggtggcagcccaatcaaaggatacattgtagaaatgcaagaagaaggtactactgactggaaaagagtaaatgaaccagacaaacttataactacctgtgaatgtgtggtgcctaatctgaaagagctcaggaagtacagattcagagtgaaagctgtcaatgaagctggtgaatctgaaccaagtgatacaactggggagatccctgccactgatattcaagaggaaccagaagttttcattgacattggagcacaggactgtctggtttgtaaagctggctcacagattaggattcctgctgtcatcaagggacgcccaacaccaaaatcatcttgggaatttgatggaaaggcaaagaaagcaatgaaggatggagttcatgacatacccgaagatgcacagctggagactgctgaaaactcctcagtaattattattccggagtgtaaacgatctcatacaggcaaatacagcatcacagccaagaataaagcaggacaaaagactgcaaattgcagagttaaagtcatggatgtaccaggcccacccaaagatctgaaagtcagtgatatcacaaggggtagttgcagactttcatggaagatgccagacgacgatggaggagacaggatcaaaggctatgttattgagaagaggactattgatggaaaagcctggaccaaagtcaatccagactgtggaagcaccacatttgtagtgcctgatctcctctctgaacagcaatatttcttccgtgtgcgagcagaaaaccgttttggtattggcccacctgtggaaaccattcagaggaccactgccagagatccgatatatcctcctgatcctcctattaaactcaagattggcctcatcacaaagaacacagtgcatctgtcatggaaacccccgaagaatgatgggggctcccctgttacccactatattgttgagtgccttgcatgggaccctactgggacaaagaaagaagcctggaggcagtgcaataagcgtgatgtggaagaactgcaatttactgttgaagacctagtagagggtggggaatatgaattccgagtcaaagctgtcaatgctgcaggagtcagcaagccttcagccactgttggccctgtgactgtcaaagaccagacatgcccaccatcaattgatctaaaagaattcatggaggttgaagaaggaaccaatgttaacattgtggccaaaattaaaggtgtgccattcccgacactaacctggtttaaagctcctccaaagaagcctgataacaaagaacctgttctctatgacacccatgtcaacaaactggtggtagatgatacttgcactttagttattccgcagtctcgcaggagtgacactggcttatataccatcacagctgtaaataatctgggaacagcatcaaaggagatgagactgaatgtcctgggtcgtcctggccctccagtgggacccataaaatttgaatctgtttcagcagatcaaatgacactatcttggtttccacctaaagatgatggtgggtctaagattacaaactatgtaattgagaaaagagaagctaacaggaagacatgggtccatgtctccagtgaacctaaggagtgcacgtacacgattcccaaattgctagaaggccatgaatatgtattccgaatcatggcccagaataaatatggcattggagaacctcttgacagtgaacctgaaacagcaagaaacctcttctctgtccctggagcaccagataaaccaacagttagcagcgtgactcgtaactccatgactgtcaactgggaagagccagaatatgatggaggctctcctgtgacagggtactggctggaaatgaaagacaccacttcaaagagatggaagagagttaaccgagatcctatcaaagccatgactttgggtgtttcttataaagtgactggtcttattgaaggttccgactatcaattccgggtatatgcaatcaatgctgctggcgtgggtccagcaagtctgccatcagacccagcgactgctagagatccaattgcccctcctggtcctccatttcccaaagtgacagattggactaaatcatctgcagatctggagtggtctcccccactaaaagatggtggatccaaagtaactggatacatcgttgaatataaagaagaaggaaaagaagaatgggaaaagggtaaagataaagaagtgagaggaacaaagcttgttgtgacaggattaaaggaaggagcattctacaaatttagagttagagcagtcaacattgctggcattggagaacctggagaggtcacagatgtcattgaaatgaaggacagacttgtttcacctgaccttcagctagatgccagtgtcagagatagaattgttgtccatgctggaggggtgatccgaatcattgcctatgtgtctggaaagcctcctccaaccgtcacctggaacatgaatgaaagaaccttacctcaagaagccaccattgagaccacagccattagctcatccatggtcatcaagaactgccagaggagccatcaaggcgtctattctcttcttgccaaaaatgaagccggagaaagaaagaagacaattattgttgatgtattagatgttccaggtcccgttggaacaccattcctagctcacaacctaaccaatgagtcctgcaaactgacatggttttctccagaagatgatggaggctctccaatcaccaattatgtcattgaaaagcgtgaatctgaccgcagagcatggaccccagtgacatatacagttacccgacaaaatgctactgtccagggtctcattcaaggaaaagcctactttttccgaattgcggctgaaaatagtattggcatgggtccatttgttgagacatcagaggcacttgttatcagagagccaataactgtaccagagcgtcctgaagacctggaagtcaaagaagttactaaaaatactgtaactttgacttggaatcctcctaagtatgatggtgggtcagaaattattaactatgtcctagaaagtcggctcattgggactgagaagttccacaaagttacaaatgacaacttgcttagcagaaaatacactgttaaaggcttaaaagaaggtgatacctatgagtaccgtgtcagtgctgtcaacattgttggacaaggcaaaccatcattttgcaccaaaccaattacttgcaaggatgagctggcacccccaacgcttcacctcgacttcagagataagctcacgattcgagttggtgaagcttttgccctcactggccgttactcaggcaaaccaaagcctaaggtttcctggttcaaagatgaagctgatgtgctggaagatgatcgcactcatataaagactacaccagcaacacttgctttagagaagatcaaggccaaacgttcagattccggcaaatactgtgtggttgtggagaacagtacaggctctaggaaaggtttctgtcaagttaatgttgttgaccgtcctggaccaccagtaggaccagttagttttgatgaggtgaccaaagattacatggttatctcttggaagcctcctttagatgatggaggcagtaaaatcaccaattatattattgagaagaaggaagtgggtaaagacgtctggatgccagtgacatctgcaagtgctaaaacaacatgcaaagtttctaaactacttgaaggaaaagattatattttccggatacatgctgaaaatctgtatggaataagtgatcctctggtgtctgattcaatgaaagccaaagatcgtttcagggttcctgatgcacctgatcagccaattgttacagaagttaccaaagactctgcattagtaacctggaataagccacatgatggaggaaaacccatcacaaactacatcctggaaaagagagaaactatgtctaaacgatgggctagagttaccaaagatcctattcatccatacactaaatttagggttcctgatcttctagaaggatgtcagtatgaattccgggtttctgcagaaaatgaaattggtattggagatccaagcccaccatccaaaccagtctttgctaaagatccaattgctaaaccaagtccacctgttaatcctgaagcaatagatacaacatgcaattcagtcgatctaacttggcagccaccacgtcatgatggtgggagcaagattctgggttatattgttgagtaccagaaagttggagatgaagagtggagaagagccaatcacacccctgagtcatgtcctgaaactaaatataaagtcaccggtcttcgggacggtcaaacctataagtttagagtgttagcagtcaatgcagctggtgaatcagatccagctcatgttccggagccagtcctagtaaaagacaggcttgaaccccctgagttgattc

SEQ ID NO: 191428 - DNA, 18218 bp, Homo sapiens
  Payload ID: 17810
  Gene Name: titin
  Uniprot ID: Q8WZ42
  ENST ID: ENST00000360870
  CDS Start-End: 224-17038
gcagtcgtgcattcccagcctcgcctcgggtgtagggattgcatagaaaagcaaaactacacagtcttgactgtgtagttttgtttttaggattagaggctcaccgattcatgtcggagatggtcagaaaaaccaactctccataggacgtcgtttcagaagcaaccttgggcttagtcccaccctttttaggcactcttgagaaatcagagtgcctagaaagatgacaactcaagcaccgacgtttacgcagccgttacaaagcgttgtggtactggagggtagtaccgcaacctttgaggctcacattagtggttttccagttcctgaggtgagctggtttagggatggccaggtgatttccacttccactctgcccggcgtgcagatctcctttagcgatggccgcgctaaactgacgatccccgccgtgactaaagccaacagtggacgatattccctgaaagccaccaatggatctggacaagcgactagtactgctgagcttctcgtgaaagctgagacagcaccacccaacttcgttcaacgactgcagagcatgaccgtgagacaaggaagccaagtgagactccaagtgagagtgactggaatccctacacctgtggtgaagttctaccgggatggagccgaaatccagagctcccttgatttccaaatttcacaagaaggcgacctctacagcttactgattgcagaagcataccctgaggactcagggacctattcagtaaatgccaccaatagcgttggaagagctacttcgactgctgaattactggttcaaggtgaagaagaagtacctgctaaaaagacaaagacaattgtttcgactgctcagatctcagaatcaagacaaacccgaattgaaaagaagattgaagcccactttgatgccagatcaattgcaacagttgagatggtcatagatggtgccgctgggcaacagctgccacataaaacacctcccaggattcctccgaagccaaagtcaagatccccaacaccaccgtctattgctgccaaagcacagctggctcggcagcagtccccatcgcccataagacactccccttccccggtcagacacgtgcgggcaccgaccccatctccggtcaggtccgtgtctccagcagcaagaatctccacatcccccatcaggtctgttaggtctccattgctcatgcgtaagactcaggcatccaccgtggccacaggtcctgaagtgcctcccccttggaagcaagagggctacgtggcctcctcatctgaggctgagatgagagagacaacgctgacaacctctactcagatcaggacagaagagagatgggaagggagatacggtgtccaggagcaagtgaccatcagtggtgctgcgggtgctgccgccagtgtgtcggccagtgctagctacgcagcagaggctgttgccactggtgctaaagaggtgaaacaagatgctgacaaaagtgcagctgttgcgactgttgttgctgccgttgatatggccagagtgagagaaccagtgatcagcgctgtagagcagactgctcagaggacaaccacgactgctgtgcacatccaacctgctcaagaacaggtaagaaaggaagcggagaagactgctgtaactaaggtagtagtggccgccgataaagccaaggaacaagaattaaaatcaagaaccaaagaagtaattaccacaaagcaagagcagatgcacgtaactcatgagcagataagaaaagaaactgaaaaaacatttgtaccaaaggtagtaatttccgcagctaaagccaaagaacaagaaactagaatttctgaagaaattactaagaaacagaaacaagtaactcaagaagcaataagacaggaaactgagataactgctgcatccatggtggtagttgccactgcaaagtccacaaaactagaaacagtcccgggagctcaagaagaaactaccacacaacaagatcaaatgcacctaagttatgaaaagataatgaaggaaactaggaaaacagttgtacctaaagtcatagttgccacacccaaagtcaaagaacaagatttagtatcaagaggtagagaaggcattactaccaaaagagaacaagtgcaaataactcaggagaagatgagaaaggaagccgagaaaactgccttgtctacaatagcagttgctactgctaaagccaaagaacaagaaacaatactgagaactagagaaactatggctactagacaagaacaaatccaagttacccatggaaaggtggacgttggaaaaaaggctgaagctgtagcaacagttgttgctgcagtagaccaggcccgagtcagagagcccagagagcctgggcatcttgaagaatcctatgctcagcagaccactttggagtacggatataaggaacgcatttccgccgcaaaggtagctgagcctccccaacgtccagcctcagaaccccacgttgtccctaaagcagtcaagcctagagtaatccaggctccttctgagactcatatcaaaactactgatcaaaagggaatgcacatatcatcacagatcaagaaaactacagatctaacaacggaaagattagtccatgtggataaacgcccccgcacagctagccctcactttactgtttcaaaaatttctgttcctaagacagaacatggatatgaggcatcaatagccggtagtgctattgccacattacaaaaagagttgtcagccacatcttctgctcagaagatcaccaaatcggtgaaggctcctactgtgaagcccagtgagactagagtaagggcagagcccacacccttgccacagttccccttcgctgacacaccagatacttacaagagtgaagctggcgttgaggtgaaaaaggaagtaggggtgagcatcactggcaccaccgtccgtgaagagcgctttgaagtactgcacggacgcgaagccaaggtaacagaaacagcaagagtaccagcacctgttgaaattcctgttactccaccaactttggtctcgggcttaaaaaatgtgactgtcatagaaggtgaatctgtcaccttggagtgccacatctctggatacccatccccgacagtgacatggtacagggaagactaccaaatcgaaagttccattgacttccagataaccttccagagtggaattgctcgtcttatgattcgcgaagcatttgcggaagacagcgggcgatttacttgcagtgctgtaaatgaggctggaaccgtcagcacatcctgctatctggctgtgcaggtgtcagaagaatttgaaaaggaaaccacagccgtgactgagaaatttactacagaagagaaacgctttgttgagtcaagagatgtggttatgactgatactagcctcacagaggaacaagcagggcctggagaacctgccgcgccttactttattacaaaaccagtggtccagaaactggtggaaggtgggagcgtggtgtttggatgccaagttggcggcaacccaaagccccatgtatactggaaaaaatctggtgttcctctaaccactggatacagatacaaagtgagttacaacaaacaaaccggtgaatgcaagctggtgatttctatgacttttgctgatgatgctggagaatacactattgttgttcgcaataagcatggagaaacttctgcatctgcttccttgcttgaagaagctgattatgagttactgatgaagtcccagcaagaaatgctttatcagacacaagtgactgcatttgttcaagaacctaaagttggagaaacagcacctggatttgtatactctgagtatgaaaaagagtatgaaaaagaacaagccttaattaggaagaaaatggccaaagatactgtagtggtcagaacttatgtagaagatcaggaattccatatttcttcctttgaagagagacttattaaagaaattgaatatagaataataaagactacattagaagaacttcttgaagaagatggagaagaaaagatggcagttgacatttctgaatctgaagctgttgaatcaggatttgattcaagaatcaagaattatagaattcttgaggggatgggtgtcacttttcattgcaagatgtctggatatccattaccaaagattgcttggtacaaagatggcaagcgcatcaaacatggagaaagataccaaatggactttctacaagatggcagagctagtctgcgtatacctgttgttcttccagaagatgaaggaatctacactgcatttgccagcaatattaaaggaaatgcaatttgctcagggaaattgtatgtggagcctgctgcaccacttggagctccgacttacattcccacactagagccagtgagcagaatcagatctctctctccacgttcagtgagcaggtctcctatacgcatgtctcctgcacggatgtcacctgcaaggatgtctcctgcacggatgtcccctgcaagaatgtcccctggacgtaggctggaggagacagatgagtcacaacttgagagactatataaaccagtctttgtgttaaaacctgtttctttcaaatgtttagaagggcaaactgccagatttgacttaaaggttgttggtagacctatgccagagacgttctggtttcatgatggccagcaaattgtcaatgactatacccataaagtagtcattaaagaagatggtactcaatcactaattattgtccctgccacacccagtgattctggggaatggactgtggttgcccaaaacagggcaggcagatcttcaatttcagtgattttaactgtggaagctgtggaacatcaggtaaaaccgatgtttgtagaaaaactgaaaaatgtcaatataaaggaaggttcccgacttgaaatgaaagtcagagctacgggtaaccccaaccctgacattgtatggttgaaaaacagtgacatcattgtgcctcataaatatcccaaaatcagaattgaaggaaccaagggagaagctgcccttaaaatcgattccactgtcagccaagattctgcctggtatactgcgactgctattaataaagctggcagagacactacaagatgcaaagtaaatgttgaagttgagtttgcagagcctgagccagagagaaagttaatcatcccacgggggacatatagagcaaaggagattgcagccccagaactggagcccctccatttgcgatatggccaagagcaatgggaagaaggtgatctctatgacaaagagaaacaacagaaaccatttttcaagaaaaaactcacttccttaagacttaagcgctttgggcctgcccactttgaatgcaggctaacacccattggtgacccaacgatggtggtggagtggctccatgatggaaagccacttgaagcagccaacaggctccgtatgatcaatgaatttgggtactgcagccttgattatggcgttgcatattctagagacagtggtatcattacttgcagagccactaacaaatatggaacagatcacacatctgctacccttattgttaaagatgagaaaagtcttgtggaagaatcccaattgcctgaggggaggaaaggcttacagagaattgaagaattagagagaatggctcatgaaggtgcacttacaggtgtaacaacagatcagaaagaaaagcaaaagccagacattgtcttgtacccagagccagttagagtacttgaaggggagactgcaaggttccgctgcagggtaacaggctaccctcagcccaaagtcaactggtacctcaatggacagctcatccgcaaaagcaaaaggttcagagttcgctatgatggtatccattacctggacatcgtggactgcaaatcatatgacacaggtgaagtgaaggtcaccgcggaaaatcctgaaggtgtgatagagcataaagtgaagcttgagattcaacagagggaagattttaggtctgtccttaggagagctcctgaaccaaggcctgagtttcacgtacatgaaccaggaaagcttcagtttgaagtacaaaaagtggatagacctgttgacaccactgaaaccaaagaagttgtgaagttgaaaagggctgaaagaattacccatgaaaaagtgcctgaagagtcggaagagctgcgcagtaaattcaagcgcagaacagaagagggctattatgaagccattaccgctgtggagctcaagtctcgaaagaaggatgaatcctatgaggaactcctcaggaagacaaaagatgaacttctccactggaccaaagagttaactgaagaggaaaagaaagctcttgccgaagaaggcaaaatcacgattccaacttttaaacctgacaagattgaactaagtcctagtatggaggctccaaaaatcttcgaaagaatccagagccaaacagtgggccaaggatctgatgcacacttccgggtcagagtcgtggggaaaccagaccccgaatgtgaatggtacaaaaatggtgtcaaaattgaacggtctgaccggatctactggtactggcccgaagacaatgtttgtgaattggtcataagagatgtgactgctgaggactctgccagcatcatggtaaaagccatcaacatagctggagaaacctccagtcacgcattcttacttgtccaagccaagcaattgatcactttcacacaggaattacaagatgttgttgctaaggaaaaagacactatggcaacctttgaatgtgaaacttcagaaccatttgtcaaagtgaaatggtataaagatggtatggaggttcatgagggagataaatacaggatgcactctgacagaaaggttcacttcctctccatactgaccattgatacgtctgatgctgaagattacagctgtgtacttgtggaagatgaaaatgtcaaaacgactgctaaacttattgttgaaggtgcagttgttgagtttgtgaaagaacttcaggacatagaagttccagaatcatattcaggagaattagagtgcattgtatccccagaaaatatagaaggaaaatggtatcataatgatgtggagcttaaatccaatggcaaatatacaattacatctcgtcgtggacgtcagaacctcacggtcaaggatgtaaccaaggaggaccagggagaatacagctttgtcatcgacgggaaaaagacaacctgtaaattaaagatgaaaccccgccccattgctatcctacaaggacttagtgaccaaaaagtctgtgagggtgacattgttcagcttgaagttaaagtctccttggaaagtgtggaaggcgtctggatgaaagacggccaagaagtgcagcccagtgacagggttcacattgtgatagacaaacaatctcatatgctgctcattgaagacatgactaaggaagatgctggaaattactctttcaccattccagcccttggcctctccaccagtgggcgtgtctctgtctatagtgtggacgtgataacacctctaaaagatgttaatgtgattgaaggcaccaaggctgtgcttgaatgtaaggtgtcagtccctgatgtgacttctgttaagtggtacttaaatgatgaacaaatcaagcctgatgaccgtgtacaggccattgtgaaaggtactaaacagcgactagtcattaaccgaactcatgcttcagacgaaggaccttacaagctgatagttggcagagttgaaaccaactgtaatctctctgtagaaaaaattaaaattatcagaggtcttcgtgaccttacctgtacagaaactcaaaatgtggtgtttgaggttgagctgtcccactctggaattgatgtcctgtggaattttaaggacaaggaaatcaagcccagttctaaatataaaattgaagcacatggaaaaatatataaattgacagttctaaatatgatgaaagatgatgaaggaaaatacacattttacgcgggagaaaatatgacatctggaaaacttactgtggcaggtggggccatctccaagccactcacagatcagaccgtagctgaatcccaggaagctgtgtttgaatgtgaagttgccaacccagattccaaaggcgaatggttgagggatggcaaacacctaccactgactaacaacatcagaagtgagtctgatggccacaaaaggagacttatcattgctgccaccaaattagatgacattggagaatatacctacaaggtggccacctccaaaacatctgccaaactcaaagttgaagctgtcaaaattaagaagactctgaagaacctcacagtgacagaaacacaggatgctgttttcactgtcgagcttacacaccctaatgtcaaaggtgtccagtggatcaaaaatggagttgtgctggaatccaatgaaaagtatgctatctctgtcaaaggaacaatttactctctgaggattaaaaactgtgccatcgtggatgagtctgtttatggcttcaggcttggaaggcttggagccagtgccagactgcacgtggagactgtcaagatcattaaaaagccaaaggatgtgacagccttggaaaatgccactgttgcctttgaagttagtgtttcccatgacactgttccagtaaaatggttccataagagtgtggaaattaagccaagtgacaaacacagactggtctcagaaaggaaagtccacaagctgatgctgcagaacatctccccctcagatgctggggaatacacagctgtggtcgggcaattggaatgcaaagcaaaactgtttgtggagacattacatattacaaaaaccatgaaaaatatcgaggtgcctgagaccaaaactgcctcttttgagtgtgaggtgtcccacttcaatgtcccttccatgtggctgaagaatggtgtggaaattgagatgagtgaaaagttcaagatagttgtgcagggaaaactccatcagctgatcatcatgaacaccagcacagaggactcggcagaatacacatttgtctgtggcaatgaccaagtcagtgccaccctgacagtcaccccaatcatgattacttccatgctgaaagacatcaacgctgaagaaaaagacactattacttttgaggtgacagtgaactatgaaggcatctcttacaaatggttaaagaatggtgtggaaatcaaatcaactgacaagtgccagatgagaaccaaaaagctcacacactcactgaacatcaggaatgttcactttggggatgctgctgactacacctttgtggctggaaaagcaacatcaacagccacactttatgtggaagctcgtcatatagaatttaggaaacacattaaggacattaaggtactggagaagaagcgagccatgtttgaatgtgaagtttctgaacctgacatcactgtacagtggatgaaagatgaccaggaactgcagatcacagacagaataaagattcagaaggagaaatatgtccaccgccttctgatcccatccacccggatgtctgatgctgggaagtacacagtggtggcaggaggcaacgtgtcaactgcaaaactctttgtagaaggcagagatgttcgcatccgaagtattaaaaaggaggttcaggtcattgagaaacagcgtgctgttgttgaatttgaggtcaatgaagacgatgttgatgcccactggtataaagatggcattgaaatcaatttccaagttcaagaacgacacaaatatgtagtggaaagaagaatccaccgaatgtttatctctgagaccagacagagcgatgcaggagaatacacctttgtggcaggaaggaacaggagttctgtcactctctatgtcaatgctcctgaaccgccccaagttctgcaggagctccagcctgtcactgtgcagtctggcaagcctgcccgcttctgtgccgtgatatccggaagaccacagcccaaaatttcctggtacaaggaagagcagctgctttccactggcttcaagtgcaaatttcttcatgatgggcaagaatacacgcttttgctaattgaagccttcccagaggatgcggcagtctatacctgtgaagccaagaatgactatggtgttgccacaacatcagcttcactctcagtggaagttccagaagttgtgtctcctgatcaggaaatgcctgtttatccacctgccatcatcaccccgcttcaggacactgtcacttctgaagggcagccagcccgttttcaatgccgggtttctggaacagatctaaaagtgtcgtggtacagcaaagacaagaaaatcaagccatctcggttctttagaatgactcaatttgaagacacttatcaactggaaattgccgaagcttatccagaagatgaaggaacttacacgtttgttgctagtaatgctgtaggccaagtatcaagcacagccaacctgagtctggaagctcctgaatcaattttgcatgagaggattgaacaagagattgagatggaaatgaaagaattattctctgagggggaatctgaacattcagaaagggatacacgtgacgccttttcagattctgaagacatagaccacaaatccatggctgctaaaagatatgcaagtagaatatcatctacaagctcctggcctgaatattttaagccttcttttacccagaaacttacatttaaatatgttttagagggtgaaccggttgtttttacatgtagattaattgcctgtccaactccagaaatgacttggtttcataacaatcggcccatcccaacaggtcttcgtcggattataaaagctgagagtgatttacaccatcactcttccagcttagagattaaaagggtccaagacagagattctggaagttataggttactagcaattaatagtgaagggtctgcagaatcaactgcatcattgcttgttatccaaaaagggcaagatgagaaatatttagaatttctgaaaagagcagaacggacacatgaaaatgtggaggctttagttgaaaggggagaagataggataaaggttgacctgaggtttactggctctccctttaacaaaaaacaagatgtggaacaaaagggaatgatgagaactatacattttaagacaatgagttctgccaagaaaacagattacatgtatgatgaagaatatttagaaagtaaatctgacataagaggttggcttaatgtaggtgaaagtttcctggacaaggagaccaaagtgaagttgcaacgtttaagggaggctagaaaaacattaatggagaaaaagaaattatctcttttagatacgtcttctgaaataagctcaagaactttgagaagtgaagctagtgataaagatattctgttctctagagaggacatgaaaatcagatctatgtctgatctagctgaaagttataaggtagatcattcagctgagagtattgtgcaaaatccacatgccctttctaatcaaatggatcaaaatatagaatctgaggaacttcccacaagctttcaaactattgttgatgaagaaattttccagactgaaataagaatgagccaagaagcactggtaaaggaaagtctaccaaaagaccatttatatggtgaaattctagtaaatgaaaatacccaagcaagaggacagctggaagaaattatggccaatactacaattggagagtcatccacatatatcactaatgtatgtgagaaggaggaagtatatgagactcctgaaaatgtgtctcaagctattacaccacatgccagcgaatcttttggtacacttgtaaatgttgaagaaagtgaagaaatagctagtgaaagaataaaaaaggatgatttgagagaattacaactctctgcttctacacgaattgatgaattcaaaaccgaacagaaggaagaaaacatgagattttttgaaaattcttttcgaaaacgcccacaacgttgcccaccttcatttcttcaagaaattgaatctcaagaagtttatgaaggtgacagttgtaattttgtgtgtcattttcaaggatatcctcaacctatagtgacgtggtataacaatgacatgccaatcccacgtaatcaaaactttatcattcattcgttggaaaactattcaatattaactctttcatctgttcatcatcagaatgaaggttctattacttgtgtgctatttaaccaatatggaacagtaaaaacaaccagtatgcttaaagtgaaagcaaaacaaaaacatgatgtcaaagcacataaagtcccagtgttccatgactacttggatgaggaagaagagttagcattggtgtttgaccaagcaaaaggcgcccatccatctatgagtcaagagggccaaacaaatcttcatttgttaaaaactaacccaccagttcctccctctggagacacagaattgctttcctttcctgtagaaattcaggtaacagcagctactcctatcccagaacaggataaagagtctaaagaagtgtttcaaactgaggagctggaacctaaagcaatgcctcaagatcaagttactcaatcaccaaaacacagatttgtatttttgtctgatattactaatgaaccaccaaaaatgttacaagaaatgccaaagcatgccaggtgtagagaaggggattccatcattcttgaatgtttaatatctggtgagccccagccagttgtaacatggtttcaaaatggagtccttttaaagcagaaccagaagtttcagtttgaagaagttaattgtagccaccaattatatattaaggatgttaattctcaagattctggaaaatataaatgtgttgctgaaaacaattcaggggcagttgaaagtgtttcagatctaacagtggagcctgtcacttatagagaaaatagtcaattcgaaaatattggtgaaatttatggaaaatattccagagatcagcaactgcaagaccagggagaatctgtaagggcacatttttatgattatccagctggtccctttactccctggacaaatgtaaaagaatattcagtaagggactattttcaaagccttgagactattgagcaaatagaccagaaagagcaggtgcgttgcataccttctagagaaaaaattcccagatttgtgcatggtgcttcaagaaccataaaaatcagcaagcccatcagggctgaattcatacaatgtcaggctgaagggaaagagagacatgtaagtgaaaaatcaaagctgcaccaagcagagggtactgtttatccatttgttgatgatttcagtgatgtcactattaagaaagaaataagaaataattttggaaaacttggtagatcagaaaaggaaaatgtacaagaatgtgcccaaagtgactatttaccaaatattcactctgagagaatttctgacagttacaatacaaaagattcatctgccattgtatatgaagaatcccttggtgaagagatacactacccggggaaaaaggtgaagcatagaattatcgaatttgaaaaattacatgtagaaaaaggagttctagaaaaaagacctaccagaacatcaattgttaatcctcctcaaaagaagattgatgacaaagccttttcattaaagcaaagagaatcaagatcaagcaatctaaatgcaaatatgtatcaggcagagaaaatgtctccaaatactgaatcagattcatctaacattgcaataaatttaaagctgctttcctctcaaactcataaagaatttgacgcacaagaaagggaacaacaggaaaaaataagtcttatagataaacctgcaatttctaaaagagctgaacatgaatcacctattacatttgacttaaagcagtttcacactcaaataaaacacacagatgtgaaattccaagaattagatagtggtcaaccagaagaagcttattttaaaatccaacatcctgctgacactgagaacattgtatttgatctaaaacaaatgtattctcatataggagatccagctctggagttccaagggcaagaaactagggaacagcaggaaatacattataaagaaaaaattcctagccctgaaacgttacaacctgacacacacaatatctctaaaagtgtgcaaaataatgtatttgccagtcaagaaatttcttccagtcaagagctttcaaatagaactatggtggagaaaagtagtattgatgaaaattccatttctttagaaaaagaagtccgacatgtacaggaacaaaacttagacattttaaaaactgatctttctcttaaatccttttctgaagaaatctatagtgaatcatgtgccctacttccaacctcatctgcagatatagaagaaactgatctttctgagaaaagttgtcctctagaaaatggaggcagaagttccatctcacatttgaaaaaagcagcaagtgaggaaaagcctttaggggttggtgaaatggaagaagaatgcactctagaaccagagttggcagcatttccaaagcaggatggtgggacacaggaatatacagatgccactttggaagaccacagaggtgatgttcaggaagctgacacactccatagacagctctccctgagtcagtgcttcccactcttgatgactgaagaacaacagaatccaggtgaacaaataagtacaaacattcatgcctctggagaagaaaaatgttatgaagaagttcaagttcagaatgaagcttctttctccactttagaaggagaaatgatagaaactagtttttctcaaaatattcctaaattagatgaggcacataccactgaggcagcagaatctgagacctccctaacacaatatttacttgctgctggaaagcgtgaggttcctgaaactaaagacaccagagaccaggcaaagcttgtccagagtgaatcaatcacttcaatggaggtggaagaagtaactttcaacactgtgtatgaatactacaaccagaaacaggaatcactaggtcgtccactttctcctgagtctgacatttccattggtgtgggaagtacaaccagtgaagaaatatctgagttagatcagttttataccccaccatcatctgttgaatattttgaatctccaaagtcccctgacttatattttaatccttcagatataactaaacaatcctcaatacattcaggaggtgagacagttgaaagatattccacacctttaggggaagttgctgaaagatattcaacaccttccgaaggtgaggtaggagaaagatactccacacccccaggggagacactagagagatactccacacctccaggagagactctagagagatactccacacccccaggagagactctagagagatattccacacccccaggagagactctggagagatactccacacccccaggagagactctagagcgatattccacacccccaggggaggcactagagagatattctattcctactggaggaccaaaccccactggtacttttaaaacatatccatcaaaaatagaaagggaagacggtacaccaaatgagcatttctacacacctacagaagagaggggttcagcttatgaaatatggcgttccgattcatttggtacacccaatgaagccattgagccaaaagacaatgaaatgcctccatcttttattgaacctctgaccaaaaggaaggtatatgaaaacacaacactaggcttcattgttgaagttgaaggtcttccagttcctggtgtgaaatggtatcgaaataaatctttactagagccagatgaaagaatcaaaatggaaagagtgggtaatgtgtgttcactggaaatttctaacattcaaaaaggagaagggggagagtacatgtgtcatgctgtaaacatcataggggaagcaaagagctttgcaaatgtagacataatgccccaggaagaaagagtggtggcactaccacctccagtaacacatcagcatgtcatggagtttgatttggaacacaccacatcatcaagaacaccttctcctcaagaaattgtcctggaagttgaattaagtgaaaaagacgttaaagaatttgagaagcaggtgaaaatagtgacagttcccgaatttactcctgaccataaaagtatgattgtgagtctagatgttcttccatttaattttgtagatccaaatatggattcaagggagggagaagacaaagaactaaaaattgatttagaagtatttgaaatgcctcctcgctttataatgcctatttgtgattttaaaattccagaaaattcagatgctgtattcaaatgttcagtcatagggatcccgactcccgaagttaagtggtataaagaatatatgtgtattgagccagataatattaaatacgtgattagcgaggagaagggaagtcacactcttaaaattcgaaatgtctgtctttctgatagtgcaacatacaggtgcagagctgtgaattgtgtaggagaggctatctgtcggggattcctcaccatgggagattctgaaatatttgctgtgatagcaaagaaaagcaaagtgactttaagcagtttaatggaagaattggtcttaaagagcaactacacagacagtttttttgaatttcaggtggtggaagggcctcccaggtttatcaaaggtatttctgactgttatgcaccaataggtacagcagcatattttcagtgcttagttcgtggctctccaagacccacggtttactggtacaaagatggaaaattagtccaaggaagaaggttcactgttgaggaaagtggcacagggttccataacctgtttataacaagcttagtaaagagtgatgaaggagagtataggtgtgtagctacaaacaaatcaggaatggctgagagctttgcagcactcaccttaacttaaaatgtaatgttttagtgcctcagtaattattagcattgatctgagtgctttcatattttccaaattatgtggatctaataaacttccaaacaggtccaccatatttgaattcattaccttggagacccctaaagaaataatctctatgtagaaatctcatctttgtaatacatgtaaatattttgttatctgaactgtggaatcatcacttgtgtcaatcatgctgtgtaatatcaaacacaattaaatctctccttggctacctaattgtttgtacttctatttaccctcatgcctcctccacaaagtgtttcagtggaatggactctcttttagcagataaaccatatatgcaaaagtacaatgtaaaagtggagaccatatcagatgaccacgcagacaaattggtaagggcaaatctctctgctcccattctaagttatttttggaattttaacccctttgcatccaaactcatgtttatttactttgacttagaataggcaaaacaaacaacaaaaaccagcttctcccaattggcaactaactctataatctgtttgacatttcaatcttaatatattaacttcatctcttttaaaaatgttttcgttattaatattcctcttcataagtgctttaattctcactggcttcaagggaccaattgtgctctttgtgggcagggttcacctagacatttgcaaaataagcaaatagatctttccacttttggagataccttatttttctccatttttgagatgacatcaagtgtaaaatgcagcaataatttagtattggcctggggaaaaaagggaaactatcatattgtgtttacatatagattttaaaactgtattctgatttcagaatctttaaaatttaaaaaaaggtgggatatttttagaattgagacaatatggtaatttgtatttcagattatatataaataacaagataacaagctttcctatcagtttcactgaatttcatctttaaaacgaatatagcttaataagcattcaatttttattgtgatgtttatgtttctaaagtaactctttaattttgtcttttaaaattaaaataacagtaaattaacatactccttaatatcttacctatatactaatgtggacccaagtcttctcatataagactcgacaaatataaaaaa

SEQ ID NO: 191429 - DNA, 766 bp, Homo sapiens
  Payload ID: 17810
  Gene Name: titin
  ENST ID: ENST00000426232
  CDS Start-End: 1-766
ggaggttgttcctgaaaagaaggtgcctctggtggttcccaaaaagccagaagccccacctgctaaagtgcctgaagttccaaaagaagttgttccagaaaagaaagtagctgttcccaaaaagccagaagtcccaccagcaaaagtgccagaagtgccaaagaaacctgtcttggaagagaaaccagctgttcctgttccagaaagagcggagtctcctcccccagaagtatatgaagaacctgaggaaattgctcctgaagaggaaattgctcctgaagaggaaaagccagttcctgttgcagaagaggaggaaccagaggttccacctccagcagtgcctgaagagcccaagaagatcatcccagagaagaaagttcctgtcatcaaaaaaccagaagcaccgcctcctaaagaacctgaacctgaaaaggttattgagaagccaaaactcaaaccaagacccccacctcctccacctgctccacctaaggaagatgtgaaggagaaaatattccaacttaaagctattccaaagaagaaagttcctgaaaaacctcaggttccagaaaaagtggagcttacacctctgaaagtaccagaaccaccacctccaaaacctgttgaagaggttgaagtacctactgttacaaaaagggaaaggaagattcctgaaccaacaaaagtgcctgaaatcaagccagcaatacctctccctgcacctgaaccgaaaccaaagcccgaagcagaagtgaaaacaatcaaa

SEQ ID NO: 191430 - DNA, 635 bp, Homo sapiens
  Payload ID: 17810
  Gene Name: titin
  ENST ID: ENST00000412264
  CDS Start-End: 490-635
gttccagttctgctgagacacaacttcccctgggaagcctcctgacccatcaagtccagagtagatggtcctgccatgtgcactgtcagcacctgcactgcccagccacgcccctgaatatacacaaaggaatcgcagatcaagagagaaaaaatagaaggaaattgtaattacaggattgctgagctgggctttctccaataataacatgatcaaaataaaataaaagaagtccttttggcctctgacatcacatcctggagtggatgatttaccagttggtcatctgctgtgctgcaggaatgaatgtagctactgtggtatgaagcaaaattctaacgttcctagaaagtgttagacctgtcaacctccaggaaggatgagatctgcttccacactgcacagtgtccagaagatcaggaccatgtgtcacttggttcaaagatgacttctaagtggtacctggagatactgaaagtgcctagaaagatgacaactcaagcaccgacgtttacgcagccgttacaaagcgttgtggtactggagggtagtaccgcaacctttgaggctcacattagtggttttccagttcctgaggtgagctggtttagggatggccaggtgatttccacttc

SEQ ID NO: 191431 - DNA, 723 bp, Homo sapiens
  Payload ID: 17810
  Gene Name: titin
  ENST ID: ENST00000425332
  CDS Start-End: 1-723
ccagaggcatttttccagaggtggagccacctgaggctattcctgaaattccagaacatcctccaactgaagagtttgaagtcttcaaggaagtcattccagagggagaaactcctattgttaaaagaagaaaaacaccatcaccaacagcaccagaagctatgaaagaagttgtccctgaaatgaaaatatttgaggatgtacctgaagagccagaaactccacgtatgaaaacgcccgaagctcctcaagaaattattcctgccaagacagttccttccaaaaaaagagaacccccatcagttaaagtgcctgaagctctccaagaaattgtccctgaaaagaaaacgcttgtggttcctctcagaaagcctgaagtccttcctgatgaagtgccggaggctctcagagaagttgtcccggaaaagaaagtgcatcctccccaaagggctgaagttgtacctgtcaaagtgcacgaagctcccaaagagattatccctgaaaagaaagtgtcggtggtgcctcctaaaaagcctgaagtcccacctgttaaagtgccagaagcttccaaagaggttatccgcgaagagaaagtgcccttggctcctcctaaagagcctgaagtcccacctgttaaagtaccagagcctcccaaagaagtagttcctgaaaagaaagcgccagtggctcctcctaaagagcctgaagtcccacctgttaaag

SEQ ID NO: 191432 - DNA, 519 bp, Homo sapiens
  Payload ID: 17810
  Gene Name: titin
  ENST ID: ENST00000448510
  CDS Start-End: 1-519
ccccagctaaagggagaactgtccttgaagaaaaagtatcagttgccttccgccaagaagtagtagtaaaagaaagactagaattagaagtagtagaagcagaagtggaagaaattccggaagaagaagagttccatgaagttgaagaatattttgaagaaggcgagtttcatgaagtagaagaattcatcaaattagaacaacatagagttgaagaagaacacagagttgaaaaagttcatagggtaatagaagtttttgaggctgaagaagtggaagtatttgaaaaaccaaaagctccacctaaagggcctgagatatctgagaaaatcatccctccaaaaaaaccgcccactaaagttgttcctcgaaaagagccaccagctaaagtaccggaggtgcctaagaaaattgtggtagaagaaaaagtacgtgttcctgaagagcccagagttccaccaactaaagcacccgaagtacccaagaaaattgtcccagaagaaaaagttcgtgaagctg

SEQ ID NO: 191433 - DNA, 2887 bp, Homo sapiens
  Payload ID: 17810
  Gene Name: titin
  ENST ID: ENST00000414766
  CDS Start-End: 1-2887
tacaacttcaggaatgatggccgctgccattatatgaccatccacaatgtgaccccagacgatgaaggtgtctactcggtcatcgctcggctggagccaagaggtgaagcaagaagcacggcagagctgtacctaacgacgaaagaaatcaaacttgagctgaagcctcctgatattcctgactccagagttccaatcccaaccatgcctatcagagcagtgccaccagaagaaatccctcctgtggttgctcctcctatcccccttttgctaccaacacccgaagaaaagaaaccaccaccaaaacgtattgaagttaccaaaaaggctgtgaagaaagatgccaaaaaagttgttgcaaagcccaaagagatgacaccacgtgaagagattgtcaagaagcctccacctcctactaccttaattccagcaaaagctcctgaaatcattgatgtatcctctaaagctgaagaagtaaaaataatgactataaccagaaagaaagaggttcagaaagaaaaagaagctgtgtatgagaaaaagcaagcagtccacaaggagaagagagtcttcattgaatctttcgaagaaccttatgacgaactggaggtagaaccatacacagagccatttgaacaaccttattatgaagaaccagatgaagactatgaagagattaaggtagaagctaaaaaagaagttcacgaggaatgggaagaagattttgaagaagggcaagaatactatgaaagggaagaaggctatgacgaaggggaggaagagtgggaagaggcttaccaagaaagggaagtaattcaagttcaaaaggaggtctatgaagaatcacatgagagaaaagttccagccaaagtacctgaaaagaaagcaccaccacctcctaaagttataaagaagccagtaattgaaaaaattgaaaagacttctcgaagaatggaggaagaaaaagttcaagtcaccaaagtacctgaagtttcaaagaagattgttccacaaaaaccttcccggactccagtacaggaagaagttattgaagtgaaagtaccagctgtgcatacaaagaagatggttatttcagaagaaaagatgttctttgcttctcacacagaggaggaggtgtcagtcacagtccccgaggtacaaaaggaaattgttactgaagagaaaattcacgttgccatttccaaaagggttgaaccaccacctaaagtccctgagctacctgagaaaccagctccagaagaagtggcccctgttcctatccctaaaaaagtggagcccccagcaccaaaagttcctgaggttcccaagaaacccgtgccagaggagaaaaagccagttcctgtgcctaagaaggaacctgctgctcccccaaaagtcccagaggtgccaaagaaacctgtccctgaagaaaagattcccgttcctgttgcaaagaaaaaggaagctcccccagctaaagttcctgaagtacagaagggagttgtgacagaagaaaaaataaccattgtaactcaaagagaggaatctccaccaccagcagtgccagaaataccaaagaagaaagttcctgaagaaaggaaacctgttcctcggaaggaggaagaagttccaccaccaccaaaagtgccagctctgcctaagaaacccgtcccagaggagaaagttgcagtgccagttcctgtcgctaagaaagctcctcctccccgagaagtaactataatggaagagaaagaaagggcttataccctagaagaagaagctgtttcagtacaacgggaagaagaatatgaggaatatgaagaatatgattataaagaatttgaggagtatgaaccaacagaagaatatgaccaatatgaagaatacgaggagcgggagtatgaacgatatgaagagcatgaagaatacatcacagaaccagagaagcctatccctgtaaagcctgtcccagaagaaccagttcccacaaaaccaaaggccccaccggctaaagttcctgaagtgcccaagaaacctgtgccagaggagaaagtaccagtaccagttcctaaaaaggtggaagctccacctgccaaagtgccagaggtacccaagaagcctgtgcctgagaagaaggtgccagttcctgctcctaagaaagtggaggctccacctgcaaaagtgccagaggtgcccaagaagctcatcccagaagaaaagaaaccaacacctgttccgaaaaaagtggaagcaccaccacccaaagtgactgaggagcctgaagaagagcctatttcagaagaagaaatcccagaagaaccacctagcatagaggaagttgaagaggtggcaccacctagagtgcctgaagtgattaagaaagcagtacctgaagcacctactcctgttcctaaaaaagtggaggcaccaccagctaaagtgcctggaggtgaaaagaaagttcgcaaattacttccggaacgtaaacctgaaccaaaggaagaagttgttctgaaaagcgttctaagaaaaagacctgaagaagaagaacctaaagtagaacctaaaaaactagaaaaagttaaaaaacctgcagtaccagaaccaccacctccaaaacctgttgaagaggttgaagtacctactgttacaaaaagggaaaggaagattcctgaaccaacaaaagtgcctgaaatcaagccagcaatacctctccctgcacctgaaccgaaaccaaagcccgaagcagaagtgaaaacaatcaaaccacctcctgtggaacctgaaccaacccccatcgctgccccagtaacagtgccagtggttggaaagaaagcaggtgtacccaaaaagactccttcaccaatagaagccgaaaggagaaagt

SEQ ID NO: 191434 - DNA, 641 bp, Homo sapiens
  Payload ID: 17810
  Gene Name: titin
  ENST ID: ENST00000436599
  CDS Start-End: 1-641
gcagcagaggctgttgccactggtgctaaagaggtgaaacaagatgctgacaaaagtgcagctgttgcgactgttgttgctgccgttgatatggccagagtgagagaaccagtgatcagcgctgtagagcagactgctcagaggacaaccacgactgctgtgcacatccaacctgctcaagaacaggtaagaaaggaagcggagaagactgctgtaactaaggtagtagtggccgccgataaagccaaggaacaagaattaaaatcaagaaccaaagaagtaattaccacaaagcaagagcagatgcacgtaactcatgagcagataagaaaagaaactgaaaaaacatttgtaccaaaggtagtaatttccgcagctaaagccaaagaacaagaaactagaatttctgaagaaattactaagaaacagaaacaagtaactcaagaagcaatgagaaaggaagccgagaaaactgccttgtctacaatagcagttgctactgctaaagccaaagaacaagaaacaatactgagaactagagaaactatggctactagacaagaacaaatccaagttacccatggaaaggtggacgttggaaaaaaggctgaagctgtagcaacagttgttgctgcagtaga

SEQ ID NO: 191435 - DNA, 1118 bp, Homo sapiens
  Payload ID: 17810
  Gene Name: titin
  ENST ID: ENST00000446966
  CDS Start-End: 1-1118
gttgttcctgaaaagaaggtgcctctggtggttcccaaaaagccagaagccccacctgctaaagtgcctgaagttccaaaagaagttgttccagaaaagaaagtagctgttcccaaaaagccagaagtcccaccagcaaaagtgccagaagtgccaaagaaacctgtcttggaagagaaaccagctgttcctgttccagaaagagcggagtctcctcccccagaagtatatgaagaacctgaggaaattgctcctgaagaggaaattgctcctgaagaggaaaagccagttcctgttgcagaagaggaggaaccagaggttccacctccagcagtgcctgaagagcccaagaagatcatcccagagaagaaagttcctgtcatcaaaaaaccagaagcaccgcctcctaaagaacctgagatgccaaagaaagttgttccagtgaagaaggtcccaactgttaagaagccagaaacaccagcagctaaagtgcctgaggtgcccaagaaacttgttccagtaaagaaagaacctgtgcctgttaccaaaaaaccagaagttcttccagaaaaagtgcccaaagtgcctgagaaaatcatcccagaaaaggaagtgtctgtgcctatccctgcagagccagaagttccacctgctgaagttgaagagactcctgaggaaataatatatgaagaaaaagcatctataaccattggtagaaaagagactccccctgttgaagaacgtgaaattgaaaagtatattaaacctgaagagcccgaacctgaaccacagcctgaagaaataccagtaaaagaacctgaacctgaaaaggttattgagaagccaaaactcaaaccaagacccccacctcctccacctgctccacctaaggaagatgtgaaggagaaaatattccaacttaaagctattccaaagaagaaagttcctgaaaaacctcaggttccagaaaaagtggagcttacacctctgaaagtaccagaaccaccacctccaaaacctgttgaagaggttgaagtacctactgttacaaaaagggaaaggaagattcctgaaccaacaaaagtgcctgaaatcaagccagcaatacctctccctgc
